United States Patent Application Publication US 2011/0183924 A1 - sequence listing, part 299

SEQ ID NO: 1027200 - protein, 216 aa, Homo sapiens
MQITASRTGKVYPACHFLLAVSAGARQHVCGTAQSLADRLAPGGHSVRQQVHPADEAPHPGAHHQPVPSYQLYFWYKRAPLREGQLCCSQISFKLPGGELNPGEDEVEGLKRLMTEILGRQDGVLQDWVIDDCIGNWWRPNFEPPQYPYIPAHITKPKEHKKLFLVQLQEKALFAVPKNYKLVAAPLFELYDNAPGYGPIISSLPQLLSRFNFIYN

SEQ ID NO: 1027201 - protein, 227 aa, Homo sapiens; identical to SEQ ID NO: 769835

SEQ ID NO: 1027202 - protein, 184 aa, Homo sapiens
MSVVPPNRSQTGWPRGVTQFGNKYIQQTKPLTLERTINLYPLTNYTFGTKEPLYEKDSSVAARFQRMREEFDKIGMRRTVEGVLIVHEHRLPHVLLLQLGTTFFKLPGGELNPGEDEVEGLKRLMTEILGRQDGVLQDWVIDDCIGNWWRPNFEPPQYPYIPAHITKPKEHKKLFLVQLQEKGK

SEQ ID NO: 1027203 - protein, 205 aa, Homo sapiens
MSVVPPNRSQTGWPRGVTQFGNKYIQQTKPLTLERTINLYPLTNYTFGTKEPLYEKDSSVAARFQRMREEFDKIGMRRTVEGVLIVHEHRLPHVLLLQLGTTFFKLPGGELNPGEDEVEGLKRLMTEILGRQDGVLQDWVIDDCIGNWWRPNFEPPQYPYIQIQGRARWLMPVIPALQEAEAGGSPVEVQEFETSLANMVKARLY

SEQ ID NO: 1027204 - protein, 373 aa, Homo sapiens
FISAGDQLTLRMQTAESDGAMYALFLLASLLGAALAGPVLGLKECTRGSAVWCQNVKTASDCGAVKHCLQTVWNKPTVKSLPCDICKDVVTAAGDMLKDNATEEEILVYLEKTCDWLPKPNMSASCKEIVDSYLPVILDIIKGEMSRPGEVCSALNLCESLQKHLAELNHQKQLESNKIPELDMTEVVAPFMANIPLLLYPQDGPRSKPQPKDNGDVCQDCIQMVTDIQTAVRTNSTFVQALVEHVKEECDRLGPGMADICKNYISQYSEIAIQMMMHMQPKEICALVGFCDEVRRDAHARLVVPRQSGPPRNVIPALELVEPIKKYEVPGKSDVYWEVCEFLVNGGDRSRDEINERVLSKEILDACDIDVVE

SEQ ID NO: 1027205 - protein, 278 aa, Homo sapiens
MLKDNATEEEILVYLEKTCDWLPKPNMSASCKEIVDSYLPVILDIIKGEMSRPGEVCSALNLCESLQKHLAELNHQKQLESNKIPELDMTEVVAPFMANIPLLLYPQDGPRSKPQPKDNGDVCQDCIQMVTDIQTAVRTNSTFVQALVEHVKEECDRLGPGMADICKNYISQYSEIAIQMMMHMQPKEICALVGFCDEVRRDAHARLVVPRQSGPPKNVIPALELVEPIKKYEVPGKSDVYWEVVNCLVNGGDRSRDEINERVLSKEILDACDIDVVE

SEQ ID NO: 1027206 - protein, 173 aa, Homo sapiens
MQVDPQKYKGIFNGFSVTLKEDGVRGLAKGWAPTFLGYSMQGLCKFGFYEVFKVLYSNMLGEENTYLWRTSLYLAASASAEFFADIALAPMEAAKVRIQTQPGYANTLRDAAPKMYKEEGLKAFYKGVAPLWMRQIPYTMMKFACFERTVEALYKFGVPKARSECSKPRAAGL

SEQ ID NO: 1027207 - protein, 121 aa, Homo sapiens
FPREWLCDRHLREKMFSSVAHLARANPFNTPHLQLVHDGLGDLRSSSPGPTGQPRRPRNLAAAAVEEYSCEFGSAKYYALCGFGGVLSCGLTHTCCGSPMRISGDKLPDIRERSGPPPRER

SEQ ID NO: 1027208 - protein, 117 aa, Homo sapiens
FPREWLCDRHLREKMFSSVAHLARANPFNTPHLQLVHDGLGDLRSSSPGPTGQPRRPRNLAAAAVEEYSCEFGSAKYYALCGFGGVLSCGLTHTCCGSPGFSEMPYAGGPPKVQGHI

SEQ ID NO: 1027209 - protein, 220 aa, Homo sapiens
QSDHLKKRYPHLQAHIKDRSCTGQLYLLQHLPLPGKMKILVAFLVVLTIFGIQSHGYEVFNIISPSNNGGNVQETVTIDNEKNTAIINIHAGSCSSTTIFDYKHGYIASRVLSRRACFILKMDHQNIPPLNNLQWYIYEKQALDNMFSSKYTWVKYNPLESLIKDVDWFLLGSPIEKLCKHIPLYKGEVVENTHNVGAGGCAKAGLLGILGISICADIHV

SEQ ID NO: 1027210 - protein, 109 aa, Homo sapiens
QSDHLKKRYPHLQAHIKDRSCTGQLYLLQHLPLPGKMKILVAFLVVLTIFGIQSHGYEVFNIISPSNNGGNVQETVTIDNEKNTAIINIHAGSCSSTTIFDQRLPEGCT

SEQ ID NO: 1027211 - protein, 197 aa, Homo sapiens
QSDHLKKRYPHLQAHIKDRSCTGQLYLLQHLPLPGKMKILVAFLVVLTIFGIQSHGYEVFNIISPSNNGGNVQETVTIDNEKNTAIINIHAGSCSSTTIFDYKHGYIASRVLSRRACFILKMDHQNIPPLNNLQWYIYEKQALDNMFSSKYTWVKYNPLESLIKDVDWFLLGSPIEKLCKHIPLYKGEVVENTREYQ

SEQ ID NO: 1027212 - protein, 815 aa, Homo sapiens
MSKQFQAFGDLFDEAIKLGLTAIQTQNPGFYYQQAAYYAQERKQLAKTLCNHEASVMYPNPDPLETQTGVLDFYGQRSWRQGILSFDLSDPEKEKVGILAIQLKERNVVHSEIIITLLSNAVAQFKKYKCPRMKSHLMVQMGEEYYYAKDYTKALKLLDYVMCDYRSEGWWTLLTSVLTTALKCSYLMAQLKDYITYSLELLGRASTLKDDQKSRIEKNLINVLMNESPDPEPDCDILAVKTAQKLWADRISLAGSNIFTIGVQDFVPFVQCKAKFHAPSFHVDVPVQFDIYLKADCPHPIRFSKLCVSFNNQEYNQFCVIEEASKANEVLENLTQGKMCLVPGKTRKLLFKFVAKTEDVGKKIEITSVDLALGNETGRCVVLNWQGGGGDAASSQEALQAARSFKRRPKLPDNEVHWDSIIIQASTMIISRVPNISVHLLHEPPALTNEMYCLVVTVQSHEKTQIRDVKLTAGLKPGQDANLTQKTHVTLHGPELCDESYPALLTDIPVGDLHPGEQLEKMLYVRCGTVGSRMFLVYVSYLINTTVEEKEIVCKCHKDETVTIETVFPFDVAVKFVSTKFEHLERVYADIPFLLMTDLLSASPWALTIVSSELQLAPSMTTVDQLESQVDNVILQTGESASECFCLQCPSLGNIEGGVATGHYIISWKRTSAMENIPIITTVITLPHVIVENIPLHVNADLPSFGRVRESLPVKYHLQNKTDLVQDVEISVEPSDAFMFSGLKQIRLRILPGTEQEMLYNFYPLMAGYQQLPSLNINLLRFPNFTNQLLRRFIPTSIFVKPQGRLMDDTSIAAA

SEQ ID NO: 1027213 - protein, 669 aa, Homo sapiens
MSCVSSYAGFDLSDPEKEKVGILAIQLKERNVVHSEIIITLLSNAVAQFKKYKCPRMKSHLMVQMGEEYYYAKDYTKALKLLDYVMCDYRSEGWWTLLTSVLTTALKCSYLMAQLKDYITYSLELLGRASTLKDDQKSRIEKNLINVLMNESPDPEPDCDILAVKTAQKLWADRISLAGSNIFTIGVQDFVPFVQCKAKFHAPSFHVDVPVQFDIYLKADCPHPIRFSKLCVSFNNQEYNQFCVIEEASKANEVLENLTQGKMCLVPGKTRKLLFKFVAKTEDVGKKIEITSVDLALGNETGRCVVLNWQGGGGDAASSQEALQAARSFKRRPKLPDNEVHWDSIIIQASTMIISRVPNISVHLLHEPPALTNEMYCLVVTVQSHEKTQIRDVKLTAGLKPGQDANLTQKTHVTLHGTELCDESYPALLTDIPVGDLHPGEQLEKMLYVRCGTVGSRMFLVYVSYLINTTVEEKEIVCKCHKDETVTIETVFPFDVAVKFVSTKFEHLERVYADIPFLLMTDLLSASPWALTIVSSELQLAPSMTTVDQLESQVDNVILQTGESASECFCLQCPSLGNIEGGVATGHYIISWKRTSAMENIPIITTVITLPHVIVENIPLHVNADLPSLNINLLRFPNFTNQLLRRFIPTSIFVKPQGRLMDDTSIAAA

SEQ ID NO: 1027214 - protein, 739 aa, Homo sapiens
MSCVSSYAGFDLSDPEKEKVGILAIQLKERNVVHSEIIITLLSNAVAQFKKYKCPRMKSHLMVQMGEEYYYAKDYTKALKLLDYVMCDYRSEGWWTLLTSVLTTALKCSYLMAQLKDYITYSLELLGRASTLKDDQKSRIEKNLINVLMNESPDPEPDCDILAVKTAQKLWADRISLAGSNIFTIGVQDFVPFVQCKAKFHAPSFHVDVPVQFDIYLKADCPHPIRFSKLCVSFNNQEYNQFCVIEEASKANEVLENLTQGKMCLVPGKTRKLLFKFVAKTEDVGKKIEITSVDLALGNETGRCVVLNWQGGGGDAASSQEALQAARSFKRRPKLPDNEVHWDSIIIQASTMIISRVPNISVHLLHEPPALTNEMYCLVVTVQSHEKTQIRDVKLTAGLKPGQDANLTQKTHVTLHGTELCDESYPALLTDIPVGDLHPGEQLEKMLYVRCGTVGSRMFLVYVSYLINTTVEEKEIVCKCHKDETVTIETVFPFDVAVKFVSTKFEHLERVYADIPFLLMTDLLSASPWALTIVSSELQLAPSMTTVDQLESQVDNVILQTGESASECFCLQCPSLGNIEGGVATGHYIISWKRTSAMENIPIITTVITLPHVIVENIPLHVNADLPSFGRVRESLPVKYHLQNKTDLVQDVEISVEPSDAFMFSGLKQIRLRILPGTEQEMLYNFYPLMAGYQQLPSLNINLLRFPNFTNQLLRRFIPTSIFVKPQGRLMDDTSIAAA

SEQ ID NO: 1027215 - protein, 717 aa, Homo sapiens
MSCVSSYAGFDLSDPEKEKVGILAIQLKERNVVHSEIIITLLSNAVAQFKKYKCPRMKSHLMVQMGEEYYYAKDYTKALKLLDYVMCDYRSEGWWTLLTSVLTTALKCSYLMAQLKDYITYSLELLGRASTLKDDQKSRIEKNLINVLMNESPDPEPDCDILAVKTAQKLWADRISLAGSNIFTIGVQDFVPFVQCKAKFHAPSFHVDVPVQFDIYLKADCPHPIRFSKLCVSFNNQEYNQFCVIEEASKANEVLENLTQGKMCLVPGKTRKLLFKFVAKTEDVGKKIEITSVDLALGNETGRCVVLNWQGGGGDAASSQEALQAARSTMIISRVPNISVHLLHEPPALTNEMYCLVVTVQSHEKTQIRDVKLTAGLKPGQDANLTQKTHVTLHGTELCDESYPALLTDIPVGDLHPGEQLEKMLYVRCGTVGSRMFLVYVSYLINTTVEEKEIVCKCHKDETVTIETVFPFDVAVKFVSTKFEHLERVYADIPFLLMTDLLSASPWALTIVSSELQLAPSMTTVDQLESQVDNVILQTGESASECFCLQCPSLGNIEGGVATGHYIISWKRTSAMENIPIITTVITLPHVIVENIPLHVNADLPSFGRVRESLPVKYHLQNKTDLVQDVEISVEPSDAFMFSGLKQIRLRILPGTEQEMLYNFYPLMAGYQQLPSLNINLLRFPNFTNQLLRRFIPTSIFVKPQGRLMDDTSIAAA

SEQ ID NO: 1027216 - protein, 149 aa, Homo sapiens
MENIPIITTVITLPHVIVENIPLHVNADLSSFSVDLPSFGRVRESLPVKYHLQNKTDLVQDVEISVEPSDAFMFSGLKQIRLRILPGTEQEMLYNFYPLMAGYQQLPSLNINLLRFPNFTNQLLRRFIPTSIFVKPQGRLMDDTSIAAA

SEQ ID NO: 1027217 - protein, 739 aa, Homo sapiens; identical to SEQ ID NO: 1027214

SEQ ID NO: 1027218 - protein, 85 aa, Homo sapiens
NCLEVIPVIEDTISLLRLITVAGKGFIFDDGGATWFFSSYGGILELRRGIQAASCVGPGKSNLPFELRRKAGDCSRVTAGPIDLI

SEQ ID NO: 1027219 - protein, 84 aa, Homo sapiens
EFGTRSHQGCQVPFRPPIPNVGLLLRRCSGKGLHLAMTGEPRGFSRVTAGFSSYDGEFRLPLVLAQASPIFHSSCEGKLGIALE

SEQ ID NO: 1027220 - protein, 84 aa, Homo sapiens; identical to SEQ ID NO: 1027219

SEQ ID NO: 1027221 - protein, 76 aa, Homo sapiens
GGQHHAARVLHLHRQPRMFRGRPQNKDRDQHGPARREAVSSWAARPEPSSNWRLILWLGTFPAWLRGVRLRNHTSG

SEQ ID NO: 1027222 - protein, 121 aa, Homo sapiens
MAVSTTPPESSTSIVSRACFGAGPKTKTGTSMDRRAGRLSQLGGAARALFQLEAYPVAGNISCLAARSETKKPYLRLRREAGFDMCALGKKRRKCDTLSFKASTSKIEELDYIAVYLVKLQ

SEQ ID NO: 1027223 - protein, 213 aa, Homo sapiens
MERVHIAVGAVILAPLDLVQGGVREVELLGTVVDGQAIGGTDVLLDKGQDIGSRERRPHDAGMLLIPVGPEHEVLALVQNEGPWVVISRHSDDGLTLEGPWAGLVHCVARDGGCRVACPIESVPATVIGQAFHGAHVFHNGDPPGAIVVDLLDVPKVDVVEEDAIGGARRGACPVVKGQGDDVLHVLRVIEGLHGRIEVALIRQVDTLENGAL

SEQ ID NO: 1027224 - protein, 89 aa, Homo sapiens
MVQLDALVIDLHVHHQGGAVPKDHGARAVSLAACAHLFRHLISPPQLVPHDGQGGGLAQLAPHGIDDLQPTPIQVAAVDGMDPGDIHLS

SEQ ID NO: 1027225 - protein, 71 aa, Homo sapiens
LDVQLFVCVPATVSGFDGHRMGGKKATFGGQKQKRLSSFRSMGTGPRLEPLPGILAFCTQHFAAPLLNHIN

SEQ ID NO: 1027226 - protein, 197 aa, Homo sapiens
MGEAGQAGRAALGGAQGPGPAPQPFCNKGQARAPGHRRAAFYDLWASDNPLDRPLVGQDEFFLEQTKKKGVKRPARLHTKPSQAPAVEVAPAGASYNPSFEDHQNLLSAATRWSCSGRRRRRSWSGSWPCHATEQPPPRRSTFQELCEGLLEESDGEGEPGRARAELRMPSLSQPRRLDTQRKTDSTGERRAQVRYK

SEQ ID NO: 1027227 - protein, 252 aa, Homo sapiens
HAYATRLMAAGGSGVGGKRSSKSDADSGFLGLRPTSVDPALRRRRRGPRNKKRGWRRLAQEPLGLEVDQFLEDVRLQERTSGSALFVLMAAQNEKISFFRWENMYFTYVIKTVLDHKGRRNPKVQKDSPLACSKENPLGGFEPFYTFAGTTIPEWFPFVPAQYDVPFDPPPRFPPKLAPNEEGFNVAGNTLKAMALIGGQDMAWALNGLGGPDAFDPLWARCLAAKGAPIGPPGLSTSKTHFSLPNNMGANT

SEQ ID NO: 1027228 - protein, 205 aa, Homo sapiens
MPSQAPAVEVAACRAGRAALGGAQGPGPAPQPFCNKGQARAPGHRRAAFYDLWASDNPLDRPLVGQDEFFLEQTKKKGVKRPARLHTKPSQAPAVEVAPAGASYNPSFEDHQNLLSAATRWSCSGRRRRRSWSGSWPCPATEQPPPRRSTFQELCEGLLEESDGEGEPGRARAELRMPSLSQPRRLDTQRKTDSTGERRAQVRYK

SEQ ID NO: 1027229 - protein, 147 aa, Homo sapiens
AVLTTLAQVGTHCRQHLEAKASPAAQAIHSVLLNQYCVAYKTPVSDRVTKCCTESLVNRRPCFSALEVDETYVPKEFNAETFTFHADICTLSEKERQIKKQTALVELVKHKPKASQEPLKAPTASSSSSCTAALQAFPQADLLYRGG

SEQ ID NO: 1027230 - protein, 143 aa, Homo sapiens
  misc_feature (15)..(15): Xaa can be any naturally occurring amino acid
DRPHTSPQCPPISAXTPKPSRTPRANTTLRCTRTQLCVLHHHTASKRHSHPMLHKSLVTAAPAFQLSQPIQHRFLRRTDPSRTNLHLLSLSHPSPRHHKSTCNLPPPPLPALAEPPCKPAPKQTCSTEEGKKLVAASQAALGL

SEQ ID NO: 1027231 - protein, 292 aa, Homo sapiens
MCESACWTWPSLAADFVESKDVCKNYAEAKDVFLGMFLYEYARRHPDYSVVLLLRLAKTYETTLEKCCAAADPHECYAKVFDEFKPLVEEPQNLIKQNCELFEQLGEYKFQNALLVRYTKKVPQVSTPTLVEVSRNLGKVGSKCCKHPEAKRMPCAEDYLSVVLNQLCVLHEKTPVSDRVTKCCTESLVNRRPCFSALEVDETYVPKEFNAETFTFHADICTLSEKERQIKKQTALVELVKHKPKATKEQLKAVMDDFAAFVEKCCKADDKETCFAEEGKKLVAASQAALGL

SEQ ID NO: 1027232 - protein, 324 aa, Homo sapiens
  misc_feature (18)..(18): Xaa can be any naturally occurring amino acid
ISNAIQPPPISINQITTXTKMLKPCENPTHAEVKMMRSCYLPSLAADFVESKDVCKNYAEAKDVFLGMFLYEYARRHPDYSVVLLLRLAKTYETTLEKCCAAADPHECYAKVFDEFKPLVEEPQNLIKQNCELFEQLGEYKFQNALLVRYTKKVPQVSTPTLVEVSRNLGKVGSKCCKHPEAKRMPCAEDYLSVVLNQLCVLHEKTPVSDRVTKCCTESLVNRRPCFSALEVDETYVPKEFNAETFTFHADICTLSEKERQIKKQTALVELVKHKPKATKEQLKAVMDDFAAFVEKCCKADDKETCFAEEGKKLVAASQAALGL

SEQ ID NO: 1027233 - protein, 324 aa, Homo sapiens; identical to SEQ ID NO: 1027232
  misc_feature (18)..(18): Xaa can be any naturally occurring amino acid

SEQ ID NO: 1027234 - protein, 306 aa, Homo sapiens
  misc_feature (18)..(18): Xaa can be any naturally occurring amino acid
ISNAIQPPPISINQITTXTKMLKPCENPTHAEVKMMRSCYLPSLAADFVESKDVCKNYAEAKDVFLGMFLYEYARRHPDYSVVLLLRLAKTYETTLEKCCAAADPHECYAKVFDEFKPLVEEPQNLIKQNCELFEQLGEYKFQNALLVRYTKKVPQVSTPTLVEVSRNLGKVGSKCCKHPEAKRMPCAEDYLSVVLNQLCVLHERRPCFSALEVDETYVPKEFNAETFTFHADICTLSEKERQIKKQTALVELVKHKPKATKEQLKAVMDDFAAFVEKCCKADDKETCFAEEGKKLVAASQAALGL

SEQ ID NO: 1027235 - protein, 324 aa, Homo sapiens
  misc_feature (18)..(18): Xaa can be any naturally occurring amino acid
  misc_feature (208)..(209): Xaa can be any naturally occurring amino acid
  misc_feature (217)..(218): Xaa can be any naturally occurring amino acid
  misc_feature (220)..(221): Xaa can be any naturally occurring amino acid
  misc_feature (223)..(224): Xaa can be any naturally occurring amino acid
  misc_feature (235)..(237): Xaa can be any naturally occurring amino acid
  misc_feature (242)..(242): Xaa can be any naturally occurring amino acid
  misc_feature (244)..(245): Xaa can be any naturally occurring amino acid
  misc_feature (247)..(247): Xaa can be any naturally occurring amino acid
  misc_feature (254)..(255): Xaa can be any naturally occurring amino acid
ISNAIQPPPISINQITTXTKMLKPCENPTHAEVKMMRSCYLPSLAADFVESKDVCKNYAEAKDVFLGMFLYEYARRHPDYSVVLLLRLAKTYETTLEKCCAAADPHECYAKVFDEFKPLVEEPQNLIKQNCELFEQLGEYKFQNALLVRYTKKVPQVSTPTLVEVSRNLGKVGSKCCKHPEAKRMPCAEDYLSVVLNQLCVLHEKPPXXARPPKRRXXPXXPXXPPPPSPGSRRXXXPQEPXAXXPXPHADPRXXPEKERQIKKQTALVELVKHKPKATKEQLKAVMDDFAAFVEKCCKADDKETCFAEEGKKLVAASQAALGL

SEQ ID NO: 1027236 - protein, 304 aa, Homo sapiens
  misc_feature (18)..(18): Xaa can be any naturally occurring amino acid
ISNAIQPPPISINQITTXTKMLKPCENPTHAEVKMMRSCYLPSLAADFVESKDVCKNYAEAKDVFLGMFLYEYARRHPDYSVVLLLRLAKTYETTLEKCCAAADPHECYAKVFDEFKPLVEEPQNLIKQNCELFEQLGEYKFQNALLVRYTKKVPQVSTPTLVEVSRNLGKVGSKCCKHPEAKRMPCAEDYLSVVLNQLCVLHEKTPVSDRVTKCCTESLVNRRPCFSALEVDETYVPKEFNAETFTFHADICTLSEKERQIKKQTALVELVKHKKCCKADDKETCFAEEGKKLVAASQAALGL

SEQ ID NO: 1027237 - protein, 324 aa, Homo sapiens; identical to SEQ ID NO: 1027232
  misc_feature (18)..(18): Xaa can be any naturally occurring amino acid

SEQ ID NO: 1027238 - protein, 324 aa, Homo sapiens; identical to SEQ ID NO: 1027232
  misc_feature (18)..(18): Xaa can be any naturally occurring amino acid

SEQ ID NO: 1027239 - protein, 324 aa, Homo sapiens; identical to SEQ ID NO: 1027232
  misc_feature (18)..(18): Xaa can be any naturally occurring amino acid

SEQ ID NO: 1027240 - protein, 104 aa, Homo sapiens
  misc_feature (8)..(8): Xaa can be any naturally occurring amino acid
  misc_feature (12)..(12): Xaa can be any naturally occurring amino acid
MTETHSEXLAIXFTVIYLGEFNAETFTFHADICTLSEKERQIKKQTALVELVKHKPKATKEQLKAVMDDFAAFVEKCCKADDKETCFAEEGKKLVAASQAALGL

SEQ ID NO: 1027241 - protein, 301 aa, Homo sapiens
  misc_feature (18)..(18): Xaa can be any naturally occurring amino acid
ISNAIQPPPISINQITTXTKMLKPCENPTHAEVKMMRSCYLPSLAADFVESKDVCKNYAEAKDVFLGMFLYEYARRHPDYSVVLLLRLAKTYETTLEKCCAAADPHECYAKVFDEFKPLVEEPQNLIKQNCELFEQLGEYKFQNALLVRYTKKVPQVSTPTLVEVSRNLGKVGSKCCKHPEAKRMPCAEDYLSVVLNQLCVLHEKTPVSDRVTKCCTESLVNRRPCFSALEVDETYVPKEFNAETFTFHADICTLSEKERQIKKQTALVELVKHKLKAPKEPPPSSHGRLPSSLRQQVLQG

SEQ ID NO: 1027242 - protein, 447 aa, Homo sapiens
MSASKIPLFKMKDLILILCLLEMSFAVPFFPQQSGTPGMASLSLETMRQLGSLQRLNTLSQYSRYGFGKSFNSLWMHGLLPPHSSLPWMRPREHETQQYEYSLPVHPPPLPSQPSLKPQQPGLKPFLQSAAATTNQATALKEALQPPIHLGHLPLQEGELPLVQQQVAPSDKPPKPELPGVDFADPQGPSLPGMDFPDPQGPSLPGLDFADPQGSTIFQIARLISHGPMPQNKQSPLYPGMLYVPFGANQLNAPARLGIMSSEEVAGGREDPMAYGAMFPGFGGMRPGFEGMPHNPAMGGDFTLEFDSPVAATKGPENEEGGAQGSPMPEANPDNLENPAFLTELEPAPHAGLLALPKDDIPGLPRSPSGKMKGLPSVTPAAADPLMTPELADVYRTYDADMTTSVDFQEEATMDTTMAPNSLQTSMPGNKAQEPEMMHDAWHFQEP

SEQ ID NO: 1027243 - protein, 434 aa, Homo sapiens
YSPPFYNYIMKEKRTFVLPHICYPGMASLSLETMRQLGSLQRLNTLSQYSRYGFGKSFNSLWMHGLLPPHSSLPWMRPREHETQQYEYSLPVHPPPLPSQPSLKPQQPGLKPFLQSAAATTNQATALKEALQPPIHLGHLPLQEGELPLVQQQVAPSDKPPKPELPGVDFADPQGPSLPGMDFPDPQGPSLPGLDFADPQGSTIFQIARLISHGPMPQNKQSPLYPGMLYVPFGANQLNAPARLGIMSSEEVAGGREDPMAYGAMFPGFGGMRPGFEGMPHNPAMGGDFTLEFDSPVAATKGPENEEGGAQGSPMPEANPDNLENPAFLTELEPAPHAGLLALPKDDIPGLPRSPSGKMKGLPSVTPAAADPLMTPELADVYRTYDADMTTSVDFQEEATMDTTMAPNSLQTSMPGNKAQEPEMMHDAWHFQEP

SEQ ID NO: 1027244 - protein, 441 aa, Homo sapiens
CYTNYWYTRPEDKLTRTEHNSVTLTQQSGTPGMASLSLETMRQLGSLQRLNTLSQYSRYGFGKSFNSLWMHGLLPPHSSLPWMRPREHETQQYEYSLPVHPPPLPSQPSLKPQQPGLKPFLQSAAATTNQATALKEALQPPIHLGHLPLQEGELPLVQQQVAPSDKPPKPELPGVDFADPQGPSLPGMDFPDPQGPSLPGLDFADPQGSTIFQIARLISHGPMPQNKQSPLYPGMLYVPFGANQLNAPARLGIMSSEEVAGGREDPMAYGAMFPGFGGMRPGFEGMPHNPAMGGDFTLEFDSPVAATKGPENEEGGAQGSPMPEANPDNLENPAFLTELEPAPHAGLLALPKDDIPGLPRSPSGKMKGLPSVTPAAADPLMTPELADVYRTYDADMTTSVDFQEEATMDTTMAPNSLQTSMPGNKAQEPEMMHDAWHFQEP

SEQ ID NO: 1027245 - protein, 372 aa, Homo sapiens
MHGLLPPHSSLPWMRPREHETQQYEYSLPVHPPPLPSQPSLKPQQPGLKPFLQSAAATTNQATALKEALQPPIHLGHLPLQEGELPLVQQQVAPSDKPPKPELPGVDFADPQGPSLPGMDFPDPQGPSLPGLDFADPQGSTIFQIARLISHGPMPQNKQSPLYPGMLYVPFGANQLNAPARLGIMSSEEVAGGREDPMAYGAMFPGFGGMRPGFEGMPHNPAMGGDFTLEFDSPVAATKGPENEEGGAQGSPMPEANPDNLENPAFLTELEPAPHAGLLALPKDDIPGLPRSPSGKMKGLPSVTPAAADPLMTPELADVYRTYDADMTTSVDFQEEATMDTTMAPNSLQTSMPGNKAQEPEMMHDAWHFQEP

SEQ ID NO: 1027246 - protein, 409 aa, Homo sapiens
MASLSLETMRQLGSLQRLNTLSQYSRYGFGKSFNSLWMHGLLPPHSSLPWMRPREHETQQYEYSLPVHPPPLPSQPSLKPQQPGLKPFLQSAAATTNQATALKEALQPPIHLGHLPLQEGELPLVQQQVAPSDKPPKPELPGVDFADPQGPSLPGMDFPDPQGPSLPGLDFADPQGSTIFQIARLISHGPMPQNKQSPLYPGMLYVPFGANQLNAPARLGIMSSEEVAGGREDPMAYGAMFPGFGGMRPGFEGMPHNPAMGGDFTLEFDSPVAATKGPENEEGGAQGSPMPEANPDNLENPAFLTELEPAPHAGLLALPKDDIPGLPRSPSGKMKGLPSVTPAAADPLMTPELADVYRTYDADMTTSVDFQEEATMDTTMAPNSLQTSMPGNKAQEPEMMHDAWHFQEP

SEQ ID NO: 1027247 - protein, 409 aa, Homo sapiens; identical to SEQ ID NO: 1027246

SEQ ID NO: 1027248 - protein, 447 aa, Homo sapiens; identical to SEQ ID NO: 1027242

SEQ ID NO: 1027249 - protein, 212 aa, Homo sapiens
LSVEWVVQVERARVHSTWVVPNGGGGMYSIEYQIASEARRWEVGALSPGSHPHGLAREIRLVEDIFQQNVGKTSNIFGLQRIFPAGSIPLTRPAHSTSVSMSRLSLPSKNGSKKKGLKPKELFKKAERKGKESSALGPAGQLSYNLMDTYSHQALKTGSFQKAKFNITGACLNDSDDDSPDLDLDGNESPLLTVWGCPFNELELMPFSGFGV

SEQ ID NO: 1027250 - protein, 917 aa, Homo sapiens
DSSDEVILKPTGNQLTVEFLEENSFSVPILVLKKDGLGMTLPSPSFTVRDVEHYVGSDKEIDVIDVTRQADCKMKLGDFVKYYYSGKREKVLNVISLEFSDTRLSNLVETPKIVRKLSWVENLWPEECVFERPNVQKYCLMSVRDSYTDFHIDFGGTSVWYHVLKGEKIFYLIRPTNANLTLFECWSSSSNQNEMFFGDQVDKCYKCSVKQGQTLFIPTGWIHAVLTPVDCLAFGGNFLHSLNIEMQLKAYEIEKRLSTADLFRFPNFETICWYVGKHILDIFRGLRENRRHPASYLVHGGKALNLAFRAWTRKEALPDHEDEIPETVRTVQLIKDLAREIRLVEDIFQQNVGKTSNIFGLQRIFPAGSIPLTRPAHSTSVSMSRLSLPSKNGSKKKGLKPKELFKKAERKGKESSALGPAGQLSYNLMDTYSHQALKTGSFQKAKFNITGACLNDSDDDSPDLDLDGNESPLALLMSNGSTKRVKSLSKSRRTKIAKKVDKARLMAEQVMEDEFDLDSDDELQIDERLGKEKATLIIRPKFPRKLPRAKPCSDPNRVREPGEVEFDIEEDYTTDEDMVEGVEGKLGNGSGAGGILDLLKASSEAPASPSTQEAIQGMLCMANLQSSSSSPATSSLQAWWTGGQDRSSGSSSSGLGTVSNSPASQRTPGKRPIKRPAYWRTESEEEEENASLDEQDSLGACFKDAEYIYPSLESDDDDPALKSRPKKKKNSDDAPWSPKARVTPTLPKQDRPVREGTRVASIETGLAAAAAKLAQQELQKAQKKKYIKKKPLLKEVEQPRPQDSNLSLTVPAPTVAATPQLVTSSSPLPPPEPKQEALSGSLADHEYTARPNAFGMAQANRSTTPMAPGVFLTQRRPSVGSQSNQAGQGKRPKKGLATAKQRLGRILKIHRNGKLLL

SEQ ID NO: 1027251 - protein, 441 aa, Homo sapiens
MSNGSTKRVKSLSKSRRTKIAKKVDKARLMAEQVMEDEFDLDSDDELQIDERLGKEKATLIIRPKFPRKLPRAKPCSDPNRVREPGEVEFDIEEDYTTDEDMVEGVEGKLGNGSGAGGILDLLKASSEAPASPSTQEAIQGMLCMANLQSSSSSPATSSLQAWWTGGQDRSSGSSSSGLGTVSNSPASQRTPGKRPIKRPAYWRTESEEEEENASLDEQDSLGACFKDAEYIYPSLESDDDDPALKSRPKKKKNSDDAPWSPKARVTPTLPKQDRPVREGTRVASIETGLAAAAAKLAQQELQKAQKKKYIKKKPLLKEVEQPRPQDSNLSLTVPAPTVAATPQLVTSSSPLPPPEPKQEALSGSLADHEYTARPNAFGMAQANRSTTPMAPGVFLTQRRPSVGSQSNQAGQGKRPKKGLATAKQRLGRILKIHRNGKLLL

SEQ ID NO: 1027252 - protein, 300 aa, Homo sapiens [sequence omitted]

SEQ ID NO: 1027253 - protein, 917 aa, Homo sapiens; identical to SEQ ID NO: 1027250

SEQ ID NO: 1027254 - protein, 799 aa, Homo sapiens
DSSDEVILKPTGNQLTVEFLEENSFSVPILVLKKDGLGMTLPSPSFTVRDVEHYVGSDKEIDVIDVTRQADCKMKLGDFVKYYYSGKREKVLNVISLEFSDTRLSNLVETPKIVRKLSWVENLWPEECVFERPNVQKYCLMSVRDSYTDFHIDFGGTSVWYHVLKGEKIFYLIRPTNANLTLFECWSSSSNQNEMFFGDQVDKCYKCSVKQGQTLFIPTGWIHAVLTPVDCLAFGGNFLHSLNIEMQLKAYEIEKRLSTADLFRFPNFETICWYVGKHILDIFRGLRENRRHPASYLVHGGKALNLAFRAWTRKEALPDHEDEIPETVRTVQLIKDLAREIRLVEDIFQQNVGKTSNIFGLQRIFPAGSIPLTRPAHSTSVSMSRLSLPSKNGSKKKGLKPKELFKKAERKGKESSALGPAGQLSYNLMDTYSHQALKTGSFQKAKFNITGACLNDSDDDSPDLDLDGNESPLALLMSNGSTKRVKSLSKSRRTKIAKKVDKARLMAEQVMEDEFDLDSDDELQIDERLGKEKATLIIRPKFPRKLPRAKPCSDPNRVREPGEVEFDIEEDYTTDEDMVEGVEGKLGNGSGAGGILDLLKASRQVGGPDYAALTEAPASPSTQEAIQGMLCMANLQSSSSSPATSSLQAWWTGGQDRSSGSSSSGLGTVSNSPASQRTPGKRPIKRPAYWRTESEEEEENASLDEQDSLGACFKDAEYIYPSLESDDDDPALKSRPKKKKNSDDAPWSPKARVTPTLPKQDRPVREGTRVASIETGLAAAAAKLAQQVKKMKLSLTDSG

SEQ ID NO: 1027255 - protein, 928 aa, Homo sapiens
DSSDEVILKPTGNQLTVEFLEENSFSVPILVLKKDGLGMTLPSPSFTVRDVEHYVGSDKEIDVIDVTRQADCKMKLGDFVKYYYSGKREKVLNVISLEFSDTRLSNLVETPKIVRKLSWVENLWPEECVFERPNVQKYCLMSVRDSYTDFHIDFGGTSVWYHVLKGEKIFYLIRPTNANLTLFECWSSSSNQNEMFFGDQVDKCYKCSVKQGQTLFIPTGWIHAVLTPVDCLAFGGNFLHSLNIEMQLKAYEIEKRLSTADLFRFPNFETICWYVGKHILDIFRGLRENRRHPASYLVHGGKALNLAFRAWTRKEALPDHEDEIPETVRTVQLIKDLAREIRLVEDIFQQNVGKTSNIFGLQRIFPAGSIPLTRPAHSTSVSMSRLSLPSKNGSKKKGLKPKELFKKAERKGKESSALGPAGQLSYNLMDTYSHQALKTGSFQKAKFNITGACLNDSDDDSPDLDLDGNESPLALLMSNGSTKRVKSLSKSRRTKIAKKVDKARLMAEQVMEDEFDLDSDDELQIDERLGKEKATLIIRPKFPRKLPRAKPCSDPNRVREPGEVEFDIEEDYTTDEDMVEGVEGKLGNGSGAGGILDLLKASRQVGGPDYAALTEAPASPSTQEAIQGMLCMANLQSSSSSPATSSLQAWWTGGQDRSSGSSSSGLGTVSNSPASQRTPGKRPIKRPAYWRTESEEEEENASLDEQDSLGACFKDAEYIYPSLESDDDDPALKSRPKKKKNSDDAPWSPKARVTPTLPKQDRPVREGTRVASIETGLAAAAAKLAQQELQKAQKKKYIKKKPLLKEVEQPRPQDSNLSLTVPAPTVAATPQLVTSSSPLPPPEPKQEALSGSLADHEYTARPNAFGMAQANRSTTPMAPGVFLTQRRPSVGSQSNQAGQGKRPKKGLATAKQRLGRILKIHRNGKLLL

SEQ ID NO: 1027256 - protein, 817 aa, Homo sapiens
DSSDEVILKPTGNQLTVEFLEENSFSVPILVLKKDGLGMTLPSPSFTVRDVEHYVGSDKEIDVIDVTRQADCKMKLGDFVKYYYSGKREKVLNVISLEFSDTRLSNLVETPKIVRKLSWVENLWPEECVFERPNVQKYCLMSVRDSYTDFHIDFGGTSVWYHVLKGEKIFYLIRPTNANLTLFECWSSSSNQNEMFFGDQVDKCYKCSVKQGQTLFIPTGWIHAVLTPVDCLAFGGNFLHSLNIEMQLKAYEIEKRLSTADLFRFPNFETICWYVGKHILDIFRGLRENRRHPASYLVHGGKALNLAFRAWTRKEALPDHEDEIPETVRTVQLIKDLAREIRLVEKFNITGACLNDSDDDSPDLDLDGNESPLALLMSNGSTKRVKSLSKSRRTKIAKKVDKARLMAEQVMEDEFDLDSDDELQIDERLGKEKATLIIRPKFPRKLPRAKPCSDPNRVREPGEVEFDIEEDYTTDEDMVEGVEGKLGNGSGAGGILDLLKASSEAPASPSTQEAIQGMLCMANLQSSSSSPATSSLQAWWTGGQDRSSGSSSSGLGTVSNSPASQRTPGKRPIKRPAYWRTESEEEEENASLDEQDSLGACFKDAEYIYPSLESDDDDPALKSRPKKKKNSDDAPWSPKARVTPTLPKQDRPVREGTRVASIETGLAAAAAKLAQQELQKAQKKKYIKKKPLLKEVEQPRPQDSNLSLTVPAPTVAATPQLVTSSSPLPPPEPKQEALSGSLADHEYTARPNAFGMAQANRSTTPMAPGVFLTQRRPSVGSQSNQAGQGKRPKKGLATAKQRLGRILKIHRNGKLLL

SEQ ID NO: 1027257 - protein, 942 aa, Homo sapiens
DSSDEVILKPTGNQLTVEFLEENSFSVPILVLKKDGLGMTLPSPSFTVRDVEHYVGSDKEIDVIDVTRQADCKMKLGDFVKYYYSGKREKVLNVISLEFSDTRLSNLVETPKIVRKLSWVENLWPEECVFERPNVQKYCLMSVRDSYTDFHIDFGGTSVWYHVLKGEKIFYLIRPTNANLTLFECWSSSSNQNEMFFGDQVDKCYKCSVKQGQTLFIPTGWIHAVLTPVDCLAFGGNFLHSLNIEMQLKAYEIEKRLSTADLFRFPNFETICWYVGKHILDIFRGLRENRRHPASYLVHGGKALNLAFRAWTRKEALPDHEDEIPETVRTVQLIKDLAREIRLVEDIFQQNVGKTSNIFGLQRIFPAGSIPLTRPAHSTSVSMSRLSLPSKNGSKKKGLKPKELFKKAERKGKESSALGPAGQLSYNLMDTYSHQALKTGSFQKAKFNITGACLNDSDDDSPDLDLDGNESPLALLMSNGSTKRVKSLSKSRRTKIAKKVDKARLMAEQVMEDEFDLDSDDELQIDERLGKEKATLIIRPKFPRKLPRAKPCSDPNRVREPGEVEFDIEEDYTTDEDMVEGVEGKLGNGSGAGGILDLLKASSEAPASPSTQEAIQGMLCMANLQSSSSSPATSSLQAWWTGGQDRSSGSSSSGLGTVSNSPASQRTPGKRPIKRPAYWRTESEEEEENASLDEQDSLGACFKDAEYIYPSLESDDDDPALKSRPKKKKNSDDAPWSPKARVTPTLPKQDRPVREGTRVASIETGLAAAAAKLAQQELQKAQKKKYIKKKPLLKEVEQPRPQDSNLSLTVPAPTVAATPQLVTSSSPLPPPEPKQEALSGSLADHEYTARPNAFGMAQANRSTTPMAPGVFLTQRRPSVGSQSNQAGQGKRPKKGLATAKQRLGRILKIHRNGKLLLRQVIVQAECRQAIHEPKLKRRDAHP

SEQ ID NO: 1027258 - protein, 122 aa, Homo sapiens
  misc_feature (69)..(69): Xaa can be any naturally occurring amino acid
PRVKTKRWMPIFLLFAASTRLDVCDRKGPGELIKENLATDDVMLLDTGTRSFVWVGKDSQEEEKTEALXSAKRYIETGPANRDRRTPITVVKQGFEPPSFVGWFLGWDNDYWFVDPLDRAMA

SEQ ID NO: 1027259 - protein, 1372 aa, Homo sapiens
QDTALPHSQAQQSGPTGQPSQPPGTATTPLEGDGLSAPTEVGDSPLQAQALGEAGVATGSEAQSSPQFQDHTEGEDQDASIPSGGRGLSQEGTGPPTSAGEGHSRTEDAAQELLLPESKGGSSEPGTELQTTEQQAGASASMAVDAVAEPANAVKGAGKEMKEKTQRMKQPPATTPPFKTHCQEAETKTKDEMAAAEEKVGKNEQGEPEDLKKPEGKNRSAAAVKNEKEQKNQEADVQEVKASTLSPGGGVTVFFHAIISLHFPFNPDLHKVFIRGGEEFGESKWDSNICELHYTRDLGHDRVLVEGIVCISKKHLDKYIPYKYVIYNGESFEYEFIYKHQQKKGEYVNRCLFIKSSLLGSGDWHQYYDIVYMKPHGRLQKVMNHITDGPRKDLAKGKQIAAALMLDSTFSILQTWDTINLNSFFTQFEQFCFVLQQPMIYEGQAQLWTDLQYREKEVKRYLWQHLKKHVVPLPDGKSTDFLPVDCPVRSKLKTGLIVLFVVEKIELLLEGSLDWLCHLLTSDASSPDEFHRDLSHILGIPQSWRLYLVNLCQRCMDTRTYTWLGALPVLHCCMELAPRHKDAWRQPEDTWAALEGLSFSPFREQMLDTSSLLQFMREKQHLLSIDEPLFRSWFSLLPLSHLVMYMENFIEHLGRFPAHILDCLSGIYYRLPGLEQVLNTQDVQDVQNVQNILEMLLRLLDTYRDKIPEEALSPSYLTVCLKLHEAICSSTKLLKFYELPALSAEIVCRMIRLLSLVDSAGQRDETGNNSVQTVFQGTLAATKRWLREVFTKNMLTSSGASFTYVKEIEVWRRLVEIQFPAEHGWKESLLGDMEWRLTKEEPLSQITAYCNSCWDTKGLEDSVAKTFEKCIIEAVSSACQSQTSILQGFSYSDLRKFGIVLSAVITKSWPRTADNFDDILKHLLTLADVKHVFRLCGTDEKILANVTEDAKRLIAVADSVLTKVVGDLLSGTILVGQLELIIKHKNQFLDIWQLREKSLSPQDEQCAVEEALDWRREELLLLKKEKRCVDSLLKMCGNVKHLIQVDFGVLAVRHSQDLSSKRLNDTMTVRLSTSSNSQRATHYHLSSQVQEMAGKIDLLRDSHIFQLFWREAAEPLSEPKEDQEAAELLSEPEEESERHILELQEVYDYLYQPSYRKFIKLHQDLKSGEVTLAEIDVIFKDFVNKYTDLDSELKIMCTVDHQGQRDWIKDRVEQIKEYHHLHQAVHAAKVILQVKESLGLNGDFSVLNTLLNFTDNFDDFRRETLDQINQELIQAKKLLQDISEARCKGLQALSLRKEFICWVREALGGINELKVFVDLASISAGENDIDVDRVACFHDAVQGYASLLFKLDPSVDFSAFYEASEKAVEGSG

SEQ ID NO: 1027260 - protein, 935 aa, Homo sapiens
QDTALPHSQAQQSGPTGQPSQPPGTATTPLEGDGLSAPTEVGDSPLQAQALGEAGVATGSEAQSSPQFQDHTEGEDQDASIPSGGRGLSQEGTGPPTSAGEGHSRTEDAAQELLLPESKGGSSEPGTELQTTEQQAGASASMAVDAVAEPANAVKGAGKEMKEKTQRMKQPPATTPPFKTHCQEAETKTKDEMAAAEEKVGKNEQGEPEDLKKPEGKNRSAAAVKNEKEQKNQEADVQEVKASTLSPGGGVTVFFHAIISLHFPFNPDLHKVFIRGGEEFGESKWDSNICELHYTRDLGHDRVLVEGIVCISKKHLDKYIPYKYVIYNGESFEYEFIYKHQQKKGEYVNRCLFIKSSLLGSGDWHQYYDIVYMKPHGRLQKVMNHITDGPRKDLAKGKQIAAALMLDSTFSILQTWDTINLNSFFTQFEQFCFVLQQPMIYEGQAQLWTDLQYREKEVKRYLWQHLKKHVVPLPDGKSTDFLPVDCPVRSKLKTGLIVLFVVEKIELLLEGSLDWLCHLLTSDASSPDEFHRDLSHILGIPQSWRLYLVNLCQRCMDTRTYTWLGALPVLHCCMELAPRHKDAWRQPEDTWAALEGLSFSPFREQMLDTSSLLQFMREKQHLLSIDEPLFRSWFSLLPLSHLVMYMENFIEHLGRFPAHILDCLSGIYYRLPGLEQVLNTQDVQDVQNVQNILEMLLRLLDTYRDKIPEEALSPSYLTVCLKLHEAICSSTKLLKFYELPALSAEIVCRMIRLLSLVDSAGQRDETGNNSVQTVFQGTLAATKRWLREVFTKNMLTSSGASFTYVKEIEVWRRLVEIQFPAEHGWKESLLGDMEWRLTKEEPLSQITAYCNSCWDTKGLEDSVAKTFEKCIIEAVSSACQVNNLSSWETDSGSQLCSAMTQLRAMKHPLGLSSSANSEIGKWAPSSLAKGNGAEI

SEQ ID NO: 1027261 - protein, 301 aa, Homo sapiens
  misc_feature (94)..(94): Xaa can be any naturally occurring amino acid
GTGPGVCRAPLWGVLFPLSLLGTAWGPAHWQDRGCLGFRGSTQMPFPPSLFSPVSPTFRVNPENPGEWKCFGNVGSCQGLWSLHRSHSLSSLCXQGGEEGVQHLAGNLSPQPRMTDPPSCVTKDSAGQRDETGNNSVQTVFQGTLAATKRWLREVFTKNMLTSSGASFTYVKEIEVWRRLVEIQFPAEHGWKESLLGDMEWRLTKEEPLSQITAYCNSCWDTKGLEDSVAKTFEKCIIEAVSSACQVNNLSSWETDSGSQLCSAMTQLRAMKHPLGLSSSANSEIGKWAPSSLAKGNGAEI

SEQ ID NO: 1027262 - protein, 306 aa, Homo sapiens
MTVRLSTSSNSQRATHYHLSSQVQEMAGKIDLLRDSHIFQLFWREAAEPLSEPKEDQEAAELLSEPEEESERHILELQEVYDYLYQPSYRKFIKLHQDLKSGEVTLAEIDVIFKDFVNKYTDLDSELKIMCTVDHQGQRDWIKDRVEQIKEYHHLHQAVHAAKVILQVKESLGLNGDFSVLNTLLNFTDNFDDFRRETLDQINQELIQAKKLLQDISEARCKGLQALSLRKEFICWVREALGGINELKVFVDLASISAGENDIDVDRVACFHDAVQGYASLLFKLDPSVDFSAFYEASEKAVEGSG

SEQ ID NO: 1027263 - protein, 207 aa, Homo sapiens
EKGEILAPTVACVLSFCPHKCDSARNLEWLKTVNESHGSVERSSLTLATAINQRGIYVIQAPKGGQKISPDTVLHLILPESPGSHEESREYSLEEVKELFDKLMLMSGKKDRNNTEVERFSEVFCSVQRLSQAFIDLHSAGNMLFRTWIPWPTAPPSRVCPSKWTLAWTLVTELKEGGDVTELLAALCRQMEHFPDSWKRFRTQPTA

SEQ ID NO: 1027264 - protein, 108 aa, Homo sapiens
RSSVAEQEVIWNSHGNSKEAGGGEPTVLTVFFIYSGTDEKILANVTEDAKRLIAVADSVLTKVVGDLLSGTILVGQLELIIKHKNQFLDIWQLSKHRDRYALYRLLRH

SEQ ID NO: 1027265 - protein, 174 aa, Homo sapiens
EFKIHFIKMLSRISGSQESQFILIREKQPWGFDHPIQGEELGVPVVTALGNLGIEGGWGCWDGQCLQLTDSGVLVNEFQSTESFFLQTDNFDDFRRETLDQINQELIQAKKLLQDISEARCKGLQALSLRKEFICWVREALGGKISLWGCVEVWRKFSDGALCGIPKLFGNTSP

SEQ ID NO: 1027266 - protein, 317 aa, Homo sapiens
CRLTLVEIPHGRRSLVIIAISSHLVMYMENFIEHLGRFPAHILDCLSGIYYRLPGLEQVLNTQDVQDVQNVQNILEMLLRLLDTYRDKIPEEALSPSYLTVCLKLHEAICSSTKLLKFYELPALSAEIVCRMIRLLSLVDSAGQRDETGNNSVQTVFQGTLAATKRWLREVFTKNMLTSSGASFTYVKEIEVWRRLVEIQFPAEHGWKESLLGDMEWRLTKEEPLSQITAYCNSCWDTKGLEDSVAKTFEKCIIEAVSSACQVNNLSSWETDSGSQLCSAMTQLRAMKHPLGLSSSANSEIGKWAPSSLAKGNGAEI

SEQ ID NO: 1027267 - protein, 1568 aa, Homo sapiens
QDTALPHSQAQQSGPTGQPSQPPGTATTPLEGDGLSAPTEVGDSPLQAQALGEAGVATGSEAQSSPQFQDHTEGEDQDASIPSGGRGLSQEGTGPPTSAGEGHSRTEDAAQELLLPESKGGSSEPGTELQTTEQQAGASASMAVDAVAEPANAVKGAGKEMKEKTQRMKQPPATTPPFKTHCQEAETKTKDEMAAAEEKVGKNEQGEPEDLKKPEGKNRSAAAVKNEKEQKNQEADVQEVKASTLSPGGGVTVFFHAIISLHFPFNPDLHKVFIRGGEEFGESKWDSNICELHYTRDLGHDRVLVEGIVCISKKHLDKYIPYKYVIYNGESFEYEFIYKHQQKKGEYVNRCLFIKSSLLGSGDWHQYYDIVYMKPHGRLQKVMNHITDGPRKDLAKGKQIAAALMLDSTFSILQTWDTINLNSFFTQFEQFCFVLQQPMIYEGQAQLWTDLQYREKEVKRYLWQHLKKHVVPLPDGKSTDFLPVDCPVRSKLKTGLIVLFVVEKIELLLEGSLDWLCHLLTSDASSPDEFHRDLSHILGIPQSWRLYLVNLCQRCMDTRTYTWLGALPVLHCCMELAPRHKDAWRQPEDTWAALEGLSFSPFREQMLDTSSLLQFMREKQHLLSIDEPLFRSWFSLLPLSHLVMYMENFIEHLGRFPAHILDCLSGIYYRLPGLEQVLNTQDVQDVQNVQNILEMLLRLLDTYRDKIPEEALSPSYLTVCLKLHEAICSSTKLLKFYELPALSAEIVCRMIRLLSLVDSAGQRDETGNNSVQTVFQGTLAATKRWLREVFTKNMLTSSGASFTYVKEIEVWRRLVEIQFPAEHGWKESLLGDMEWRLTKEEPLSQITAYCNSCWDTKGLEDSVAKTFEKCIIEAVSSACQSQTSILQGFSYSDLRKFGIVLSAVITKSWPRTADNFDDILKHLLTLADVKHVFRLCGTDEKILANVTEDAKRLIAVADSVLTKVVGDLLSGTILVGQLELIIKHKNQFLDIWQLREKSLSPQDEQCAVEEALDWRREELLLLKKEKRCVDSLLKMCGNVKHLIQVDFGVLAVRHSQDLSSKRLNDTMTVRLSTSSNSQRATHYHLSSQVQEMAGKIDLLRDSHIFQLFWREAAEPLSEPKEDQEAAELLSEPEEESERHILELQEVYDYLYQPSYRKFIKLHQDLKSGEVTLAEIDVIFKDFVNKYTDLDSELKIMCTVDHQGQRDWIKDRVEQIKEYHHLHQAVHAAKVILQVKESLGLNGDFSVLNTLLNFTDNFDDFRRETLDQINQELIQAKKLLQDISEARCKGLQALSLRKEFICWVREALGGINELKVFVDLASISAGENDIDVDRVACFHDAVQGYASLLFKLDPSVDFSAFMKHLKKLWKALDKDQYLPRKLCDSARNLEWLKTVNESHGSVERSSLTLATAINQRGIYVIQAPKGGQKISPDTVLHLILPESPGSHEESREYSLEEVKELFDKLMLMSGKKDRNNTEVERFSEVFCSVQRLSQAFIDLHSAGNMLFRTWIPWPTAPPSRVCPSKWTLAWTLVTELKEGGDVTELLAALCRQMEHFPDSWKRFRTQPTA

SEQ ID NO: 1027268 - protein, 206 aa, Homo sapiens
EFKIHFIKMLSRISGSQESQFILIREKQPWGFDHPIQGEELGVPVVTALGNLGIEGGWGCWDGQCLQLTDSGVLVNEFQSTESFFLQTDNFDDFRRETLDQINQELIQAKKLLQDISEARCKGLQALSLRKEFICWVREALGGINELKVFVDLASISAGENDIDVDRVACFHDAVQGYASLLFKLDPSVDFSAFYEASEKAVEGSG

SEQ ID NO: 1027269 - protein, 92 aa, Homo sapiens
MVLPLQVFCSVQRLSQAFIDLHSAGNMLFRTWIPWPTAPPSRVCPSKWTLAWTLVTELKEGGDVTELLAALCRQMEHFPDSWKRFQYPAHGI

SEQ ID NO: 1027270 - protein, 914 aa, Homo sapiens
RTQPCPTAKAQQSGPTGQPSQPPGTATTPLEGDGLSAPTEVGDSPLQAQALGEAGVATGSEAQSSPQFQDHTEGEDQDASIPSGGRGLSQEGTGPPTSAGEGHSRTELQTTEQQAGASASMAVDAVAEPANAVKGAGKEMKEKTQRMKQPPATTPPFKTHCQEAETKTKDEMAAAEEKVGKNEQGEPEDLKKPEGKNRSAAAVKNEKEQKNQEADVQEVKASTLSPGGGVTVFFHAIISLHFPFNPDLHKVFIRGGEEFGESKWDSNICELHYTRDLGHDRVLVEGIVCISKKHLDKYIPYKYVIYNGESFEYEFIYKHQQKKGEYVNRCLFIKSSLLGSGDWHQYYDIVYMKPHGRLQKVMNHITDGPRKDLAKGKQIAAALMLDSTFSILQTWDTINLNSFFTQFEQFCFVLQQPMIYEGQAQLWTDLQYREKEVKRYLWQHLKKHVVPLPDGKSTDFLPVDCPVRSKLKTGLIVLFVVEKIELLLEGSLDWLCHLLTSDASSPDEFHRDLSHILGIPQSWRLYLVNLCQRCMDTRTYTWLGALPVLHCCMELAPRHKDAWRQPEDTWAALEGLSFSPFREQMLDTSSLLQFMREKQHLLSIDEPLFRSWFSLLPLSHLVMYMENFIEHLGRFPAHILDCLSGIYYRLPGLEQVLNTQDVQDVQNVQNILEMLLRLLDTYRDKIPEEALSPSYLTVCLKLHEAICSSTKLLKFYELPALSAEIVCRMIRLLSLVDSAGQRDETGNNSVQTVFQGTLAATKRWLREVFTKNMLTSSGASFTYVKEIEVWRRLVEIQFPAEHGWKESLLGDMEWRLTKEEPLSQITAYCNSCWDTKGLEDSVAKTFEKCIIEAVSSACQVNNLSSWETDSGSQLCSAMTQLRAMKHPLGLSSSANSEIGKWAPSSLAKGNGAEI

SEQ ID NO: 1027271 - protein, 122 aa, Homo sapiens
MLSVGGLRLSLVRFSFLLLRGALLPSLAVTMTKLAQWLWGLAILGSTWVALTTGALGLELPLSCQEVLWPLPAYLLVSAGCYALGTVGYRVATFHDCEDAARELQSQIQEARADLARRGLRF

SEQ ID NO: 1027272 - protein, 110 aa, Homo sapiens
ELQLPEGRAEAEREPGRTSGRQHPGRAGKGRRGVEGSIASFSRSDHDEISAVALGTSDPGLHLGGPDHGSLGPGAALVLPGSPVATARLLAGVRRLLCPGHCGLSCGHFS

SEQ ID NO: 1027273 - protein, 92 aa, Homo sapiens
MTKLAQWLWGLAILGSTWVALTTGALGLELPLSCQEVLWPLPAYLLVSAGCYALGTVGYRVATFHDCEDAARELQSQIQEARADLARRGVRF

SEQ ID NO: 1027274 - protein, 92 aa, Homo sapiens; identical to SEQ ID NO: 1027273

SEQ ID NO: 1027275 - protein, 92 aa, Homo sapiens; identical to SEQ ID NO: 1027273

SEQ ID NO: 1027276 - protein, 303 aa, Homo sapiens
QINPASTLYSDHLSYFCFIGPFIVLALFHGKFIDTGFSLPFYQPILSKKLTIKDLESIDTECYYSPIWIRDNHPEECGLEKYFSVDLEILGKVTSHDLKLGGSNILVTEENQDEYIGLMTEWRFSRGVQEQTKAFLDGFNEVVPLQWLQYFDEKELEVMLCGMQEVDLADWQRNTVYRHYTRNSKQIIWFWQFVKETDNEVRMRLLQFVTGTCRLPLGGFAELMSNGPQKFCIEKVGKDTWLPRSHTCFNRLDLPPYKSYEQLKEKLLFGNRRDRGIGTRMNVASYFGGALAFKYPSQEKLHR

SEQ ID NO: 1027277 - protein, 194 aa, Homo sapiens
  misc_feature (7)..(7): Xaa can be any naturally occurring amino acid
  misc_feature (13)..(13): Xaa can be any naturally occurring amino acid
  misc_feature (44)..(44): Xaa can be any naturally occurring amino acid
  misc_feature (58)..(58): Xaa can be any naturally occurring amino acid
  misc_feature (69)..(69): Xaa can be any naturally occurring amino acid
  misc_feature (80)..(80): Xaa can be any naturally occurring amino acid
  misc_feature (96)..(96): Xaa can be any naturally occurring amino acid
  misc_feature (98)..(99): Xaa can be any naturally occurring amino acid
  misc_feature (110)..(110): Xaa can be any naturally occurring amino acid
RKVTFNXLNQIIXIELGTNPLKSSGIENGAFQGMKKLSNIRIAXTNITSILKVFHLTXRNNILMAKKSXELMQLSLKELXNLAKLGLSINSISAVXNXXLAHTPHLRELXLDNNKLTRVPGGLAEHKYIQVVSLHNNNISVVGSSGFCPPGHNTKKASYSGVSLFSNPVQYWEIQPSTFRCVYVRSAIQLGNYK

SEQ ID NO: 1027278 - protein, 84 aa, Homo sapiens
  misc_feature (8)..(8): Xaa can be any naturally occurring amino acid
RPPTPPSXPPRPPPTRVIALVVSLHNNNISVVGSSGFCPPGHNTKKASYSGVSLFSNPVQYWEIQPSTFRCVYVRSAIQLGNYK

SEQ ID NO: 1027279 - protein, 374 aa, Homo sapiens
HTLQSSAFCSVKKLKIEPSSNWDMTGYGSHSKVYSQSKNIPLSQPATTTVSTSLPVPNPSLPYEQTIVFPGSTGHIVVTSASSTSVTGQVLGGPHNLMRRSTVSLLDTYQKCGLKRKSEEIENTSSVQIIEEHPPMIQNNASGATVATATTSTATSKNSGSNSEGDYQLVQHEVLCSMTNTYEVLEFLGRGTFGQVVKCWKRGTNEIVAIKILKNHPSYARQGQIEVSILARLSTESADDYNFVRAYECFQHKNHTCLVFEMWEQNLYDFLKQNKFSPLPLKYIRPVLQQVATALMNTQKPRSYPRLTFKPRTTLIAGGIHLDNHTEVTGPSELRVQASHVCPGCVAPTYWQPTPITEALENNHVGYTYVEANG

SEQ ID NO: 1027280 - protein, 785 aa, Homo sapiens
  misc_feature (8)..(8): Xaa can be any naturally occurring amino acid
  misc_feature (51)..(51): Xaa can be any naturally occurring amino acid
  misc_feature (58)..(58): Xaa can be any naturally occurring amino acid
  misc_feature (66)..(66): Xaa can be any naturally occurring amino acid
  misc_feature (85)..(85): Xaa can be any naturally occurring amino acid
GVYQNLSXKRYQPMLGIDGLCATPSLEGFEEGEYETPGEYEEKEKHKVYEXLLVEHKXNLNLNRTXSITPQEERIAQLSESPVTXTPNAKQYMPVDSLMFLSSKGSPTSTILTLSCCQVISSIAVLHAVSVHIDTSSEGSSQSSLSPVLIGGNHLITAGVPRRSKRIAGKKVCRVESGKAGCFSPKISHKEKVRRSLRLKFNLGKNGREVNGCSGVNRYESVGWRLANQQSLKNRIESVKTGLLFSPDVDEKLPKKGSEKISKSEETLLTPERLVGTNYRMSWTGPNNSSFQEVDANEASSMVENLEVENSLEPDIMVEKSPATSCELTPSNLNNKHNSNITSSPLSGDENNMTKETLVKVQKAFSESGSNLHALMNQRQSSVTNVGKVKLTEPSYLEDSPEENLFETNDLTIVESKEKYEHHTGKGEKCFSERDFSPLQTQTFNRETTIKCYSTQMKMEHEKDIHSNMPKDYLSKQEFSSDEEIKKQQSPKDKLNNKLKENENMMEGNLPKCAAHSKDEARSSFSQQSTCVVTNLSKPRPMRIAKQQSLETCEKTVSESSQMTEHRKVSDHIQWFNKLSLNEPNRIKVKSPLKFQRTPVRQSVRRINSLLEYSRQPTGHKLASLGDTASPLVKSVSCDGALSSCIESASKDSSVSCIKSGPKEQKSMSCEESNIGAISKSSMELPSKSFLKMRKHPDSVNASLRSTTVYKQKILSDGQVKVPLDDLTNHDIVKPVVNNNMGISSGINNRVLRRPSERGRAWYKGSPKHPIGKTQLLPTSKPVDL

SEQ ID NO: 1027281 - protein, 785 aa, Homo sapiens; identical to SEQ ID NO: 1027280
  misc_feature (8)..(8): Xaa can be any naturally occurring amino acid
  misc_feature (51)..(51): Xaa can be any naturally occurring amino acid
  misc_feature (58)..(58): Xaa can be any naturally occurring amino acid
  misc_feature (66)..(66): Xaa can be any naturally occurring amino acid
  misc_feature (85)..(85): Xaa can be any naturally occurring amino acid

SEQ ID NO: 1027282 - protein, 719 aa, Homo sapiens
  misc_feature (8)..(8): Xaa can be any naturally occurring amino acid
  misc_feature (51)..(51): Xaa can be any naturally occurring amino acid
  misc_feature (58)..(58): Xaa can be any naturally occurring amino acid
  misc_feature (66)..(66): Xaa can be any naturally occurring amino acid
  misc_feature (85)..(85): Xaa can be any naturally occurring amino acid
  misc_feature (701)..(701): Xaa can be any naturally occurring amino acid
  misc_feature (703)..(703): Xaa can be any naturally occurring amino acid
  misc_feature (709)..(709): Xaa can be any naturally occurring amino acid
  misc_feature (719)..(719): Xaa can be any naturally occurring amino acid
GVYQNLSXKRYQPMLGIDGLCATPSLEGFEEGEYETPGEYEEKEKHKVYEXLLVEHKXNLNLNRTXSITPQEERIAQLSESPVTXTPNAKQYMPVDSLMFLSSKGSPTSTILTLSCCQVISSIAVLHAVSVHIDTSSEGSSQSSLSPVLIGGNHLITAGVPRRSKRIAGKKVCRVESGKAGCFSPKISHKEKVRRSLRLKFNLGKNGREVNGCSGVNRYESVGWRLANQQSLKNRIESVKTGLLFSPDVDEKLPKKGSEKISKSEETLLTPERLVGTNYRMSWTGPNNSSFQEVDANEASSMVENLEVENSLEPDIMVEKSPATSCELTPSNLNNKHNSNITSSPLSGDENNMTKETLVKVQKAFSESGSNLHALMNQRQSSVTNVGKVKLTEPSYLEDSPEENLFETNDLTIVESKEKYEHHTGKGEKCFSERDFSPLQTQTFNRETTIKCYSTQMKMEHEKDIHSNMPKDYLSKQEFSSDEEIKKQQSPKDKLNNKLKENENMMEGNLPKCAAHSKDEARSSFSQQSTCVVTNLSKPRPMRIAKQQSLETCEKTVSESSQMTEHRKVSDHIQWFNKLSLNEPNRIKVKSPLKFQRTPVRQSVRRINSLLEYSRQPTGHKLASLGDTASPLVKSVSCDGALSSCIESASKDSSVSCIKSGPKEQKSMSCEESNIGAISKSSMELPSKSFLKGWRGSHPQXSXVEMPSXLKGPNQTRFX

SEQ ID NO: 1027283 - protein, 235 aa, Homo sapiens
  misc_feature (8)..(8): Xaa can be any naturally occurring amino acid
  misc_feature (51)..(51): Xaa can be any naturally occurring amino acid
  misc_feature (58)..(58): Xaa can be any naturally occurring amino acid
  misc_feature (66)..(66): Xaa can be any naturally occurring amino acid
  misc_feature (85)..(85): Xaa can be any naturally occurring amino acid
GVYQNLSXKRYQPMLGIDGLCATPSLEGFEEGEYETPGEYEEKEKHKVYEXLLVEHKXNLNLNRTXSITPQEERIAQLSESPVTXTPNAKQYMPVDSLMFLSSKGSPTSTILTLSCCQVISSIAVLHAVSGVPRRSKRIAGKKVCRVESGKAGCFSPKISHKEKVRRSLRLKFNLGKNGREVNGCSGVNRYESVGWRLANQQSLKNRIESVKTGLLFSPDVDEKLPKKGTFTYYC

SEQ ID NO: 1027284 - protein, 780 aa, Homo sapiens
  misc_feature (8)..(8): Xaa can be any naturally occurring amino acid
  misc_feature (51)..(51): Xaa can be any naturally occurring amino acid
  misc_feature (58)..(58): Xaa can be any naturally occurring amino acid
  misc_feature (66)..(66): Xaa can be any naturally occurring amino acid
  misc_feature (85)..(85): Xaa can be any naturally occurring amino acid
GVYQNLSXKRYQPMLGIDGLCATPSLEGFEEGEYETPGEYEEKEKHKVYEXLLVEHKXNLNLNRTXSITPQEERIAQLSESPVTXTPNAKQYMPVDSLMFLSSKGSPTSTILTLSCCQVISSIAVLHAVSVHIDTSSEGSSQSSLSPVLIGGNHLITAGVPRRSKRIAGKKVCRVESGKAGCFSPKISHKEKVRRSLRLKFNLGKNGREVNGCSGVNRYESVGWRLANQQSLKNRIESVKTGLLFSPDVDEKLPKKGSEKISKSEETLLTPERLVGTNYRMSWTGPNNSSFQEVDANEASSMVENLEVENSLEPDIMVEKSPATSCELTPSNLNNKHNSNITSSPLSGDENNMTKETLVKVQKAFSESGSNLHALMNQRQSSVTNVGKVKLTEPSYLEDSPEENLFETNDLTIVESKEKYEHHTGKGEKCFSERDFSPLQTQTFNRETTIKCYSTQMKMEHEKDIHSNMPKDYLSKQEFSSDEEIKKQQSPKDKLNNKLKENENMMEGNLPKCAAHSKDEARSSFSQQSTCVVTNLSKPRPMRIAKQQSLETCEKTVSESSQMTEHRKVSDHIQWFNKLSLNEPNRIKVKSPLKFQRTPVRQSVRRINSLLEYSRQPTGHKLASLGDTASPLVKSVSCDGALSSCIESASKDSSVSCIKSGPKEQKSMSCEESNIGAISKSSMELPSKSFLKMRKHPDSVNASLRSTTVYKQKILSDGQVKVPLDDLTNHDIVKPVVNNNMGISSGINNRVLRRPSERGRAWYKGSPKHPIGKTQLLPTR

SEQ ID NO: 1027285 - protein, 263 aa, Homo sapiens
  misc_feature (8)..(8): Xaa can be any naturally occurring amino acid
  misc_feature (51)..(51): Xaa can be any naturally occurring amino acid
  misc_feature (58)..(58): Xaa can be any naturally occurring amino acid
  misc_feature (66)..(66): Xaa can be any naturally occurring amino acid
  misc_feature (85)..(85): Xaa can be any naturally occurring amino acid
GVYQNLSXKRYQPMLGIDGLCATPSLEGFEEGEYETPGEYEEKEKHKVYEXLLVEHKXNLNLNRTXSITPQEERIAQLSESPVTXTPNAKQYMPVDSLMFLSSKGSPTSTILTLSCCQVISSIAVLHAVSVHIDTSSEGSSQSSLSPVLIGGNHLITAGVPRRSKRIAGKKVCRVESGKAGCFSPKISHKEKVRRSLRLKFNLGKNGREVNGCSGVNRYESVGWRLANQQSLKNRIESVKTGLLFSPDVDEKLPKKGTFTYYC

SEQ ID NO: 1027286 - protein, 254 aa, Homo sapiens
MSAWLWRERMGAGMGFGLERMPAPIDRVGQTKENMGSGVERMGPAIERMGLSMERMVPAGMGAGLERMGPVMDRMATGLERMGANNLERMGLERMGANSLERMGLERMGANSLERMGPAMGPALGAGIERMGLAMGGGGGASFDRAIEMERGNFGGNFAGSFGGAGGHAPGVARKACQIFVRNLPFDFTWKMLKDKFNECGHVLYADIKMENGKSKGCGVVKFESPEVAERACRMMNGMKLSGREIDVRIDRNA

SEQ ID NO: 1027287 - protein, 103 aa, Homo sapiens
MHCTFHKHCLLILLLLLFNFVRCKEVGSSLNACAAPFTIKEFIDNEGRACLSHLSIYLAGREEKNLPVGEEKSGVEKMGWDTTENIEKKTKLAQGVPAGCNAV

SEQ ID NO: 1027288 - protein, 112 aa, Homo sapiens
MSASGSKAGAVSPGGLSGISRGSQNGFFPGRSRLLPAPSLHPPPALCKGPRGRRRKHGEGPERRGTREAYVGKRSPLPLCSLPPGLEWLLSLLALRFREMTFSCARRECYFR

SEQ ID NO: 1027289 - protein, 259 aa, Homo sapiens
MELFLAGRRVLVTGAGKGIGRGTVQALHATGARVVAVSRTQADLDSLVRECPGIEPVCVDLGDWEATERALGSVGPVDLLVNNAAVALLQPFLEVTKEAFDRSFEVNLRAVIQVSQIVARGLIARGVPGAIVNVSSQCSQRAVTNHSVYCSTKGALDMLTKVMALELGPHKIRVNAVNPTVVMTSMGQATWSDPHKAKTMLNRIPLGKFAEVEHVVNAILFLLSDRSGMTTGSTLPVEGGFGLLSPQNLAMRVSTHLNN

SEQ ID NO: 1027290 - protein, 76 aa, Homo sapiens
LCPDTKMTLDSRRALITREGKGKASTDEFPLTQVCSRPLLRFLPLRQPLSPWATPGGEGATPFPVLFIPAGLTPKH

SEQ ID NO: 1027291 - protein, 244 aa, Homo sapiens
MELFLAGRRVLVTGAGKGIGRGTVQALHATGARVVAVSRTQADLDSLVRECPGIEPVCVDLGDWEATERALGSVGPVDLLVNNAAVALLQPFLEVTKEAFDRSFEVNLRAVIQVSQIVARGLIARGVPGAIVNVSSQCSQRAVTNHSVYCSTKGALDMLTKVMALELGPHKIRVNAVNPTVVMTSMGQATWSDPHKAKTMLNRIPLGKFAEVEHVVNAILFLLSDRSGMTTGSTLPVEGGFWAC

SEQ ID NO: 1027292 - protein, 244 aa, Homo sapiens; identical to SEQ ID NO: 1027291

SEQ ID NO: 1027293 - protein, 282 aa, Homo sapiens
SIVEAGRLRRHGAVPRGPPGAGHRGRQRWAAGKGGQRPAAGRGGQGTPSLSPLPAGIGRGTVQALHATGARVVAVSRTQADLDSLVRECPGIEPVCVDLGDWEATERALGSVGPVDLLVNNAAVALLQPFLEVTKEAFDRSFEVNLRAVIQVSQIVARGLIARGVPGAIVNVSSQCSQRAVTNHSVYCSTKGALDMLTKVMALELGPHKIRVNAVNPTVVMTSMGQATWSDPHKAKTMLNRIPLGKFAEVEHVVNAILFLLSDRSGMTTGSTLPVEGGFWAC

SEQ ID NO: 1027294 - protein, 222 aa, Homo sapiens
SIVEAGRLRRHGAVPRGPPGAGHRGRQKCPGIEPVCVDLGDWEATERALGSVGPVDLLVNNAAVALLQPFLEVTKEAFDRSFEVNLRAVIQVSQIVARGLIARGVPGAIVNVSSQCSQRAVTNHSVYCSTKGALDMLTKVMALELGPHKIRVNAVNPTVVMTSMGQATWSDPHKAKTMLNRIPLGKFAEVEHVVNAILFLLSDRSGMTTGSTLPVEGGFWAC

SEQ ID NO: 1027295 - protein, 186 aa, Homo sapiens
MLQPFLEVTKEGDSGVGPVDLLVNNAAVALLQPFLEVTKEAFDRSFEVNLRAVIQVSQIVARGLIARGVPGAIVNVSSQCSQRAVTNHSVYCSTKGALDMLTKVMALELGPHKIRVNAVNPTVVMTSMGQATWSDPHKAKTMLNRIPLGKFAEVEHVVNAILFLLSDRSGMTTGSTLPVEGGFWAC

SEQ ID NO: 1027296 - protein, 269 aa, Homo sapiens
MELFLAGRRVLVTGAGKGIGRGTVQALHATGARVVAVSRTQADLDSLVRECPGIEPVCVDLGDWEATERALGSVGPVDLLVNNAAVALLQPFLEVTKEAFDRSFEVNLRAVIQVSQVSCPVGWTGILVSDASSAPVSLRFQIVARGLIARGVPGAIVNVSSQCSQRAVTNHSVYCSTKGALDMLTKVMALELGPHKIRVNAVNPTVVMTSMGQATWSDPHKAKTMLNRIPLGKFAEVEHVVNAILFLLSDRSGMTTGSTLPVEGGFWAC

SEQ ID NO: 1027297 - protein, 276 aa, Homo sapiens
MELFLAGRRVLVTGAGKGIGRGTVQALHATGARVVAVSRTQADLDSLVRECPGIEPVCVDLGDWEATERALGSVGPVDLLVNNAAVALLQPFLEVTKEAFDRSFEVNLRAVIQVSQIVARGLIARGVPGAIVNVSSQCSQRAVTNHSVYCECPSCALSPTTSPSLALITDPSPSQLGFLFVGSTKGALDMLTKVMALELGPHKIRVNAVNPTVVMTSMGQATWSDPHKAKTMLNRIPLGKFAEVEHVVNAILFLLSDRSGMTTGSTLPVEGGFWAC

SEQ ID NO: 1027298 - protein, 286 aa, Homo sapiens
MELFLAGRRVLVTGAGKGIGRGTVQALHATGARVVAVSRTQADLDSLVRECPGIEPVCVDLGDWEATERALGSVGPVDLLVNNAAVALLQPFLEVTKEAFDRSFEVNLRAVIQVSQIVARGLIARGVPGAIVNVSSQCSQRAVTNHSVYCSTKGALDMLTKVMALELGPHKIRVNAVNPTVVMTSMGQATWSDPHKAKTMLNRIPLGKFAGESGGSPASVVPAVPVCAMGRGGRERWAAASFLYALTPALTTEVEHVVNAILFLLSDRSGMTTGSTLPVEGGFWAC

SEQ ID NO: 1027299 - protein, 217 aa, Homo sapiens
MELFLAGRRVLVTGAGKGIGRGTVQALHATGARVVAVSRTQADLDSLVRECPGIEPVCVDLGDWEATERALGSVGPVDLLVNNAAVALLQPFLEVTKEAFDRSFEVNLRAVIQVSQIVARGLIARGVPGAIVNVSSQCSQRAVTNHSVYCSTKGALDMLTKVMALELGPHKVSRGLGTSPNLGHPTCPADPSCPGVDPSECSKPHSGDDVHGPGHLE

SEQ ID NO: 1027300 - protein, 217 aa, Homo sapiens; identical to SEQ ID NO: 1027299

SEQ ID NO: 1027301 - protein, 147 aa, Homo sapiens
MELFLAGRRVLVTGAGKGIGRGTVQALHATGARVVAVSRTQADLDSLVRECPGIEPVCVDLGDWEATERALGSVGPVDLLVNNAAVALLQPFLEVTKEAFDRSFEVNLRAVIQVSQVSCPVGWTGILVSDASSASRSRCDSRLWPGA

SEQ ID NO: 1027302 - protein, 230 aa, Homo sapiens
LCPDTKMTLDSRRALITREGKGIGRGTVQALHATGARVVAVSRTQADLDSLVRECPGIEPVCVDLGDWEATERALGSVGPVDLLVNNAAVALLQPFLEVTKEAFDRSFEVNLRAVIQVSQIVARGLIARGVPGAIVNVSSQCSQRAVTNHSVYCSTKGALDMLTKVMALELGPHKIRVNAVNPTVVMTSMGQATWSDPHKAKTMLNRIPLGKFAGESGGSPASVVPAVPR

SEQ ID NO: 1027303 - protein, 442 aa, Homo sapiens
WACRGAWSPGAWQHGWACVGNGGAEGLCVRVQMAVHVVTVLQLMPCSRAVYSVLLCTVFHVLLCTADCVLLRGVLACDAVTQCGILTCLVREGRSLPVSPAAVLMCCADAHVMWVLCMQMLVGWYLCCADSRLPSRALASHRGLGARAPSLWGWWPAWAAGWSAEPPGPPGSERGRNGCEAGPGQESLGRREEVNRPEVAPGCWPHSPDTFGTPNSFTCPAEKVTSPSPQLCRLLGTEPLVTAPSYTQCPGIEPVCVDLGDWEATERALGSVGPVDLLVNNAAVALLQPFLEVTKEAFDRSFEVNLRAVIQVSQIVARGLIARGVPGAIVNVSSQCSQRAVTNHSVYCSTKGALDMLTKVMALELGPHKIRVNAVNPTVVMTSMGQATWSDPHKAKTMLNRIPLGKFAEVEHVVNAILFLLSDRSGMTTGSTLPVEGGFWAC

SEQ ID NO: 1027304 - protein, 85 aa, Homo sapiens
SLSLSLSLSLSVSLSLCFLQIKHFIAELGLTGLALARAEFGTSRIPLGKFAEVEHVVNAILFLLSDRSGMTTGSTLPVEGGFWAC

SEQ ID NO: 1027305 - protein, 248 aa, Homo sapiens
LCPDTKMTLDSRRALITREGKGIGRGTVQALHATGARVVAVSRTQADLDSLVRECPGIEPVCVDLGDWEATERALGSVGPVDLLVNNAAVALLQPFLEVTKEAFDRSFEVNLRAVIQVSQIVARGLIARGVPGAIVNVSSQCSQRAVTNHSVYCSTKGALDMLTKVMALELGPHKIRVNAVNPTVVMTSMGQATWSDPHKAKTMLNRIPLGKFAEVEHVVNAILFLLSDRSGMTTGSTLPVEGGFWAC

SEQ ID NO: 1027306 - protein, 307 aa, Homo sapiens
SIVEAGRLRRHGAVPRGPPGAGHRGRQRWAAGKGGQRPAAGRGGQGTPSLSPLPAGIGRGTVQALHATGARVVAVSRTQADLDSLVREVTSPSPQLCRLLGTEPLVTAPSYTQCPGIEPVCVDLGDWEATERALGSVGPVDLLVNNAAVALLQPFLEVTKEAFDRSFEVNLRAVIQVSQIVARGLIARGVPGAIVNVSSQCSQRAVTNHSVYCSTKGALDMLTKVMALELGPHKIRVNAVNPTVVMTSMGQATWSDPHKAKTMLNRIPLGKFAEVEHVVNAILFLLSDRSGMTTGSTLPVEGGFWAC

SEQ ID NO: 1027307 - protein, 373 aa, Homo sapiens
WACRGAWSPGAWQHGWACVGNGGAEGLCVRVQMAVHVVTVLQLMPCSRAVYSVLLCTVFHVLLCTADCVLLRGVLACDAVTQCGILTCLVREGRSLPVSPAAVLMCCADAHVMWVLCMQMLVGWYLCCADSRLPSRALASHRGLGARAPSLWGWWPAWAAGWSAEPPGPPGSERGRNGCEAGPGQESLGRREEVNRPEVAPGCWPHSPDTFGTPNSFTCPAEKVTKEAFDRSFEVNLRAVIQVSQIVARGLIARGVPGAIVNVSSQCSQRAVTNHSVYCSTKGALDMLTKVMALELGPHKIRVNAVNPTVVMTSMGQATWSDPHKAKTMLNRIPLGKFAEVEHVVNAILFLLSDRSGMTTGSTLPVEGGFWAC

SEQ ID NO: 1027308 - protein, 140 aa, Homo sapiens
MPALLTVSLRFQIVARGLIARGVPGAIVNVSSQCSQRAVTNHSVYCSTKGALDMLTKVMALELGPHKIRVNAVNPTVVMTSMGQATWSDPHKAKTMLNRIPLGKFAEVEHVVNAILFLLSDRSGMTTGSTLPVEGGFWAC

SEQ ID NO: 1027309 - protein, 232 aa, Homo sapiens
MELFLAGRRVLVTGAGKGIGRGTVQALHATGARVVAVSRTQADLDSLVRECPGIEPVCVDLGDWEATERALGSVGPVDLLVNNAAVALLQPFLEVTKEAFDRSFEVNLRAVIQVSQIVARGLIARGVPGAIVNVSSQCSQRAVTNHSVYCSTKGALDMLTKVMALELGPHKIRVNAVNPTVVMTSMGQATWSDPHKAKTMLNRIPLGKFAGPTDVHNRGAEKTVVYAEISRK

SEQ ID NO: 1027310 - protein, 190 aa, Homo sapiens
SIVELGDCADMELFLAGRRVLVTGAGKGIGRGTVQALHATGARVVAVSRTQADLDSLVRECPGIEPVCVDLGDWEATERALGSVGPVDLLVNNAAVALLQPFLEVTKEAFDRSFEVNLRAVIQVSQIVARGLIARGVPGAIVNVSSQCSQRAVTNHSVYCECPSCALSPTPAPASPSSPTPAPASLGSSS

SEQ ID NO: 1027311 - protein, 321 aa, Homo sapiens
SIVEAGRLRRHGAVPRGPPGAGHRGRQRWAAGKGGQRPAAGRGGQGTPSLSPLPAGIGRGTVQALHATGARVVAVSRTQADLDSLVRECPGIEPVCVDLGDWEATERALGSVGPVDLLVNNAAVALLQPFLEVTKEAFDRSFEVNLRAVIQVSQIVARGLIARGVPGAIVNVSSQCSQRAVTNHSVYCSTKGALDMLTKVMALELGPHKIRVNAVNPTVVMTSMGQATWSDPHKAKTMLNRIPLGKFAEVEHVVNAILFLLSDRSGCHGFIAGKGALAGGPPNSAQAVIYPILKRSAKKHNKIKKNRIRKKKRQNPLESLV

SEQ ID NO: 1027312 - protein, 220 aa, Homo sapiens
SIVELGDCADMELFLAGRRVLVTGAGKGIGRGTVQALHATGARVVAVSRTQADLDSLVRECPGIEPVCVDLGDWEATERALGSVGSVDLLVNNASVALLQPFLEVTKEGDSAYDRSFDENLSAIIHVSQIVVSGFIARCVPDAIVNVCRQCSQGSVTNYSVYCSTKGALDMLTKVMALELGPHKIRVNAVNPTVVMTSMGQATWSDPHKAKTMLNRIPLC

SEQ ID NO: 1027313 - protein, 244 aa, Homo sapiens; identical to SEQ ID NO: 1027291

SEQ ID NO: 1027314 - protein, 244 aa, Homo sapiens; identical to SEQ ID NO: 1027291

SEQ ID NO: 1027315 - protein, 287 aa, Homo sapiens
MNQLSFLLFLIATTRGWSTDEANTYFKEWTCSSSPSLPRSCKEIKDECPSAFDGLYFLRTENGVIYQTFCDMTSGGGGWTLVASVHENDMRGKCTVGDRWSSQQGSKADYPEGDGNWANYNTFGSAEAATSDDYKNPGYYDIQAKDLGIWHVPNKSPMQHWRNSSLLRYRTDTGFLQTLGHNLFGIYQKYPVKYGEGKCWTDNGPVIPVVYDFGDAQKTASYYSPYGQREFTAGFVQFRVFNNERAANALCAGMRVTGCNTEHSVVSLHCPRCLELWTQASNLIQLP

SEQ ID NO: 1027316 - protein, 313 aa, Homo sapiens
MNQLSFLLFLIATTRGWSTDEANTYFKEWTCSSSPSLPRSCKEIKDECPSAFDGLYFLRTENGVIYQTFCDMTSGGGGWTLVASVHENDMRGKCTVGDRWSSQQGSKADYPEGDGNWANYNTFGSAEAATSDDYKNPGYYDIQAKDLGIWHVPNKSPMQHWRNSSLLRYRTDTGFLQTLGHNLFGIYQKYPVKYGEGKCWTDNGPVIPVVYDFGDAQKTASYYSPYGQREFTAGFVQFRVFNNERAANALCAGMRVTGCNTEHHCIGGGGYFPEASPQQCGDFSGFDWSGYGTHVGYSSSREITEAAVLLFYR

SEQ ID NO: 1027317 - protein, 162 aa, Homo sapiens
  misc_feature (144)..(144): Xaa can be any naturally occurring amino acid
MIRDLGTKWPFLGSRRQNQGTNVGGLAHPPGPKRVVECTASFRKMARPAVTTPPGLLMYMWMGFLVLSDFREEELCDNKAGNAVIDRAHDAHDAVPQQPRVDVIGALAATRLLHHDGNERESPGAVACRHRCRPGRSGVSLRLXLRWKVSGERGPSAGYLHD

SEQ ID NO: 1027318 - protein, 1526 aa, Homo sapiens
RGSQTPQSRGTFLIFANRYYLRKLNLDGSNYTLLKQGLNNAVALDFDYREQMIYWTDVTTQGSMIRRMHLNGSNVQVLHRTGLSNPDGLAVDWVGGNLYWCDKGRDTIEVSKLNGAYRTVLVSSGLREPRALVVDVQNGYLYWTDWGDHSLIGRIGMDGSSRSVIVDTKITWPNGLTLDYVTERIYWADAREDYIEFASLDGSNRHVVLSQDIPHIFALTLFEDYVYWTDWETKSINRAHKTTGTNKTLLISTLHRPMDLHVFHALRQPDVPNHPCKVNNGGCSNLCLLSPGGGHKCACPTNFYLGSDGRTCVSNCTASQFVCKNDKCIPFWWKCDTEDDCGDHSDEPPDCPEFKCRPGQFQCSTGICTNPAFICDGDNDCQDNSDEANCDIHVCLPSQFKCTNTNRCIPGIFRCNGQDNCGDGEDERDCPEVTCAPNQFQCSITKRCIPRVWVCDRDNDCVDGSDEPANCTQMTCGVDEFRCKDSGRCIPARWKCDGEDDCGDGSDEPKEECDERTCEPYQFRCKNNRCVPGRWQCDYDNDCGDNSDEESCTPRPCSESEFSCANGRCIAGRWKCDGDHDCADGSDEKDCTPRCDMDQFQCKSGHCIPLRWRCDADADCMDGSDEEACGTGVRTCPLDEFQCNNTLCKPLAWKCDGEDDCGDNSDENPEECARFVCPPNRPFRCKNDRVCLWIGRQCDGTDNCGDGTDEEDCEPPTAHTTHCKDKKEFLCRNQRCLSSSLRCNMFDDCGDGSDEEDCSIDPKLTSCATNASICGDEARCVRTEKAAYCACRSGFHTVPGQPGCQDINECLRFGTCSQLCNNTKGGHLCSCARNFMKTHNTCKAEGSEYQVLYIADDNEIRSLFPGHPHSAYEQAFQGDESVRIDAMDVHVKAGRVYWTNWHTGTISYRSLPPAAPPTTSNRHRRQIDRGVTHLNISGLKMPRGIAIDWVAGNVYWTDSGRDVIEVAQMKGENRKTLISGMIDEPHAIVVDPLRGTMYWSDWGNHPKIETAAMDGTLRETLVQDNIQWPTGLAVDYHNERLYWADAKLSVIGSIRLNGTDPIVAADSKRGLSHPFSIDVFEDYIYGVTYINNRVFKIHKFGHSPLVNLTGGLSHASDVVLYHQHKQPEVTNPCDRKKCEWLCLLSPSGPVCTCPNGKRLDNGTCVPVPSPTPPPDAPRPGTCNLQCFNGGSCFLNARRQPKCRCQPRYTGDKCELDQCWEHCRNGGTCAASPSGMPTCRCPTGFTGPKCTQQVCAGYCANNSTCTVNQGNQPQCRCLPGFLGDRCQYRQCSGYCENFGTCQMAADGSRQCRCTAYFEGSRCEVNKCSRCLEGACVVNKQSGDVTCNCTDGRVAPSCLTCVGHCSNGGSCTMNSKMMPECQCPPHMTGPRCEEHVFSQQQPGHIASILIPLLLLLLLVLVAGVVFWYKRRVQGAKGFQHQRMTNGAMNVEIGNPTYKMYEGGEPDDVGGLLDADFALDPDKPTNFTNPVYATLYMGGHGSRHSLASTDEKRELLGRGPEDEIGDPLA

SEQ ID NO: 1027319 - protein, 1526 aa, Homo sapiens; identical to SEQ ID NO: 1027318

SEQ ID NO: 1027320 - protein, 839 aa, Homo sapiens
ATVIYGVAVGGGGGREYPGLKPLPSSEPPTAHTTHCKDKKEFLCRNQRCLSSSLRCNMFDDCGDGSDEEDCSIDPKLTSCATNASICGDEARCVRTEKAAYCACRSGFHTVPGQPGCQDINECLRFGTCSQLCNNTKGGHLCSCARNFMKTHNTCKAEGSEYQVLYIADDNEIRSLFPGHPHSAYEQAFQGDESVRIDAMDVHVKAGRVYWTNWHTGTISYRSLPPAAPPTTSNRHRRQIDRGVTHLNISGLKMPRGIAIDWVAGNVYWTDSGRDVIEVAQMKGENRKTLISGMIDEPHAIVVDPLRGTMYWSDWGNHPKIETAAMDGTLRETLVQDNIQWPTGLAVDYHNERLYWADAKLSVIGSIRLNGTDPIVAADSKRGLSHPFSIDVFEDYIYGVTYINNRVFKIHKFGHSPLVNLTGGLSHASDVVLYHQHKQPEVTNPCDRKKCEWLCLLSPSGPVCTCPNGKRLDNGTCVPVPSPTPPPDAPRPGTCNLQCFNGGSCFLNARRQPKCRCQPRYTGDKCELDQCWEHCRNGGTCAASPSGMPTCRCPTGFTGPKCTQQVCAGYCANNSTCTVNQGNQPQCRCLPGFLGDRCQYRQCSGYCENFGTCQMAADGSRQCRCTAYFEGSRCEVNKCSRCLEGACVVNKQSGDVTCNCTDGRVAPSCLTCVGHCSNGGSCTMNSKMMPECQCPPHMTGPRCEEHVFSQQQPGHIASILIPLLLLLLLVLVAGVVFWYKRRVQGAKGFQHQRMTNGAMNVEIGNPTYKMYEGGEPDDVGGLLDADFALDPDKPTNFTNPVYATLYMGGHGSRHSLASTDEKRELLGRGPEDEIGDPLA

SEQ ID NO: 1027321 - protein, 746 aa, Homo sapiens
MPVETAAYCACRSGFHTVPGQPGCQDINECLRFGTCSQLCNNTKGGHLCSCARNFMKTHNTCKAEGSEYQVLYIADDNEIRSLFPGHPHSAYEQAFQGDESVRIDAMDVHVKAGRVYWTNWHTGTISYRSLPPAAPPTTSNRHRRQIDRGVTHLNISGLKMPRGIAIDWVAGNVYWTDSGRDVIEVAQMKGENRKTLISGMIDEPHAIVVDPLRGTMYWSDWGNHPKIETAAMDGTLRETLVQDNIQWPTGLAVDYHNERLYWADAKLSVIGSIRLNGTDPIVAADSKRGLSHPFSIDVFEDYIYGVTYINNRVFKIHKFGHSPLVNLTGGLSHASDVVLYHQHKQPEVTNPCDRKKCEWLCLLSPSGPVCTCPNGKRLDNGTCVPVPSPTPPPDAPRPGTCNLQCFNGGSCFLNARRQPKCRCQPRYTGDKCELDQCWEHCRNGGTCAASPSGMPTCRCPTGFTGPKCTQQVCAGYCANNSTCTVNQGNQPQCRCLPGFLGDRCQYRQCSGYCENFGTCQMAADGSRQCRCTAYFEGSRCEVNKCSRCLEGACVVNKQSGDVTCNCTDGRVAPSCLTCVGHCSNGGSCTMNSKMMPECQCPPHMTGPRCEEHVFSQQQPGHIASILIPLLLLLLLVLVAGVVFWYKRRVQGAKGFQHQRMTNGAMNVEIGNPTYKMYEGGEPDDVGGLLDADFALDPDKPTNFTNPVYATLYMGGHGSRHSLASTDEKRELLGRGPEDEIGDPLA

SEQ ID NO: 1027322 - protein, 428 aa, Homo sapiens
MCMAGPLVNLTGGLSHASDVVLYHQHKQPEVTNPCDRKKCEWLCLLSPSGPVCTCPNGKRLDNGTCVPVPSPTPPPDAPRPGTCNLQCFNGGSCFLNARRQPKCRCQPRYTGDKCELDQCWEHCRNGGTCAASPSGMPTCRCPTGFTGPKCTQQVCAGYCANNSTCTVNQGNQPQCRCLPGFLGDRCQYRQCSGYCENFGTCQMAADGSRQCRCTAYFEGSRCEVNKCSRCLEGACVVNKQSGDVTCNCTDGRVAPSCLTCVGHCSNGGSCTMNSKMMPECQCPPHMTGPRCEEHVFSQQQPGHIASILIPLLLLLLLVLVAGVVFWYKRRVQGAKGFQHQRMTNGAMNVEIGNPTYKMYEGGEPDDVGGLLDADFALDPDKPTNFTNPVYATLYMGGHGSRHSLASTDEKRELLGRGPEDEIGDPLA

SEQ ID NO: 1027323 - protein, 415 aa, Homo sapiens
ALRHHFAVHGTGAAIAAVANPCDRKKCEWLCLLSPSGPVCTCPNGKRLDNGTCVPVPSPTPPPDAPRPGTCNLQCFNGGSCFLNARRQPKCRCQPRYTGDKCELDQCWEHCRNGGTCAASPSGMPTCRCPTGFTGPKCTQQVCAGYCANNSTCTVNQGNQPQCRCLPGFLGDRCQYRQCSGYCENFGTCQMAADGSRQCRCTAYFEGSRCEVNKCSRCLEGACVVNKQSGDVTCNCTDGRVAPSCLTCVGHCSNGGSCTMNSKMMPECQCPPHMTGPRCEEHVFSQQQPGHIASILIPLLLLLLLVLVAGVVFWYKRRVQGAKGFQHQRMTNGAMNVEIGNPTYKMYEGGEPDDVGGLLDADFALDPDKPTNFTNPVYATLYMGGHGSRHSLASTDEKRELLGRGPEDEIGDPLA

SEQ ID NO: 1027324 - protein, 1526 aa, Homo sapiens; identical to SEQ ID NO: 1027318

SEQ ID NO: 1027325 - protein, 332 aa, Homo sapiens
PGPQACGRVTGDPRAWGDVQPVPGTHRGKFRKEGLMQLSQAQAAGASPQRCWHTSPEAVHPLHQDYANRKALFNLWRALMRVGLRHFSPSPTTGQCSGYCENFGTCQMAADGSRQCRCTAYFEGSRCEVNKCSRCLEGACVVNKQSGDVTCNCTDGRVAPSCLTCVGHCSNGGSCTMNSKMMPECQCPPHMTGPRCEEHVFSQQQPGHIASILIPLLLLLLLVLVAGVVFWYKRRVQGAKGFQHQRMTNGAMNVEIGNPTYKMYEGGEPDDVGGLLDADFALDPDKPTNFTNPVYATLYMGGHGSRHSLASTDEKRELLGRGPEDEIGDPLA

SEQ ID NO: 1027326 - protein, 1526 aa, Homo sapiens; identical to SEQ ID NO: 1027318

SEQ ID NO: 1027327 - protein, 1384 aa, Homo sapiens
RGSQTPQSRGTFLIFANRYYLRKLNLDGSNYTLLKQGLNNAVALDFDYREQMIYWTDVTTQGSMIRRMHLNGSNVQVLHRTGLSNPDGLAVDWVGGNLYWCDKGRDTIEVSKLNGAYRTVLVSSGLREPRALVVDVQNGYLYWTDWGDHSLIGRIGMDGSSRSVIVDTKITWPNGLTLDYVTERIYWADAREDYIEFASLDGSNRHVVLSQDIPHIFALTLFEDYVYWTDWETKSINRAHKTTGTNKTLLISTLHRPMDLHVFHALRQPDVPNHPCKVNNGGCSNLCLLSPGGGHKCACPTNFYLGSDGRTCVSNCTASQFVCKNDKCIPFWWKCDTEDDCGDHSDEPPDCPEFKCRPGQFQCSTGICTNPAFICDGDNDCQDNSDEANCDIHVCLPSQFKCTNTNRCIPGIFRCNGQDNCGDGEDERDCPEVTCAPNQFQCSITKRCIPRVWVCDRDNDCVDGSDEPANCTQMTCGVDEFRCKDSGRCIPARWKCDGEDDCGDGSDEPKEECDERTCEPYQFRCKNNRCVPGRWQCDYDNDCGDNSDEESCTPRPCSESEFSCANGRCIAGRWKCDGDHDCADGSDEKDCTPRCDMDQFQCKSGHCIPLRWRCDADADCMDGSDEEACGTGVRTCPLDEFQCNNTLCKPLAWKCDGEDDCGDNSDENPEECARFVCPPNRPFRCKNDRVCLWIGRQCDGTDNCGDGTDEEDCEPPTAHTTHCKDKKEFLCRNQRCLSSSLRCNMFDDCGDGSDEEDCSIDPKLTSCATNASICGDEARCVRTEKAAYCACRSGFHTVPGQPGCQDINECLRFGTCSQLCNNTKGGHLCSCARNFMKTHNTCKAEGSEYQVLYIADDNEIRSLFPGHPHSAYEQAFQGDESVRIDAMDVHVKAGRVYWTNWHTGTISYRSLPPAAPPTTSNRHRRQIDRGVTHLNISGLKMPRGIAIDWVAGNVYWTDSGRDVIEVAQMKGENRKTLISGMIDEPHAIVVDPLRGTMYWSDWGNHPKIETAAMDGTLRETLVQDNIQWPTGLAVDYHNERLYWADAKLSVIGSIRLNGTDPIVAADSKRGLSHPFSIDVFEDYIYGVTYINNRVFKIHKFGHSPLVNLTGGLSHASDVVLYHQHKQPEVTNPCDRKKCEWLCLLSPSGPVCTCPNGKRLDNGTCVPVPSPTPPPDAPRPGTCNLQCFNGGSCFLNARRQPKCRCQPRYTGDKCELDQCWEHCRNGGTCAASPSGMPTCRCPTGFTGPKCTQQVCAGYCANNSTCTVNQGNQPQCRCLPGFLGDRCQYRQCSGYCENFGTCQMAADGSRQCRCTAYFEGSRCEVNKCSRCLEGACVVNKQSGDVTCNCTDGRVAPSCLTCVGHCSNGGSCTMNSKMMPECQCPTQ

SEQ ID NO: 1027328 - protein, 1526 aa, Homo sapiens; identical to SEQ ID NO: 1027318

SEQ ID NO: 1027329 - protein, 1444 aa, Homo sapiens
RGSQTPQSRGTFLIFANRYYLRKLNLDGSNYTLLKQGLNNAVALDFDYREQMIYWTDVTTQGSMIRRMHLNGSNVQVLHRTGLSNPDGLAVDWVGGNLYWCDKGRDTIEVSKLNGAYRTVLVSSGLREPRALVVDVQNGYLYWTDWGDHSLIGRIGMDGSSRSVIVDTKITWPNGLTLDYVTERIYWADAREDYIEFASLDGSNRHVVLSQDIPHIFALTLFEDYVYWTDWETKSINRAHKTTGTNKTLLISTLHRPMDLHVFHALRQPDVPNHPCKVNNGGCSNLCLLSPGGGHKCACPTNFYLGSDGRTCVSNCTASQFVCKNDKCIPFWWKCDTEDDCGDHSDEPPDCPEFKCRPGQFQCSTGICTNPAFICDGDNDCQDNSDEANCDIHVCLPSQFKCTNTNRCIPGIFRCNGQDNCGDGEDERDCPEVTCAPNQFQCSITKRCIPRVWVCDRDNDCVDGSDEPANCTQMTCGVDEFRCKDSGRCIPARWKCDGEDDCGDGSDEPKEECDERTCEPYQFRCKNNRCVPGRWQCDYDNDCGDNSDEESCTPRPCSESEFSCANGRCIAGRWKCDGDHDCADGSDEKDCTPRCDMDQFQCKSGHCIPLRWRCDADADCMDGSDEEACGTGVRTCPLDEFQCNNTLCKPLAWKCDGEDDCGDNSDENPEECARFVCPPNRPFRCKNDRVCLWIGRQCDGTDNCGDGTDEEDCEPPTAHTTHCKDKKEFLCRNQRCLSSSLRCNMFDDCGDGSDEEDCSIDPKLTSCATNASICGDEARCVRTEKAAYCACRSGFHTVPGQPGCQDINECLRFGTCSQLCNNTKGGHLCSCARNFMKTHNTCKAEGSEYQVLYIADDNEIRSLFPGHPHSAYEQAFQGDESVRIDAMDVHVKAGRVYWTNWHTGTISYRSLPPAAPPTTSNRHRRQIDRGVTHLNISGLKMPRGIAIDWVAGNVYWTDSGRDVIEVAQMKGENRKTLISGMIDEPHAIVVDPLRGTMYWSDWGNHPKIETAAMDGTLRETLVQDNIQWPTGLAVDYHNERLYWADAKLSVIGSIRLNGTDPIVAADSKRGLSHPFSIDVFEDYIYGVTYINNRVFKIHKFGHSPLVNLTGGLSHASDVVLYHQHKQPEVTNPCDRKKCEWLCLLSPSGPVCTCPNGKRLDNGTCVPVPSPTPPPDAPRPGTCNLQCFNGGSCFLNARRQPKCRCQPRYTGDKCELDQCWEHCRNGGTCAASPSGMPTCRCPTGFTGPKCTQQVCAGYCANNSTCTVNQGNQPQCRCLPGFLGDRCQYRQCSGYCENFGTCQMAADGSRQCRCTAYFEGSRCEVNKCSRCLEGACVVNKQSGDVTCNCTDGRVAPSCLTCVGHCSNGGSCTMNSKMYEGGEPDDVGGLLDADFALDPDKPTNFTNPVYATLYMGGHGSRHSLASTDEKRELLGRGPEDEIGDPLA

SEQ ID NO: 1027330 - protein, 427 aa, Homo sapiens
MWLSPLVNLTGGLSHASDVVLYHQHKQPEVTNPCDRKKCEWLCLLSPSGPVCTCPNGKRLDNGTCVPVPSPTPPPDAPRPGTCNLQCFNGGSCFLNARRQPKCRCQPRYTGDKCELDQCWEHCRNGGTCAASPSGMPTCRCPTGFTGPKCTQQVCAGYCANNSTCTVNQGNQPQCRCLPGFLGDRCQYRQCSGYCENFGTCQMAADGSRQCRCTAYFEGSRCEVNKCSRCLEGACVVNKQSGDVTCNCTDGRVAPSCLTCVGHCSNGGSCTMNSKMMPECQCPPHMTGPRCEEHVFSQQQPGHIASILIPLLLLLLLVLVAGVVFWYKRRVQGAKGFQHQRMTNGAMNVEIGNPTYKMYEGGEPDDVGGLLDADFALDPDKPTNFTNPVYATLYMGGHGSRHSLASTDEKRELLGRGPEDEIGDPLA

SEQ ID NO: 1027331 - protein, 293 aa, Homo sapiens
GSGVNRHEAGFTGPKCTQQVCAGYCANNSTCTVNQGNQPQCRCLPGFLGDRCQYRQCSGYCENFGTCQMAADGSRQCRCTAYFEGSRCEVNKCSRCLEGACVVNKQSGDVTCNCTDGRVAPSCLTCVGHCSNGGSCTMNSKMMPECQCPPHMTGPRCEEHVFSQQQPGHIASILIPLLLLLLLVLVAGVVFWYKRRVQGAKGFQHQRMTNGAMNVEIGNPTYKMYEGGEPDDVGGLLDADFALDPDKPTNFTNPVYATLYMGGHGSRHSLASTDEKRELLGRGPEDEIGDPLA

SEQ ID NO: 1027332 - protein, 1526 aa, Homo sapiens; identical to SEQ ID NO: 1027318

SEQ ID NO: 1027333 - protein, 1454 aa, Homo sapiens
RGSQTPQSRGTFLIFANRYYLRKLNLDGSNYTLLKQGLNNAVALDFDYREQMIYWTDVTTQGSMIRRMHLNGSNVQVLHRTGLSNPDGLAVDWVGGNLYWCDKGRDTIEVSKLNGAYRTVLVSSGLREPRALVVDVQNGYLYWTDWGDHSLIGRIGMDGSSRSVIVDTKITWPNGLTLDYVTERIYWADAREDYIEFASLDGSNRHVVLSQDIPHIFALTLFEDYVYWTDWETKSINRAHKTTGTNKTLLISTLHRPMDLHVFHALRQPDVPNHPCKVNNGGCSNLCLLSPGGGHKCACPTNFYLGSDGRTCVSNCTASQFVCKNDKCIPFWWKCDTEDDCGDHSDEPPDCPEFKCRPGQFQCSTGICTNPAFICDGDNDCQDNSDEANCDIHVCLPSQFKCTNTNRCIPGIFRCNGQDNCGDGEDERDCPEVTCAPNQFQCSITKRCIPRVWVCDRDNDCVDGSDEPANCTQMTCGVDEFRCKDSGRCIPARWKCDGEDDCGDGSDEPKEECDERTCEPYQFRCKNNRCVPGRWQCDYDNDCGDNSDEESCTPRPCSESEFSCANGRCIAGRWKCDGDHDCADGSDEKDCTPRCDMDQFQCKSGHCIPLRWRCDADADCMDGSDEEACGTGVRTCPLDEFQCNNTLCKPLAWKCDGEDDCGDNSDENPEECARFVCPPNRPFRCKNDRVCLWIGRQCDGTDNCGDGTDEEDCEPPTAHTTHCKDKKEFLCRNQRCLSSSLRCNMFDDCGDGSDEEDCSIDPKLTSCATNASICGDEARCVRTEKAAYCACRSGFHTVPGQPGCQDINECLRFGTCSQLCNNTKGGHLCSCARNFMKTHNTCKAEGSEYQVLYIADDNEIRSLFPGHPHSAYEQAFQGDESVRIDAMDVHVKAGRVYWTNWHTGTISYRSLPPAAPPTTSNRHRRQIDRGVTHLNISGLKMPRGIAIDWVAGNVYWTDSGRDVIEVAQMKGENRKTLISGMIDEPHAIVVDPLRGTMYWSDWGNHPKIETAAMDGTLRETLVQDNIQWPTGLAVDYHNERLYWADAKLSVIGSIRLNGTDPIVAADSKRGLSHPFSIDVFEDYIYGVTYINNRVFKIHKFGHSPLVNLTGGLSHASDVVLYHQHKQPEVTNPCDRKKCEWLCLLSPSGPVCTCPNGKRLDNGTCVPVPSPTPPPDAPRPGTCNLQCFNGGSCFLNARRQPKCRCQPRYTGDKCELDQCWEHCRNGGTCAASPSGMPTCRCPTGFTGPKCTQQVCAGYCANNSTCTVNQGNQPQCRCLPGFLGDRCQYRQCSGYCENFGTCQMAADGSRQCRCTAYFEGSRCEVNKCSRCLEGACVVNKQSGDVTCNCTDGRVAPSCLTCVGHCSNGGSCTMNSKMMPECQCPPHMTGPRCEEHVFSQQQPGHIASILIPLLLLLLLVLVAGVVFWYKRRVQGAKGFQHQRMTNGAMNVEIGNPT

SEQ ID NO: 1027334 - protein, 551 aa, Homo sapiens
RGSQTPQSRGTFLIFANRYYLRKLNLDGSNYTLLKQGLNNAVALDFDYREQMIYWTDVTTQGSMIRRMHLNGSNVQVLHRTGLSNPDGLAVDWVGGNLYWCDKGRDTIEVSKLNGAYRTVLVSSGLREPRALVVDVQNGYLYWTDWGDHSLIGRIGMDGSSRSVIVDTKITWPNGLTLDYVTERIYWADAREDYIEFASLDGSNRHVVLSQDIPHIFALTLFEDYVYWTDWETKSINRAHKTTGTNKTLLISTLHRPMDLHVFHALRQPDVPNHPCKVNNGGCSNLCLLSPGGGHKCACPTNFYLGSDGRTCVSNCTASQFVCKNDKCIPFWWKCDTEDDCGDHSDEPPDCPEFKCRPGQFQCSTGICTNPAFICDGDNDCQDNSDEANCDIHVCLPSQFKCTNTNRCIPGIFRCNGQDNCGDGEDERDCPEVTCAPNQFQCSITKRCIPRVWVCDRDNDCVDGSDEPANCTQMTCGVDEFRCKDSGRCIPARWKCDGEDDCGDGSDEPKEECDERTCEPYQFRCKNNRCIAGRCNAMETIDCPHRHTVPT

SEQ ID NO: 1027335 - protein, 136 aa, Homo sapiens
MAEVVAKLEGPPFIIEAAVRVNAAVLDYCRTFVSALSGATAGILGLTGLYGFIFYLLASVLLSLLPFSRREGGGTNISNPGEPVIFVPPPAPHSQGGKEVEQIFQITETFFTGGLIGGLFTYVLFWTFLYGMVHVY

SEQ ID NO: 1027336 - protein, 963 aa, Homo sapiens
LCSHLWQPGLGSCWSEGFPEAGSTHSRLCLLLCWTLIEAVGSRAKKEAAAEEAKVGWGCPALRPEVPLTLRARAISLMASSGRKLWLRYPSFLPAAWICLLPGWERLGRPRWGCQGQRLFQKCPLLPIRGFGWHLLVAWGAGSRGARLRAVEPQGSCPSAAMLTPAELATVVRRFSQTGIQDFLTLTLTEPTGLLYVGAREALFAFSMEALELQGAISWEAPVEKKTECIQKGKNNQTECFNFIRFLQPYNASHLYVCGTYAFQPKCTYVNMLTFTLEHGEFEDGKGKCPYDPAKGHAGLLVDGELYSATLNNFLGTEPIILRNMGPHHSMKTEYLAFWLNEPHFVGSAYVPESVGSFTGDDDKVYFFFRERAVESDCYAEQVVARVARVCKGDMGGARTLQRKWTTFLKARLACSAPNWQLYFNQLQAMHTLQDTSWHNTTFFGVFQAQWGDMYLSAICEYQLEEIQRVFEGPYKEYHEEAQKWDRYTDPVPSPRPGSCINNWHRRHGYTSSLELPDNILNFVKKHPLMEEQVGPRWSRPLLVKKGTNFTHLVADRVTGLDGATYTVLFIGTGDGWLLKAVSLGPWVHLIEELQLFDQEPMRSLVLSQSKKLLFAGSRSQLVQLPVADCMKYRSCADCVLARDPYCAWSVNTSRCVAVGGHSGSLLIQHVMTSDTSGICNLRGSKKVRPTPKNITVVAGTDLVLPCHLSSNLAHARWTFGGRDLPAEQPGSFLYDARLQALVVMAAQPRHAGAYHCFSEEQGARLAAEGYLVAVVAGPSVTLEARAPLENLGLVWLAVVALGAVCLVLLLLVLSLRRRLREELEKGAKATERTLVYPLELPKEPTSPPFRPCPEPDEKLWDPVGYYYSDGSLKIVPGHARCQPGGGPPSPPPGIPGQPLPSPTRLHLGGGRNSNANGYVRLQLGGEDRGGLGHPLPELADELRRKLQQRQPLPDSNPEESSV

SEQ ID NO: 1027337 - protein, 918 aa, Homo sapiens
LCSHLWQPGLGSCWSEGFPEAGSTHSRLCLLLCWTLIEAVGSRAKKEAAAEEAKVGWGCPALRPEVPLTLRARAISLMASSGRKLWLRYPSFLPAAWICLLPGWERLGRPRWGCQGQRLFQKCPLLPIRGFGWHLLVAWGAGSRGARLRAVEPQGSCPSAAMLTPAELATVVRRFSQTGIQDFLTLTLTEPTGLLYVGAREALFAFSMEALELQGAISWEAPVEKKTECIQKGKNNQTECFNFIRFLQPYNASHLYVCGTYAFQPKCTYVNMLTFTLEHGEFEDGKGKCPYDPAKGHAGLLVDGELYSATLNNFLGTEPIILRNMGPHHSMKTEYLAFWLNEPHFVGSAYVPESVGSFTVDHFLKARLACSAPNWQLYFNQLQAMHTLQDTSWHNTTFFGVFQAQWGDMYLSAICEYQLEEIQRVFEGPYKEYHEEAQKWDRYTDPVPSPRPGSCINNWHRRHGYTSSLELPDNILNFVKKHPLMEEQVGPRWSRPLLVKKGTNFTHLVADRVTGLDGATYTVLFIGTGDGWLLKAVSLGPWVHLIEELQLFDQEPMRSLVLSQSKKLLFAGSRSQLVQLPVADCMKYRSCADCVLARDPYCAWSVNTSRCVAVGGHSGSLLIQHVMTSDTSGICNLRGSKKVRPTPKNITVVAGTDLVLPCHLSSNLAHARWTFGGRDLPAEQPGSFLYDARLQALVVMAAQPRHAGAYHCFSEEQGARLAAEGYLVAVVAGPSVTLEARAPLENLGLVWLAVVALGAVCLVLLLLVLSLRRRLREELEKGAKATERTLVYPLELPKEPTSPPFRPCPEPDEKLWDPVGYYYSDGSLKIVPGHARCQPGGGPPSPPPGIPGQPLPSPTRLHLGGGRNSNANGYVRLQLGGEDRGGLGHPLPELADELRRKLQQRQPLPDSNPEESSV

SEQ ID NO: 1027338 - protein, 833 aa, Homo sapiens
MAPHWAVWLLAARLWGLGIGAEVWWNLVPRKTVSSGELATVVRRFSQTGIQDFLTLTLTEPTGLLYVGAREALFAFSMEALELQGAISWEAPVEKKTECIQKGKNNQTECFNFIRFLQPYNASHLYVCGTYAFQPKCTYVNMLTFTLEHGEFEDGKGKCPYDPAKGHAGLLVDGELYSATLNNFLGTEPIILRNMGPHHSMKTEYLAFWLNEPHFVGSAYVPESVGSFTGDDDKVYFFFRERAVESDCYAEQVVARVARVCKGDMGGARTLQRKWTTFLKARLACSAPNWQLYFNQLQAMHTLQDTSWHNTTFFGVFQAQWGDMYLSAICEYQLEEIQRVFEGPYKEYHEEAQKWDRYTDPVPSPRPGSCINNWHRRHGYTSSLELPDNILNFVKKHPLMEEQVGPRWSRPLLVKKGTNFTHLVADRVTGLDGATYTVLFIGTGDGWLLKAVSLGPWVHLIEELQLFDQEPMRSLVLSQSKKLLFAGSRSQLVQLPVADCMKYRSCADCVLARDPYCAWSVNTSRCVAVGGHSGSLLIQHVMTSDTSGICNLRGSKKVRPTPKNITVVAGTDLVLPCHLSSNLAHARWTFGGRDLPAEQPGSFLYDARLQALVVMAAQPRHAGAYHCFSEEQGARLAAEGYLVAVVAGPSVTLEARAPLENLGLVWLAVVALGAVCLVLLLLVLSLRRRLREELEKGAKATERTLVYPLELPKEPTSPPFRPCPEPDEKLWDPVGYYYSDGSLKIVPGHARCQPGGGPPSPPPGIPGQPLPSPTRLHLGGGRNSNANGYVRLQLGGEDRGGLGHPLPELADELRRKLQQRQPLPDSNPEESSV

SEQ ID NO: 1027339 - protein, 628 aa, Homo sapiens
MAPHWAVWLLAARLWGLGIGAEVWWNLVPRKTVSSGELATVVRRFSQTGIQDFLTLTLTEPTGLLYVGAREALFAFSMEALELQGAISWEAPVEKKTECIQKGKNNQTECFNFIRFLQPYNASHLYVCGTYAFQPKCTYVNMLTFTLEHGEFEDGKGKCPYDPAKGHAGLLVDGELYSATLNNFLGTEPIILRNMGPHHSMKTEYLAFWLNEPHFVGSAYVPESVGSFTGDDDKVYFFFRERAVESDCYAEQVVARVARVCKGDMGGARTLQRKWTTFLKARLACSAPNWQLYFNQLQAMHTLQDTSWHNTTFFGVFQAQWGDMYLSAICEYQLEEIQRVFEGPYKEYHEEAQKWDRYTDPVPSPRPGSCINNWHRRHGYTSSLELPDNILNFVKKHPLMEEQVGPRWSRPLLVKKGTNFTHLVADRVTGLDGATYTVLFIGTGDGWLLKAVSLGPWVHLIEELQLFDQEPMRSLVLSQSKKLLFAGSRSQLVQLPVADCMKYRSCADCVLARDPYCAWSVNTSRCVAVGGHSGSLLIQHVMTSDTSGICNLRGSKKVRPTPKNITVVAGTDLVLPCHLSSNLAPTWPRGSVVFYTCLLPVQGWERLCEGREGRGWACCGQWHTLFQP

SEQ ID NO: 1027340 - protein, 91 aa, Homo sapiens
GPVCSSVLARGLLGVGRSGHLAAASNTGTQPRQGTHPTRQPHQPQVFHVGPGPPRSADWACHYTSDASHLAPGFSGILYLPSSCTGLGKAV

SEQ ID NO: 1027341 - protein, 833 aa, Homo sapiens; identical to SEQ ID NO: 1027338

SEQ ID NO: 1027342 - protein, 595 aa, Homo sapiens
MAPHWAVWLLAARLWGLGIGAEVWWNLVPRKTVSSGELATVVRRFSQTGIQDFLTLTLTEPTGLLYVGAREALFAFSMEALELQGAISWEAPVEKKTECIQKGKNNQTECFNFIRFLQPYNASHLYVCGTYAFQPKCTYVNMLTFTLEHGEFEDGKGKCPYDPAKGHAGLLVDGELYSATLNNFLGTEPIILRNMGPHHSMKTEYLAFWLNEPHFVGSAYVPESVGSFTGDDDKVYFFFRERAVESDCYAEQVVARVARVCKGDMGGARTLQRKWTTFLKARLACSAPNWQLYFNQLQAMHTLQDTSWHNTTFFGVFQAQWGDMYLSAICEYQLEEIQRVFEGPYKEYHEEAQKWDRYTDPVPSPRPGSCINNWHRRHGYTSSLELPDNILNFVKKHPLMEEQVGPRWSRPLLVKKGTNFTHLVADRVTGLDGATYTVLFIGTGDGWLLKAVSLGPWVHLIEELQLFDQEPMRSLVLSQSKKLLFAGSRSQLVQLPVADCMKYRSCADCVLARDPYCAWSVNTSRCVAVGGHSGSLLIQHVMTSDTSGICNLRGSKKVRPTPKNITVVAGTDLVLPCHLSSNLALPDSNPEESSV

SEQ ID NO: 1027343 - protein, 833 aa, Homo sapiens; identical to SEQ ID NO: 1027338

SEQ ID NO: 1027344 - protein, 472 aa, Homo sapiens
MQSNKTFNLEKQNHTPRKHHQHHHQQQHHQQQQQQPPPPPIPANGQQASSQNEGLTIDLKNFRKPGEKTFTQRSRLFVGNLPPDITEEEMRKLFEKYGKAGEVFIHKDKGFGFIRLETRTLAEIAKVELDNMPLRGKQLRVRFACHSASLTVRNLPQYVSNELLEEAFSVFGQVERAVVIVDDRGRPSGKGIVEFSGKPAARKALDRCSEGSFLLTTFPRPVTVEPMDQLDDEEGLPEKLVIKNQQFHKEREQTPRFAQPGSFEYEYAMRWKALIEMEKQQQDQVDRNHQEEAREKLEMEMEAARHEHQVMLMRQDLMRRQEELRRMEELHNQEVQKRKQLELRQEEERRRREEEMRRQQEEMMRRQQEGFKGTFPDAREQEIRMGQMAMGGAMGINNRGAMPPAPVPAGTPAPPGPATMMPDGTLGLTPPTTERFGQAATMEGIGAIGGTPPAFNRAAPGAEFAPNKRRRY

SEQ ID NO: 1027345 - protein, 472 aa, Homo sapiens; identical to SEQ ID NO: 1027344

SEQ ID NO: 1027346 - protein, 472 aa, Homo sapiens
MQSNKTFNLEKQNHTPRKHHQHHHQQQHHQQQQQQPPPPPIPANGQQASSQNEGLTIDLKNFRKPGEKTFTQRSRLFVGNLPPDITEEEMRKLFEKYGKAGEVFIHKDKGFGFIRLETRTLAEIAKVELDNMPLRGKQLRVRFACHSASLTVRNLPQYVSNELLEEAFSVFGQVERAVVIVDDRGRPSGKGIVEFSGKPAARKALDRCSEGSFLLTTFPRPVTVEPMDQLDDEEGLPEKLVIKNQQFHKEREQTPRFAQPGSFEYEYAMRWKALIEMEKQQQDQVDRNHQEEAREKLEMEMEAARHEHQVMLMRQDLMRRQEELRRMEELHNQEVQKRKQLELRQEEERRRREEEMRRQQEEMMRRHEEGFKGTFPDAREQEIRMGQMAMGGAMGINNRGAMPPAPVPAGTPAPPGPATMMPDGTLGLTPPTTERFGQAATMEGIGAIGGTPPAFNRAAPGAEFAPNKRRRY

SEQ ID NO: 1027347 - protein, 42 aa, Homo sapiens
MRAGMLTHAEACVFPEDVAVVRQEAAPQPGFPCDPPVGLDQG

SEQ ID NO: 1027348 - protein, 127 aa, Homo sapiens
LRSSPKLTAPRLCSQAGRPSASVEVCRVVSPPAGVTQSLSAAQKAGWHCLRLRSRQVRVLLHALVTSVLTAVHQLLLHLLVRRLALSRLLRTEMLLRSRRCRYSGLPRYGPLLPALFSRAGPGAGVC

SEQ ID NO: 1027349 - protein, 257 aa, Homo sapiens
HDSGCRATRKYSNFALSGLGGSRARSGRATMGSSKKHRGEKEAAGTTAAAGTGGATEQPPRHREHKKHKHRSGGSGGSGGERRKRSRERGGERGSGRRGAEAEARSSTHGRERSQAEPSERRVKREKRDDGYEAAASSKTSSGDASSLSIEETNKTPGKVGAETLGRLIAIKKWGRAPMVGCPVTADVINPIACDKREELREKLAAAKEKRLEPKAGEDKTLGEDDRGLEETELDREELEVQKEKAWIEEGEVTGGR

SEQ ID NO: 1027350 - protein, 289 aa, Homo sapiens
HDSGCRATRKYSNFALSGLGGSRARSGRATMGSSKKHRGEKEAAGTTAAAGTGGATEQPPRHREHKKHKHRSGGSGGSGGERRKRSRERGGERGSGRRGAEAEARSSTHGRERSQAEPSERRVKREKRDDGYEAAASSKTSSGDASSLSIEETNKTPGKVGAETLGRLIAIKKAQWAWGIGLTLGPPFQKAGTKEEPVDSCCHQTLIGPLAEMRKREASREKAGRVGQRKKALVGNTKMGGRKKKPWGRCNPPLVAQFGVELKRARIWIMEKAWEKGQFGGRPMWVIGG

SEQ ID NO: 1027351 - protein, 140 aa, Homo sapiens
RTSGFAAFGSGSGGWVERSPVRLSSAVGQCEFVTAAVAPRPRAAEVRGGRGRRKRSGSRFRSVFARVEAIPESGGKDKPRLRSYRVTLRKESTMAQESPKNSAAEIPVTSNGEVDDSREHSFNRVRTIFFLLMQRIMISL

SEQ ID NO: 1027352 - protein, 505 aa, Homo sapiens
RTSGFAAFGSGSGGWVERSPVRLSSAVGQCEFVTAAVAPRPRAAEVRGGRGRRKRSGSRFRSVFARVEAIPESGGKDKPRLRSYRVTLRKDLNLLPRLECSVTVSAYCNLCLPGEAILLPQLPESLGPQESTMAQESPKNSAAEIPVTSNGEVDDSREHSFNRDLKHSLPSGLGLSETQITSHGFDNTKEGVIEAGAFQGSPAPPLPSVMSPSRVAASRLAQQGSDLIVPAGGQRTQTKSGPVILADEIKNPAMEKLELVRKWSLNTYKCTRQIISEKLGRGSRTVDLELEAQIDILRDNKKKYENILKLAQTLSTQLFQMVHTQRQLGDAFADLSLKSLELHEEFGYNADTQKLLAKNGETLLGAINFFIASVNTLVNKTIEDTLMTVKQYESARIEYDAYRTDLEELNLGPRDANTLPKIEQSQHLFQAHKEKYDKMRNDVSVKLKFLEENKVKVLHNQLVLFHNAIAAYFAGNQKQLEQTLKQFHIKLKTPGVDAPSWLEEQ

SEQ ID NO: 1027353 - protein, 418 aa, Homo sapiens
RTSGFAAFGSGSGGWVERSPVRLSSAVGQCEFVTAAVAPRPRAAEVRGGRGRRKRSGSRFRSVFARVEAIPESGGKDKPRLRSYRVTLRKESTMAQESPKNSAAEIPVTSNGEVDDSREHSFNRDLKHSLPSGLGLSETQITSHGFDNTKEGVIEAGAFQGSPAPPLPSVMSPSRVAASRLAQQGSDLIVPAGGQRTQTKSGPVILADEIKNPAMEKLELVRKWSLNTYKLFQMVHTQRQLGDAFADLSLKSLELHEEFGYNADTQKLLAKNGETLLGAINFFIASVNTLVNKTIEDTLMTVKQYESARIEYDAYRTDLEELNLGPRDANTLPKIEQSQHLFQAHKEKYDKMRNDVSVKLKFLEENKVKVLHNQLVLFHNAIAAYFAGNQKQLEQTLKQFHIKLKTPGVDAPSWLEEQ

SEQ ID NO: 1027354 - protein, 341 aa, Homo sapiens
MAQESPKNSAAEIPVTSNGEVDDSREHSFNRDLKHSLPSGLGLSETQITSHGFDNTKEGVIEAGAFQGGQRTQTKSGPVILADEIKNPAMEKLELVRKWSLNTYKCTRQIISEKLGRGSRTVDLELEAQIDILRDNKKKYENILKLAQTLSTQLFQMVHTQRQLGDAFADLSLKSLELHEEFGYNADTQKLLAKNGETLLGAINFFIASVNTLVNKTIEDTLMTVKQYESARIEYDAYRTDLEELNLGPRDANTLPKIEQSQHLFQAHKEKYDKMRNDVSVKLKFLEENKVKVLHNQLVLFHNAIAAYFAGNQKQLEQTLKQFHIKLKTPGVDAPSWLEEQ

SEQ ID NO: 1027355 - protein, 466 aa, Homo sapiens
RTSGFAAFGSGSGGWVERSPVRLSSAVGQCEFVTAAVAPRPRAAEVRGGRGRRKRSGSRFRSVFARVEAIPESGGKDKPRLRSYRVTLRKESTMAQESPKNSAAEIPVTSNGEVDDSREHSFNRDLKHSLPSGLGLSETQITSHGFDNTKEGVIEAGAFQGSPAPPLPSVMSPSRVAASRLAQQGSDLIVPAGGQRTQTKSGPVILADEIKNPAMEKLELVRKWSLNTYKCTRQIISEKLGRGSRTVDLELEAQIDILRDNKKKYENILKLAQTLSTQLFQMVHTQRQLGDAFADLSLKSLELHEEFGYNADTQKLLAKNGETLLGAINFFIASVNTLVNKTIEDTLMTVKQYESARIEYDAYRTDLEELNLGPRDANTLPKIEQSQHLFQAHKEKYDKMRNDVSVKLKFLEENKVKVLHNQLVLFHNAIAAYFAGNQKQLEQTLKQFHIKLKTPGVDAPSWLEEQ

SEQ ID NO: 1027356 - protein, 434 aa, Homo sapiens
RTSGFAAFGSGSGGWVERSPVRLSSAVGQCEFVTAAVAPRPRAAEVRGGRGRRKRSGSRFRSVFARVEAIPESGGKDKPRLRSYRVTLRKESTMAQESPKNSAAEIPVTSNGEVDDSREHSFNRDLKHSLPSGLGLSETQITSHGFDNTKEGVIEAGAFQGGQRTQTKSGPVILADEIKNPAMEKLELVRKWSLNTYKCTRQIISEKLGRGSRTVDLELEAQIDILRDNKKKYENILKLAQTLSTQLFQMVHTQRQLGDAFADLSLKSLELHEEFGYNADTQKLLAKNGETLLGAINFFIASVNTLVNKTIEDTLMTVKQYESARIEYDAYRTDLEELNLGPRDANTLPKIEQSQHLFQAHKEKYDKMRNDVSVKLKFLEENKVKVLHNQLVLFHNAIAAYFAGNQKQLEQTLKQFHIKLKTPGVDAPSWLEEQ

SEQ ID NO: 1027357 - protein, 484 aa, Homo sapiens
RTSGFAAFGSGSGGWVERSPVRLSSAVGQCEFVTAAVAPRPRAAEVRGGRGRRKRSGSRFRSVFARVEAIPESGGKDKPRLRSYRVTLRKESTMAQESPKNSAAEIPVTSNGEVDDSREHSFNRDLKHSLPSGLGLSETQITSHGFDNTKEGVIEAGAFQGSPAPPLPSVMSPSRVAASRLAQQGSDLIVPAGGQRTQTKSGPVILADEIKNPAMEKLELVRKWSLNTYKCTRQIISEKLGRGSRTVDLELEAQIDILRDNKKKYENILKLAQTLSTQLFQMVHTQRQLGDAFADLSLKSLELHEEFGYNADTQKLLAKNGETLLGAINFFIASVNTLVNKTIEDTLMTVKQYESARIEYDAYRTDLEELNLGPRDANTLPKIEQSQHLFQAHKEKYDKMRNDVSVKLKFLEENKVKVLHNQLVLFHNAIAAYFAGNQKQLEQTLKQFHIKLKTPGVDAPSWLATAHSQNPPAAQHHTHSTSPP

SEQ ID NO: 1027358 - protein, 341 aa, Homo sapiens; identical to SEQ ID NO: 1027354

SEQ ID NO: 1027359 - protein, 102 aa, Homo sapiens
  misc_feature (9)..(9): Xaa can be any naturally occurring amino acid
  misc_feature (45)..(45): Xaa can be any naturally occurring amino acid
  misc_feature (50)..(50): Xaa can be any naturally occurring amino acid
  misc_feature (81)..(81): Xaa can be any naturally occurring amino acid
DLLEEKDVXGGACGKAPGRKGKGPSRLHRQGRHCAGQQHHGVVGXGQQRXAELGVGTMCSGPWRPWPAPHDGAEAHVDRAXDVGCSALLGNVVALSTTWFYQ

SEQ ID NO: 1027360 - protein, 109 aa, Homo sapiens
RTSGFAAFGSGSGGWVERSPVRLSSAVGQCEFVTAAVAPRPRAAEVRGGRGRRKRSGSRFRSVFARVEAIPESGGKDKPRLRSYRVTLRKVWVLIRKAARSTCLQDSRS

SEQ ID NO: 1027361 - protein, 145 aa, Homo sapiens
  misc_feature (10)..(10): Xaa can be any naturally occurring amino acid
  misc_feature (27)..(27): Xaa can be any naturally occurring amino acid
  misc_feature (29)..(29): Xaa can be any naturally occurring amino acid
MIHQLATVVXQQKSNGMKDAGPSSPAXVXSNSSHGYPNDTVSLASSIATQPELITVHIVKGPMGFGFTIADSPGGGGQRVKQIVDSPRCRGLKEGDLIVEVNKKNVQALTHNQVVDMLVECPKGSEVTLLVQRGGHWDPGQSQVQ

SEQ ID NO: 1027362 - protein, 193 aa, Homo sapiens
  misc_feature (10)..(10): Xaa can be any naturally occurring amino acid
  misc_feature (27)..(27): Xaa can be any naturally occurring amino acid
  misc_feature (29)..(29): Xaa can be any naturally occurring amino acid
MIHQLATVVXQQKSNGMKDAGPSSPAXVXSNSSHGYPNDTVSLASSIATQPELITVHIVKGPMGFGFTIADSPGGGGQRVKQIVDSPRCRGLKEGDLIVEVNKKNVQALTHNQVVDMLVECPKGSEVTLLVQRGGLPVPKKSPNVATTGTGKTRQNSSQHRVSTPPEACTQHPQATRSTGAPRVPTCRGPSFQ

SEQ ID NO: 1027363 - protein, 205 aa, Homo sapiens
MTERRVPFSLLRGPSWDPFRDWYPHSRLFDQAFGLPRLPEEWSQWLGGSSWPGYVRPLPPAAIESPAVAAPAYSRALSRQLSSGVSEIRHTADRWRVSLDVNHFAPDELTVKTKDGVVEITGKHEERQDEHGYISRCFTRKYTLPPGVDPTQVSSSLSPEGTLTVEAPMPKLATQSNEITIPVTFESRAQLGGPEAAKSDETAAK

SEQ ID NO: 1027364 - protein, 205 aa, Homo sapiens; identical to SEQ ID NO: 1027363

SEQ ID NO: 1027365 - protein, 229 aa, Homo sapiens
MTERRVPFSLLRGPSWDPFRDWYPHSRLFDQAFGLPRLPEEWSQWLGGSSWPGYVRPLPPAAIESPAVAAPAYSRALSRQLSSGVSEIRHTADRWRVSLDVNHFAPDELTVKTKDGVVEITGKHEERQDEHGYISRCFTRKYTLPPGVDPTQVSSSLSPEGTLTVEAPMPKLATQSNEITIPVTFRDWYPHSRLFDQASGCPGCRRSGRSGYGGSSWPEAAKSDETAAK

SEQ ID NO: 1027366 - protein, 223 aa, Homo sapiens
LGRGWVEIGRGSRAESASMTERRVPFSLLRGPSWDPFRDWYPHSRLFDQAFGLPRLPEEWSQWLGGSSWPGYVRPLPPAAIESPAVAAPAYSRALSRQLSSGVSEIRHTADRWRVSLDVNHFAPDELTVKTKDGVVEITGKHEERQDEHGYISRCFTRKYTLPPGVDPTQVSSSLSPEGTLTVEAPMPKLATQSNEITIPVTFESRAQLGGPEAAKSDETAAK

SEQ ID NO: 1027367 - protein, 229 aa, Homo sapiens
MTERRVPFSLLRGPSWDPFRDWYPHSRLFDQAFGLPRLPEEWSQWLGGSSWPGYVRPLPPAAIESPAVAAPAYSRALSRQLSSGVSEIRHTADRWRVSLDVNHFAPDELTVKTKDGVVEITGKHEERQDEHGYISRCFTRKYTLPPGVDPTQVSSSLSPEGTLTVEAPMPKLATQSNEITIPVTFESRAQLGGPEAAKQTNEITIPVTFESRAQLAGPEAAKSDETAAK

SEQ ID NO: 1027368 - protein, 367 aa, Homo sapiens
KFVLLLSLIGFCWAQYDPHTSDGRTAIVHLFEWRWVDIAKICERYLAPKGFGGVQVSPPNENVVVHNPSRPWWERYQPISYKICTRSGNEDEFRDMVTRCNNVGVIDLGGEAIKGSEYFGNGRVTEFKYGAKLGTVIRKWNGEKMSYLKNWGEGWGMVPSDRALVFVDNHDNQRGHGAGGSSILTFWDARMYKMAVGFMLAHPYGFTRVMSSYRWNRNFQNGKDQNDWIGPPNNNGVTKEVTINADTTCGNDWVCEHRWRQIRNMVAFRNVVNGQPFSNWWDNNSNQVAFSRGNRGFIVFNNDDWALSATLQTGLPAGTYCDVISGDKVDGNCTGLRVNVGSDGKAHFSISNSAEDPFIAIHADSKL

SEQ ID NO: 1027369 - protein, 507 aa, Homo sapiens
KFVLLLSLIGFCWAQYDPHTSDGRTAIVHLFEWRWVDIAKICERYLAPKGFGGVQVSPPNENVVVHNPSRPWWERYQPISYKICTRSGNEDEFRDMVTRCNNVGVRIYVDAVINHMCGAGNPAGTSSTCGSYLNPNNREFPAVPYSAWDFNDNKCNGEIDNYNDAYQVRNCRLTGLLDLALEKDYVRTKVADYMNHLIDIGVAGFRLDAAKHMWPGDIKAVLDKLHNLNTKWFSQGSRPFIFQEVIDLGGEAIKGSEYFGNGRVTEFKYGAKLGTVIRKWNGEKMSYLKNWGEGWGMVPSDRALVFVDNHDNQRGHGAGGSSILTFWDARMYKMAVGFMLAHPYGFTRVMSSYRWNRNFQNGKDQNDWIGPPNNNGVTKEVTINADTTCGNDWVCEHRWRQIRNMVAFRNVVNGQPFSNWWDNNSNQVAFSRGNRGFIVFNNDDWALSATLQTGLPAGTYCDVISGDKVDGNCTGLRVNVGSDGKAHFSISNSAEDPFIAIHADSKL

SEQ ID NO: 1027370 - protein, 507 aa, Homo sapiens; identical to SEQ ID NO: 1027369

SEQ ID NO: 1027371 - protein, 189 aa, Homo sapiens
VLVSCRAGPGSGRVGHHHLTGLAGGTGLCGPAAICEARGDGRGGGWPVGFPQRGQVAWRERGSGTGSLVGGADAPRPGVALPGHWWDPCSGLLSGCQLCLKDSWNLRTRSRSALGPGPHAGPGGTTQPGIVHGQRCSPRALLGSLTERLLWLKVGWGRGLGPPWLSPVRPGAPPAGSAPGLRWCGALSG

SEQ ID NO: 1027372 - protein, 189 aa, Homo sapiens; identical to SEQ ID NO: 1027371

SEQ ID NO: 1027373 - protein, 129 aa, Homo sapiens
MAGGCRYSWGPSGGSAKDPTPTPGAFCSQRPPIRARTLGNARGSRGKSPGTGPPLRGVGCFLGTLSFPALAGWLAVKHLKPPGRQPLKSRSWPPWPQKTYPAVYVSRALPGGFPSLPHRAGDGKRWREE

SEQ ID NO: 1027374 - protein, 129 aa, Homo sapiens; identical to SEQ ID NO: 1027373

SEQ ID NO: 1027375 - protein, 123 aa, Homo sapiens
RRHHHRMESNGIIERTRMETSNGIEWNHHRMRSNGIMNNIEWNHRRMESNGIIKWTRTESSWNVIEENLLMDSSGIIIEGKRMESSSNEIECIIIKWNRVEALSGLKRNVDAAANLVVVVGGR

SEQ ID NO: 1027376 - protein, 108 aa, Homo sapiens
EVAPVSWSGRGLLPGSGSAGGTVNQSWHPHPGQRGLWFSASEGSAAPLLFRLQGCHLLSPQVVWPLWSILGIRFSSRALASCLFFNWEHRLSQDQNPHSPPRSYLASL

SEQ ID NO: 1027377 - protein, 108 aa, Homo sapiens; identical to SEQ ID NO: 1027376

SEQ ID NO: 1027378 - protein, 108 aa, Homo sapiens; identical to SEQ ID NO: 1027376

SEQ ID NO: 1027379 - protein, 174 aa, Homo sapiens
  misc_feature (18)..(18): Xaa can be any naturally occurring amino acid
MCWYGRSTGWAMALLTPXGVKEVFQFQRPQGRERLRRLLNWEEFDEQRDSRRSILLDTLYESIIFAVGKGFPWVEVAQVVKFTEELLRETKGCSITEAVTILGNKLRDYRGHFNTTHLLALCDYFHHTFIRHYKLYQYVLGQDQQVDLTVAHLEVCMPPLSRPPSPATQARRKP

SEQ ID NO: 1027380 - protein, 133 aa, Homo sapiens
  misc_feature (18)..(18): Xaa can be any naturally occurring amino acid
MCWYGRSTGWAMALLTPXGVKEVFQFQRPQGRERLRRLLNWEEFDEQRDSRRSILLDTLYESIIFAVGKGFPWVEVAQVVKFTEELLRETKVTKRKEYSYREEADSCLLSQMIQVDIVSKRPHTESRVPGQTQ

SEQ ID NO: 1027381 - protein, 238 aa, Homo sapiens
  misc_feature (18)..(18): Xaa can be any naturally occurring amino acid
MCWYGRSTGWAMALLTPXGVKEVFQFQRPQGRERLRRLLNWEEFDEQRDSRRSILLDTLYESIIFAVGKGFPWVEVAQVVKFTEELLRETKEFSPGAHTAHQLCRNASRGLMMAMTVTMALLIECLLCTRHCGKHHICMLSPNLRGRDFYCLYFTGCSITEAVTILGNKLRDYRGHFNTTHLLALCDYFHHTFIRHYKLYQYVLGQDQQVDLTVAHLEVCMPPLSRPPSPATQARRKP

SEQ ID NO: 1027382 - protein, 87 aa, Homo sapiens
QPGQVLERQELESLICQAVHTQMDLLQELLQRQIQNTFAILDLKLQKKTLNLNAPTPIPPPITSHAGQEEALKPQRASKGKKAKARK

SEQ ID NO: 1027383 - protein, 280 aa, Homo sapiens
  misc_feature (2)..(2): Xaa can be any naturally occurring amino acid
GXQRLVTQIATTPQFPNMILSASRDKTIIMWKLTRDETNYGIPQRALRGNSHFVSDVVSPQMDSFPSQLWDEPCASGVSQRAPPRGDLWPIPRIVLSVAFSSDNRQIVSGSRDYTLKLWNTLGVCKYTVQDESHSEWVSCVRFSPHSSNPIIVSCGWDQLVKVWNLANCQLKTHPLGPTGYLNPVTVSPDGSLCASGGKDGQAMLWDLNEGKHLYTLDGGDIINALCFSPNRYWLCAATGPSIKIWDLEGKILVDELKQEVISTSSKAEPPPVHLPGLVC

SEQ ID NO: 1027384 - protein, 280 aa, Homo sapiens; identical to SEQ ID NO: 1027383
  misc_feature (2)..(2): Xaa can be any naturally occurring amino acid

SEQ ID NO: 1027385 - protein, 97 aa, Homo sapiens
VGGEERRAEGGGGGLVQAHAMLWDLNEGKHLYTLDGGDIINALCFSPNRYWLCAATGPSIKIWDLEGKILVDELKQEVISTSSKAEPPPVHLPGLVC

SEQ ID NO: 1027386 - protein, 141 aa, Homo sapiens
  misc_feature (7)..(7): Xaa can be any naturally occurring amino acid
  misc_feature (29)..(29): Xaa can be any naturally occurring amino acid
  misc_feature (61)..(61): Xaa can be any naturally occurring amino acid
  misc_feature (67)..(67): Xaa can be any naturally occurring amino acid
  misc_feature (70)..(70): Xaa can be any naturally occurring amino acid
APLDSPXQVASTHVLPSWGDGFLWPSPPXSPVDLCEMQPQKEQGPRGRSPGGSWFRVFTQXTLGPLXKGXAFSGLPPATASSLASAFHPSSSLPRGPDACAPARPRLFTPFTAVHALNATRVRDASSGVLGCCRRLGVFKW

SEQ ID NO: 1027387 - protein, 124 aa, Homo sapiens
TSIMSAPEIFIMCLKKTRDNAVRRPFHGKKEENNGLNQSLMSQSMSSVSSRHFEKIAIRDFQSLYLPLDLKPGEGASGASRRPWVLGKVMEKEYCQAKKAQNRFKVPLGTKFYRVKAVSWNKKV

SEQ ID NO: 1027388 - protein, 124 aa, Homo sapiens; identical to SEQ ID NO: 1027387

SEQ ID NO: 1027389 - protein, 184 aa, Homo sapiens
MVRKLKFHEQKLLKQVDFLNWEVTDHNLHELRVLRRYRLQRREDYTRYNQLSRAVRELARRLRDLPERDQFRVRASAALLDKLYALGLVPTRGSLELCDFVTASSFCRRRLPTVLLKLRMAQHLQAAVAFVEQGHVRVGPDVVTDPAFLVTRSMEDFVTWVDSSKIKRHVLEYNEERDDFDLEA

SEQ ID NO: 1027390 - protein, 223 aa, Homo sapiens
SGGLGAPRRKSRGCQNALSASGPAAAAAAIMVRKLKFHEQKLLKQVDFLNWEVTDHNLHELRVLRRYRLQRREDYTRYNQLSRAVRELARRLRDLPERDQFRVRASAALLDKLYALGLVPTRGSLELCDFVTASSFCRRRLPTVLLKLRMAQHLQAAVAFVEQGHVRVGPDVVTDPAFLVTRSMEDFVTWVDSSKIKRHVLEYNEGTAKETFFRNSPWGGKKR

SEQ ID NO: 1027391 - protein, 184 aa, Homo sapiens; identical to SEQ ID NO: 1027389

SEQ ID NO: 1027392 - protein, 189 aa, Homo sapiens
SGGLGAPRRKSRGCQNALSASGPAAAAAAIMVRKLKFHEQKLLKQVDFLNWEVTDHNLHELRVLRRYRLQRREDYTRYNQLSRAVRELARRLRDLPERDQFRVRASAALLDKLYALGLVLLKLRMAQHLQAAVAFVEQGHVRVGPDVVTDPAFLVTRSMEDFVTWVDSSKIKRHVLEYNEERDDFDLEA

SEQ ID NO: 1027393 - protein, 95 aa, Homo sapiens
SGGLGAPRRKSRGCQNALSASGPAAAAAAIMVRKLKFHEQKLLKQVDFLNWEVTDHNLHELRVLRRYRRAPQAAHGAAPSGCRGLCGARARTRGP

SEQ ID NO: 1027394 - protein, 214 aa, Homo sapiens
SGGLGAPRRKSRGCQNALSASGPAAAAAAIMVRKLKFHEQKLLKQVDFLNWEVTDHNLHELRVLRRYRLQRREDYTRYNQLSRAVRELARRLRDLPERDQFRVRASAALLDKLYALGLVPTRGSLELCDFVTASSFCRRRLPTVLLKLRMAQHLQAAVAFVEQGHVRVGPDVVTDPAFLVTRSMEDFVTWVDSSKIKRHVLEYNEERDDFDLEA

SEQ ID NO: 1027395 - protein, 214 aa, Homo sapiens; identical to SEQ ID NO: 1027394

SEQ ID NO: 1027396 - protein, 192 aa, Homo sapiens
SGGLGAPRRKSRGCQNALSASGPAAAAAAIMVRKLKFHEQKLLKQVDFLNWEVTDHNLHELRVLRRYRLQRREDYTRYNQLSRAVRELARRLRDLPERDQFRVRASAALLDKLYALGLVPTRGSLELCDFVTASSFCRRRLPTSAMTSIWKPSGSPTLHGCLLQMGKLRPDAGDSMRVLSSRVSDGRRFLRI

SEQ ID NO: 1027397 - protein, 184 aa, Homo sapiens; identical to SEQ ID NO: 1027389

SEQ ID NO: 1027398 - protein, 184 aa, Homo sapiens; identical to SEQ ID NO: 1027389

SEQ ID NO: 1027399 - protein, 342 aa, Homo sapiens
AFVRSKVASTFPERLLRFCLDRPLTTDMSRDRFRSRGGGGGGFHRRGGGGGRGGSTTSVLRRPAWASIRIAAPWVLARARAALSLRSRHRLHTNSSNSHHRSSHRRSSRHRISRRRIHSRISSSSRRHRRRTLPSPSLLRDPAPHPGVGSAPPASSSAPPATPPTSGAPPGSGPGPTPTPPPAVTSAPPGAPPPTPPSSGVPTTPPQAGGPPPPPAAVPGPGPGPKQGPGPGGPKGGKMPGGPKPGGGPGLSTPGGHPKPPHRGGGEPRGGRQHHPPYHQQHHQGPPPGGPGGAARRRSRTRRGLKPIVSLEEAGEKTYTQDVGSKLGIYLLISRRIIQKDY

SEQ ID NO: 1027400 - protein, 240 aa, Homo sapiens
AFVRSKVASTFPERLLRFCLDRPLTTDMSRDRFRSRGGGGGGFHRRGGGGGRGGSTTSVLRRPAWASIRIAARPDSDPAACSHLGPSRGAAPTPPSSGVPTTPPQAGGPPPPPAAVPGPGPGPKQGPGPGGPKGGKMPGGPKPGGGPGLSTPGGHPKPPHRGGGEPRGGRQHHPPYHQQHHQGPPPGGPGGAARRRSRTRRGLKPIVSLEEAGEKTYTQDVGSKLGIYLLISRRIIQKDY

SEQ ID NO: 1027401 - protein, 184 aa, Homo sapiens
MATALALRSLYRARPSLRCPPVELPWAPRRGHRLSPADDELYQRTRISLLQREAAQAMYIDSYNSRGFMINGNRVLGPCALLPHSVVQWNVGSHQDITEDSFSLFWLLEPRIEIVVVGTGDRTERLQSQVLQAMRQRGIAVEVQDTPNACATFNFLCHEGRVTGAALIPPPGGTSLTSLGQAAQ

SEQ ID NO: 1027402 - protein, 184 aa, Homo sapiens; identical to SEQ ID NO: 1027401

SEQ ID NO: 1027403 - protein, 127 aa, Homo sapiens
MYIDSYNSRGFMINGNRVLGPCALLPHSVVQWNVGSHQDITEDSFSLFWLLEPRIEIVVVGTGDRTERLQSQVLQAMRQRGIAVEVQDTPNACATFNFLCHEGRVTGAALIPPPGGTSLTSLGQAAQ

SEQ ID NO: 1027404 - protein, 127 aa, Homo sapiens; identical to SEQ ID NO: 1027403

SEQ ID NO: 1027405 - protein, 184 aa, Homo sapiens; identical to SEQ ID NO: 1027401

SEQ ID NO: 1027406 - protein, 197 aa, Homo sapiens
MPKPRAGASDSRASRPLTWIKDGGTGDSQDASRVNEDKGAPRRGHRLSPADDELYQRTRISLLQREAAQAMYIDSYNSRGFMINGNRVLGPCALLPHSVVQWNVGSHQDITEDSFSLFWLLEPRIEIVVVGTGDRTERLQSQVLQAMRQRGIAVEVQDTPNACATFNFLCHEGRVTGAALIPPPGGTSLTSLGQAAQ

SEQ ID NO: 1027407 - protein, 184 aa, Homo sapiens
MATALALRSLYRARPSLRCPPVELPWAPRRGHRLSPADDELYQRTRISLLQREAAQAMYIDSYNSRGFMINGNRVLGPCALLPHSVVQWNVGSHQDITEDSFSLFWLLEPRIEIVVVGTGDRTERLQSQVLQAMRQRGIAVEVQDTVSPGTGACCGEHRPGARQADAGLFFAAQCLCHLQLPVS

SEQ ID NO: 1027408 - protein, 184 aa, Homo sapiens; identical to SEQ ID NO: 1027401

SEQ ID NO: 1027409 - protein, 220 aa, Homo sapiens
  misc_feature (2)..(3): Xaa can be any naturally occurring amino acid
  misc_feature (7)..(7): Xaa can be any naturally occurring amino acid
MXXLINXRYSPAAPPPQRPGPSSHRTICATPSASAWTRPTCGCLWTASFATPPSDLGLQCDAVNLAFGRRCEELEDVRHKLQHHLHKMLREITDQEHNVVALKEAIKDKEEPLHIAQTRLYLPSHRPNMQLCREAAQFSPSSPPPNTPKLVSEVEELYKSITVPREKLLQAEQSLCNLEDIHMSLEKDVTAMTNSLFIDRQKYMAHRTCYPTILQLAGYQ

SEQ ID NO: 1027410 - protein, 189 aa, Homo sapiens
GRADPSGCRVAEQPGAWCYVPVRYVSSCLWVCQERIRDDINLLPGSASTPETRTKFTQDNLCHAQRERLDSANLWVLVDCILRDTSEDLGLQCDAVNLAFGRRCEELEDVRHKLQHHLHNGAGTLNPRRRLRRLPTHSDPSHHLALGPQTAINSRRDPSYIPREPRSKCHTLPKAYVKPGDTGYDRKVM

SEQ ID NO: 1027411 - protein, 144 aa, Homo sapiens
  misc_feature (10)..(10): Xaa can be any naturally occurring amino acid
  misc_feature (15)..(15): Xaa can be any naturally occurring amino acid
  misc_feature (18)..(19): Xaa can be any naturally occurring amino acid
  misc_feature (21)..(21): Xaa can be any naturally occurring amino acid
  misc_feature (23)..(23): Xaa can be any naturally occurring amino acid
  misc_feature (28)..(28): Xaa can be any naturally occurring amino acid
AFTLIVTRQXFTHIXELXXNXFXNEPPXQPGSASTPETRTKFTQDNLCHAQRERLDSANLWVLVDCILRDTSKLVSEVEELYKSITVPREKLLQAEQSLCNLEDIHMSLEKDVTAMTNSLFIDRQKYMAHRTCYPTILQLAGYQ

SEQ ID NO: 1027412 - protein, 215 aa, Homo sapiens
  misc_feature (1)..(1): Xaa can be any naturally occurring amino acid
  misc_feature (3)..(3): Xaa can be any naturally occurring amino acid
  misc_feature (6)..(6): Xaa can be any naturally occurring amino acid
  misc_feature (13)..(14): Xaa can be any naturally occurring amino acid
  misc_feature (18)..(19): Xaa can be any naturally occurring amino acid
XSXLFXRLLICKXXHKAXXASIGSRLLAGQTTGALAVAVAQPTDVVKVRFQAQARAGGGRRYQSTVNAYKTIAREEGFRGLWKGTSPNVARNAIVNCAELVTYDLIKDALLKANLMTDDLPCHFTSAFGAGFCTTVIASPVDVVKTRYMNSALGQYSSAGHCALTMLQKEGPRAFYKGFMPSFLRLGSWNVVMFVTYEQLKRALMAACTSREAPF

SEQ ID NO: 1027413 - protein, 130 aa, Homo sapiens
TLMTRSLVEMPPLCPPLCCPIKDALLKANLMTDDLPCHFTSAFGAGFCTTVIASPVDVVKTRYMNSALGQYSSAGHCALTMLQKEGPRAFYKGFMPSFLRLGSWNVVMFVTYEQLKRALMAACTSREAPF

SEQ ID NO: 1027414 - protein, 232 aa, Homo sapiens
KPLQWAVARLQRANEFASVRIACMICQTVYTKGSEHASIGSRLLAGQTTGALAVAVAQPTDVVKVRFQAQARAGGGRRYQSTVNAYKTIAREEGFRGLWKGTSPNVARNAIVNCAELVTYDLIKDALLKANLMTDDLPCHFTSAFGAGFCTTVIASPVDVVKTRYMNSALGQYSSAGHCALTMLQKEGPRAFYKGFMPSFLRLGSWNVVMFVTYEQLKRALMAACTSREAPF

SEQ ID NO: 1027415 - protein, 232 aa, Homo sapiens; identical to SEQ ID NO: 1027414

SEQ ID NO: 1027416 - protein, 115 aa, Homo sapiens
SHRHTITHTLFLPQRRTITYTDTDTQRHRHTNIDTHTQTHTRHAKTHRHRYTDTKTQTYRHTDMHRDTWRHMQKCTEKDIQKCTHRHIDHTDTQTCMQTHRHADMHTNTDARTQT

SEQ ID NO: 1027417 - protein, 107 aa, Homo sapiens
LAQTHNHTHPLLATETHHYIHRHRQDTHTQTHTRHAKTHRHRYTDTKTQTYRHTDMHRDTWRHMQKCTEKDIQKCTHRHIDHTDTQTCMQTHRHADMHTNTDARTQT

SEQ ID NO: 1027418 - protein, 152 aa, Homo sapiens
EFLHGTKRDDGQASIPTEISGNSPVSPNTQDKSVGQSPLRSPLKRQASVCSTRLGSTKSLTAAFYGDKQPVTVGVQFSSDVSRSDENVLDSPKQRRSFGSFPYTPSADSNSFHQYRSMDSSMSMADSEAYFSAAEEFEPISSDEGPGTYPGR

SEQ ID NO: 1027419 - protein, 157 aa, Homo sapiens
EFLHGTKRDDGQASIPTEISGNSPVSPNTQDKSVGQSPLRSPLKRQASVCSTRLGSTKSLTAAFYGDKQPVTVGVQFSSDVSRSDENVLDSPKQRRSFGSFPYTPSADSNSFHQYRSMDSSMSMADSEAYFSAAEEFEPISSDEGPDKFQGLRRRGR

SEQ ID NO: 1027420 - protein, 103 aa, Homo sapiens
MSDCYTELEKAVIVLVENFYKYVSKYSLVKNKISKSSFREMLQKELNHMLSDTGNRKAADKLIQNLDANHDGRISFDEYWTLIGGITGPIAKLIHEQEQQSSS

SEQ ID NO: 1027421 - protein, 103 aa, Homo sapiens; identical to SEQ ID NO: 1027420

SEQ ID NO: 1027422 - protein, 103 aa, Homo sapiens; identical to SEQ ID NO: 1027420

SEQ ID NO: 1027423 - protein, 103 aa, Homo sapiens; identical to SEQ ID NO: 1027420

SEQ ID NO: 1027424 - protein, 120 aa, Homo sapiens
MSPTEAAAGTTQGKATHILKRTPRRGAPTHNKQTNPLNNRTHTRRLHSYTRGQRKAHQPRNTAGAQLSLESHHPDDEGESPNKAKNHNRQPTTGAANTDTPRQGERRTTAEIAEEQPPRN

SEQ ID NO: 1027425 - protein, 103 aa, Homo sapiens; identical to SEQ ID NO: 1027420

SEQ ID NO: 1027426 - protein, 103 aa, Homo sapiens; identical to SEQ ID NO: 1027420

SEQ ID NO: 1027427 - protein, 103 aa, Homo sapiens; identical to SEQ ID NO: 1027420

SEQ ID NO: 1027428 - protein, 103 aa, Homo sapiens; identical to SEQ ID NO: 1027420

SEQ ID NO: 1027429 - protein, 112 aa, Homo sapiens
MSDCYTELEKAVIVLVENFYKYVSKYSLVKNKISKSSFREMLQKELNHMLSQLLTLLPPQDTGNRKAADKLIQNLDANHDGRISFDEYWTLIGGITGPIAKLIHEQEQQSSS

SEQ ID NO: 1027430 - protein, 103 aa, Homo sapiens; identical to SEQ ID NO: 1027420

SEQ ID NO: 1027431 - protein, 103 aa, Homo sapiens; identical to SEQ ID NO: 1027420

SEQ ID NO: 1027432 - protein, 103 aa, Homo sapiens; identical to SEQ ID NO: 1027420

SEQ ID NO: 1027433 - protein, 172 aa, Homo sapiens
PAWEWEWPQVANGKQVAGQEAVCGGLTEQPFLPNLTVACSGPYGGCDPVLSISFHQDPPGGPASRRSREMSDCYTELEKAVIVLVENFYKYVSKYSLVKNKISKSSFREMLQKELNHMLSDTGNRKAADKLIQNLDANHDGRISFDEYWTLIGGITGPIAKLIHEQEQQSSS

SEQ ID NO: 1027434 - protein, 120 aa, Homo sapiens
MSPSEAAAGTTQGKATHILKRTPRRGAPTHNKQTNPLNNRTHTRRLHSYTRGQRKAHQPRNTAGAQLSLESHHPDDEGESPNKAKNHNRQPTTGAANTDTPRQGERRTTAEIAEEQPPRN

SEQ ID NO: 1027435 - protein, 120 aa, Homo sapiens; identical to SEQ ID NO: 1027424

SEQ ID NO: 1027436 - protein, 173 aa, Homo sapiens
MLAEKLPNLTHLNLSGNKLKDISTLEPLKKLECLKSLDLFNCEVTNLNDYRESVFKLLPQLTYLDGYDREDQEAPDSDAEVDGVDEEEEDEEGEDEEDEDDEDGEEEEFDEEDDSTMKNVDGDEGRPMKFSEEGKKEFGLDEEDEDEDEDEEEEEGGKGEKRKRETDDEGEDD

SEQ ID NO: 1027437 - protein, 152 aa, Homo sapiens
MKGLGTDEDSLIEIICSRTNQELQEINRVYKEMYKTDLEKDIISDTSGDFRKLMVALAKGRRAEDGSVIDYELIDQDARDLYDAGVKRRKEVPGAQILDGGRAHFQSFEGQSAAFDVERFATGNGTEGLAVGLKNPFVTVSHKGGKRHKTQR

SEQ ID NO: 1027438 - protein, 206 aa, Homo sapiens
MKGLGTDEDSLIEIICSRTNQELQEINRVYKEMYKTDLEKDIISDTSGDFRKLMVALAKGRRAEDGSVIDYELIDQDARDLYDAGVKRKGTDVPKWISIMTERSVPHLQKVFDRYKSYSPYDMLESIRKEVKGDLENAFLNLVQCIQNKPLYFADRLYDSMKGKGTRDKVLIRIMVSRSEVDMLKIRSEFKRKYGKSLYYYIPARH

SEQ ID NO: 1027439 - protein, 206 aa, Homo sapiens; identical to SEQ ID NO: 1027438

SEQ ID NO: 1027440 - protein, 118 aa, Homo sapiens
ALLSIWGRSQLSAHGPASFKMSTVHEILCKLSLEGDHSTPPSAYGSVKAYTNFDAERDALNIETAIKTKGVDEVTIVNIFDQPQQCTETGYCLRLPEKDQKGTCISTEVSLIWATWRR

SEQ ID NO: 1027441 - protein, 461 aa, Homo sapiens
ALLSIWGRSQLSAHGPASFKMSTVHEILCKLSLEGDHSTPPSAYGSVKAYTNFDAERDALNIETAIKTKGVACRSTHCQTILHPHRQQHSHSSTRHHCASAVTQQQGTKQQAHYAIQPLQVQAFIMAHPGSTYKAFIGPSLAQAPPYTPGHSTALMQTKTAITHDKRGSETPARQALSSIAESIIGSQGNPTAGQARRGNTFTPSKSYQRANMVPKHMHRGQQRTNIIIQGTTNPGEHFPDKQQCTAEQAHMAKKGDTDNEPQRRERAYLTTEAVIEPEHYAPQAMPPGETIKWNGQRTSTEPNPPHPRTVTTNGGDHANEGTRSGADEGPPPITREKKYEKKVPKDGSTAQTREAWESETEENRAHRKTRHTGSTRNRNTAPRQPPTPAQAHNAAAAPRHRTRHHRKRHTQKRNHTKHGPITHQASNQTREKQHINHQQPGHNTRHHAETAHTANVRPQT

SEQ ID NO: 1027442 - protein, 206 aa, Homo sapiens; identical to SEQ ID NO: 1027438

SEQ ID NO: 1027443 - protein, 359 aa, Homo sapiens
ALLSIWGRSQLSAHGPASFKMSTVHEILCKLSLEGDHSTPPSAYGSVKAYTNFDAERDALNIETAIKTKGVDEVTIVNLWYRARSRQLRTAQNMDEFVLYDLTRDEYGPMKETCRSREHGDSRTVSGAPCEYPVILGLLKTPAQYDASELKASMKGLGTDEDSLIEIICSRTNQELQEINRVYKEMYKTDLEKDIISDTSGDFRKLMVALAKGRRAEDGSVIDYELIDQDARDLYDAGVKRKGTDVPKWISIMTERSVPHLQKVFDRYKSYSPYDMLESIRKEVKGDLENAFLNLVQCIQNKPLYFADRLYDSMKGKGTRDKVLIRIMVSRSEVDMLKIRSEFKRKYGKSLYYYIPARH

SEQ ID NO: 1027444 - protein, 2644 aa, Homo sapiens
MGEHGLELASMIPALRELGSATPEEYNTVVQKPRQILCQFIDRILTDVNVVAVELVKKTDSQPTSVMLLDFIQHIMKSSPLMFVNVSGSHEAKGSCIEFSNWIITRLLRIAATPSCHLLHKKICEVICSLLFLFKSKSPAIFGVLTKELLQLFEDLVYLHRRNVMGHAVEWPVVMSRFLSQLDEHMGYLQSAPLQLMSMQNLEFIEVTLLMVLTRIIAIVFFRRQELLLWQIGCVLLEYGSPKIKSLAISFLTELFQLGGLPAQPASTFFSSFLELLKHLVEMDTDQLKLYEEPLSKLIKTLFPFEAEAYRNIEPVYLNMLLEKLCVMFEDGVLMRLKSDLLKAALCHLLQYFLKFVPAGYESALQVRKVYVRNICKALLDVLGIEVDAEYLLGPLYAALKMESMEIIEEIQCQTQQENLSSNSDGISPKRRRLSSSLNPSKRAPKQTEEIKHVDMNQKSILWSALKQKAESLQISLEYSGLKNPVIEMLEGIAVVLQLTALCTVHCSHQNMNCRTFKDCQHKSKKKPSVVITWMSLDFYTKVLKSCRSLLESVQKLDLEATIDKVVKIYDALIYMQVNSSFEDHILEDLCGMLSLPWIYSHSDDGCLKLTTFAANLLTLSCRISDSYSPQAQSRCVFLLTLFPRRIFLEWRTAVYNWALQSSHEVIRASCVSGFFILLQQQNSCNRVPKILIDKVKDDSDIVKKEFASILGQLVCTLHGMFYLTSSLTEPFSEHGHVDLFCRNLKATSQHECSSSQLKASVCKPFLFLLKKKIPSPVKLAFIDNLHHLCKHLDFREDETDVKAVLGTLLNLMEDPDKDVRVAFSGNIKHILESLDSEDGFIKELFVLRMKEAYTHAQISRNNELKDTLILTTGDIGRAAKGDLVPFALLHLLHCLLSKSASVSGAAYTEIRALVAAKSVKLQSFFSQYKKPICQFLVESLHSSQMTALPNTPCQNADVRKQDVAHQREMALNTLSEIANVFDFPDLNRFLTRTLQVLLPDLAAKASPAASALIRTLGKQLNVNRREILINNFKYIFSHLVCSCSKDELERALHYLKNETEIELGSLLRQDFQGLHNELLLRIGEHYQQVFNGLSILASFASSDDPYQGPRDIISPELMADYLQPKLLGILAFFNMQLLSSSVGIEDKKMALNSLMSLMKLMGPKHVSSVRVKMMTTLRTGLRFKDDFPELCCRAWDCFVRCLDHACLGSLLSHVIVALLPLIHIQPKETAAIFHYLIIENRDAVQDFLHEIYFLPDHPELKKIKAVLQEYRKETSESTDLQTTLQLSMKAIQHENVDVRIHALTSLKETLYKNQEKLIKYATDSETVEPIISQLVTVLLKGCQDANSQARLLCGECLGELGAIDPGRLDFSTTETQGKDFTFVTGVEDSSFAYGLLMELTRAYLAYADNSRAQDSAAYAIQELLSIYDCREMETNGPGHQLWRRFPEHVREILEPHLNTRYKSSQKSTDWSGVKKPIYLSKLGSNFAEWSASWAGYLITKVRHDLASKIFTCCSIMMKHDFKVTIYLLPHILVYVLLGCNQEDQQEVYAEIMAVLKHDDQHTINTQDIASDLCQLSTQTVFSMLDHLTQWARHKFQALKAEKCPHSKSNRNKVDSMVSTVDYEDYQSVTRFLDLIPQDTLAVASFRSKAYTRAVMHFESFITEKKQNIQEHLGFLQKLYAAMHEPDGVAGVSAIRKAEPSLKEQILEHESLGLLRDATACYDRAIQLEPDQIIHYHGVVKSMLGLGQLSTVITQVNGVHANRSEWTDELNTYRVEAAWKLSQWDLVENYLAADGKSTTWSVRLGQLLLSAKKRDITAFYDSLKLVRAEQIVPLSAASFERGSYQRGYEYIVRLHMLCELEHSIKPLFQHSPGDSSQEDSLNWVARLEMTQNSYRAKEPILALRRALLSLNKRPDYNEMVGECWLQSARVARKAGHHQTAYNALLNAGESRLAELYVERAKWLWSKGDVHQALIVLQKGVELCFPENETPPEGKNMLIHGRAMLLVGRFMEETANFESNAIMKKYKDVTACLPEWEDGHFYLAKYYDKLMPMVTDNKMEKQGDLIRYIVLHFGRSLQYGNQFIYQSMPRMLTLWLDYGTKAYEWEKAGRSDRVQMRNDLGKINKVITEHTNYLAPYQFLTAFSQLISRICHSHDEVFVVLMEIIAKVFLAYPQQAMWMMTAVSKSSYPMRVNRCKEILNKAIHMKKSLEKFVGDATRLTDKLLELCNKPVDGSSSTLSMSTHFKMLKKLVEEATFSEILIPLQSVMIPTLPSILGTHANHASHEPFPGHWAYIAGFDDMVEILASLQKPKKISLKGSDGKFYIMMCKPKDDLRKDCRLMEFNSLINKCLRKDAESRRRELHIRTYAVIPLNDECGIIEWVNNTAGLRPILTKLYKEKGVYMTGKELRQCMLPKSAALSEKLKVFREFLLPRHPPIFHEWFLRTFPDPTSWYSSRSAYCRSTAVMSMVGYILGLGDRHGENILFDSLTGECVHVDFNCLFNKGETFEVPEIVPFRLTHNMVNGMGPMGTEGLFRRACEVTMRLMRDQREPLMSVLKTFLHDPLVEWSKPVKGHSKAPLNETGEVVNEKAKTHVLDIEQRLQGVIKTRNRVTGLPLSIEGHVHYLIQEATDENLLCQMYLGWTPYM

SEQ ID NO: 1027445 - protein, 2596 aa, Homo sapiens
MGEHGLELASMIPALRELGSATPEEYNTVVQKPRQILCQFIDRILTDVNVVAVELVKKTDSQPTSVMLLDFIQHIMKSSPLMFVNVSGSHERKGSCIEFSNWIITRLLRIAATPSCHLLHKKICEVICSLLFLFKSKSPAIFGVLTKELLQLFEDLVYLHRRNVMGHAVEWPVVMSRFLSQLDEHMGYLQSAPLQLMSMQNLEFIEVTLLMVLTRIIAIVFFRRQELLLWQIGCVLLEYGSPKIKSLAISFLTELFQLGGLPAQPASTFFSSFLELLKHLVEMDTDQLKLYEEPLSKLIKTLFPFEAEAYRNIEPVYLNMLLEKLCVMFEDGVLMRLKSDLLKAALCHLLQYFLKFVPAGYESALQVRKVYVRNICKALLDVLGIEVDAEYLLGPLYAALKMESMEIIEEIQCQTQQENLSSNSDGISPKRRRLSSSLNPSKRAPKQTEEIKHVDMNQKSILWSALKQKAESLQISLEYSGLKNPVIEMLEGIAVVLQLTALCTVHCSHQNMNCRTFKDCQHKSKKKPSVVITWMSLDFYTKVLKSCRSLLESVQKLDLEATIDKVVKIYDALIYMQVNSSFEDHILEDLCGMLSLPWIYSHSDDGCLKLTTFAANLLTLSCRISDSYSPQAQSRCVFLLTLFPRRIFLEWRTAVYNWALQSSHEVIRASCVSGFFILLQQQNSCNRVPKILIDKVKDDSDIVKKEFASILGQLVCTLHGMFYLTSSLTEPFSEHGHVDLFCRNLKATSQHECSSSQLKASVCKPFLFLLKKKIPSPVKLAFIDNLHHLCKHLDFREDETDVKAVLGTLLNLMEDPDKDVRVAFSGNIKHILESLDSEDGFIKELFVLRMKEAYTHAQISRNNELKDTLILTTGDIGRAAKGDLVPFALLHLLHCLLSKSASVSGAAYTEIRALVAAKSVKLQSFFSQYKKPICQFLVESLHSSQMTALPNTPCQNADVRKQDVAHQREMALNTLSEIANVFDFPDLNRFLTRTLQVLLPDLAAKASPAASALIRTLGKQLNVNRREILINNFKYIFSHLVCSCSKDELERALHYLKNETEIELGSLLRQDFQGLHNELLLRIGEHYQQVFNGLSILASFASSDDPYQGPRDIISPELMADYLQPKLLGILAFFNMQLLSSSVGIEDKKMALNSLMSLMKLMGPKHVSSVRVKMMTTLRTGLRFKDDFPELCCRAWDCFVRCLDHACLGSLLSHVIVALLPLIHIQPKETAAIFHYLIIENRDAVQDFLHEIYFLPDHPELKKIKAVLQEYRKETSESTDLQTTLQLSMKAIQHENVDVRIHALTSLKETLYKNQEKLIKYATDSETVEPIISQLVTVLLKGCQDANSQARLLCGECLGELGAIDPGRLDFSTTETQGKDFTFVTGVEDSSFAYGLLMELTRAYLAYADNSRAQDSAAYAIQELLSIYDCREMETNGPGHQLWRRFPEHVREILEPHLNTRYKSSQKSTDWSGVKKPIYLSKLGSNFAEWSASWAGYLITKVRHDLASKIFTCCSIMMKHDFKVTIYLLPHILVYVLLGCNQEDQQEVYAEIMAVLKHDDQHTINTQDIASDLCQLSTQTVFSMLDHLTQWARHKFQALKAEKCPHSKSNRNKVDSMVSTVDYEDYQSVTRFLDLIPQDTLAVASFRSKAYTRAVMHFESFITEKKQNIQEHLGFLQKLYAAMHEPDGVAGVSAIRKAEPSLKEQILEHESLGLLRDATACYDRAIQLEPDQIIHYHGVVKSMLGLGQLSTVITQVNGVHANRSEWTDELNTYRVEAAWKLSQWDLVENYLAADGKSTTWSVRLGQLLLSAKKRDITAFYDSLKLVRAEQIVPLSAASFERGSYQRGYEYIVRLHMLCELEHSIKPLFQHSPGDSSQEDSLNWVARLEMTQNSYRAKEPILALRRALLSLNKRPDYNEMVGECWLQSARVARKAGHHQTAYNALLNAGESRLAELYVERAKWLWSKGDVHQALIVLQKGVELCFPENETPPEGKNMLIHGRAMLLVGRFMEETANFESNAIMKKYKDVTACLPEWEDGHFYLAKYYDKLMPMVTDNKMEKQGDLIRYIVLHFGRSLQYGNQFIYQSMPRMLTLWLDYGTKAYEWEKAGRSDRVQMRNDLGKINKVITEHTNYLAPYQFLTAFSQLISRICHSHDEVFVVLMEIIAKVFLAYPQQAMWMMTAVSKSSYPMRVNRCKEILNKAIHMKKSLEKFVGDATRLTDKLLELCNKPVDGSSSTLSMSTHFKMLKKLVEEATFSEILIPLQSVMIPTLPSILGTHANHASHEPFPGHWAYIAGFDDMVEILASLQKPKKISLKGSDGKFYIMMCKPKDDLRKDCRLMEFNSLINKCLRKDAESRRRELHIRTYAVIPLNDECGIIEWVNNTAGLRPILTKLYKEKGVYMTGKELRQCMLPKSAALSEKLKVFREFLLPRHPPIFHEWFLRTFPDPTSWYSSRSAYCRSTAVMSMVGYILGLGDRHGENILFDSLTGECVHVDFNCLFNKGETFEVPEIVPFRLTHNMVNGMGPMGTEGLFRRACEVTMRLMRDQREPLMSVLKTFLHDPLVEWSKPVKGHSKAPLNETGEVVNEKMASSSNSFK

SEQ ID NO: 1027446 - protein, 932 aa, Homo sapiens
MRTRDEERHYDRAIQLEPDQIIHYHGVVKSMLGLGQLSTVITQVNGVHANRSEWTDELNTYRVEAAWKLSQWDLVENYLAADGKSTTWSVRLGQLLLSAKKRDITAFYDSLKLVRAEQIVPLSAASFERGSYQRGYEYIVRLHMLCELEHSIKPLFQHSPGDSSQEDSLNWVARLEMTQNSYRAKEPILALRRALLSLNKRPDYNEMVGECWLQSARVARKAGHHQTAYNALLNAGESRLAELYVERAKWLWSKGDVHQALIVLQKGVELCFPENETPPEGKNMLIHGRAMLLVGRFMEETANFESNAIMKKYKDVTACLPEWEDGHFYLAKYYDKLMPMVTDNKMEKQGDLIRYIVLHFGRSLQYGNQFIYQSMPRMLTLWLDYGTKAYEWEKAGRSDRVQMRNDLGKINKVITEHTNYLAPYQFLTAFSQLISRICHSHDEVFVVLMEIIAKVFLAYPQQAMWMMTAVSKSSYPMRVNRCKEILNKAIHMKKSLEKFVGDATRLTDKLLELCNKPVDGSSSTLSMSTHFKMLKKLVEEATFSEILIPLQSVMIPTLPSILGTHANHASHEPFPGHWAYIAGFDDMVEILASLQKPKKISLKGSDGKFYIMMCKPKDDLRKDCRLMEFNSLINKCLRKDAESRRRELHIRTYAVIPLNDECGIIEWVNNTAGLRPILTKLYKEKGVYMTGKELRQCMLPKSAALSEKLKVFREFLLPRHPPIFHEWFLRTFPDPTSWYSSRSAYCRSTAVMSMVGYILGLGDRHGENILFDSLTGECVHVDFNCLFNKGETFEVPEIVPFRLTHNMVNGMGPMGTEGLFRRACEVTMRLMRDQREPLMSVLKTFLHDPLVEWSKPVKGHSKAPLNETGEVVNEKAKTHVLDIEQRLQGVIKTRNRVTGLPLSIEGHVHYLIQEATDENLLCQMYLGWTPYM

SEQ ID NO: 1027447 - protein, 2644 aa, Homo sapiens; identical to SEQ ID NO: 1027444

SEQ ID NO: 1027448 - protein, 2644 aa, Homo sapiens
MGEHGLELASMIPALRELGSATPEEYNTVVQKPRQILCQFIDRILTDVNVVAVELVKKTDSQPTSVMLLDFIQHIMKSSPLMFVNVSGSHERKGSCIEFSNWIITRLLRIAATPSCHLLHKKICEVICSLLFLFKSKSPAIFGVLTKELLQLFEDLVYLHRRNVMGHAVEWPVVMSRFLSQLDEHMGYLQSAPLQLMSMQNLEFIEVTLLMVLTRIIAIVFFRRQELLLWQIGCVLLEYGSPKIKSLAISFLTELFQLGGLPAQPASTFFSSFLELLKHLVEMDTDQLKLYEEPLSKLIKTLFPFEAEAYRNIEPVYLNMLLEKLCVMFEDGVLMRLKSDLLKAALCHLLQYFLKFVPAGYESALQVRKVYVRNICKALLDVLGIEVDAEYLLGPLYAALKMESMEIIEEIQCQTQQENLSSNSDGISPKRRRLSSSLNPSKRAPKQTEEIKHVDMNQKSILWSALKQKAESLQISLEYSGLKNPVIEMLEGIAVVLQLTALCTVHCSHQNMNCRTFKDCQHKSKKKPSVVITWMSLDFYTKVLKSCRSLLESVQKLDLEATIDKVVKIYDALIYMQVNSSFEDHILEDLCGMLSLPWIYSHSDDGCLKLTTFAANLLTLSCRISDSYSPQAQSRCVFLLTLFPRRIFLEWRTAVYNWALQSSHEVIRASCVSGFFILLQQQNSCNRVPKILIDKVKDDSDIVKKEFASILGQLVCTLHGMFYLTSSLTEPFSEHGHVDLFCRNLKATSQHECSSSQLKASVCKPFLFLLKKKIPSPVKLAFIDNLHHLCKHLDFREDETDVKAVLGTLLNLMEDPDKDVRVAFSGNIKHILESLDSEDGFIKELFVLRMKEAYTHAQISRNNELKDTLILTTGDIGRAAKGDLVPFALLHLLHCLLSKSASVSGAAYTEIRALVAAKSVKLQSFFSQYKKPICQFLVESLHSSQMTALPNTPCQNADVRKQDVAHQREMALNTLSEIANVFDFPDLNRFLTRTLQVLLPDLAAKASPAASALIRTLGKQLNVNRREILINNFKYIFSHLVCSCSKDELERALHYLKNETEIELGSLLRQDFQGLHNELLLRIGEHYQQVFNGLSILASFASSDDPYQGPRDIISPELMADYLQPKLLGILAFFNMQLLSSSVGIEDKKMALNSLMSLMKLMGPKHVSSVRVKMMTTLRTGLRFKDDFPELCCRAWDCFVRCLDHACLGSLLSHVIVALLPLIHIQPKETAAIFHYLIIENRDAVQDFLHEIYFLPDHPELKKIKAVLQEYRKETSESTDLQTTLQLSMKAIQHENVDVRIHALTSLKETLYKNQEKLIKYATDSETVEPIISQLVTVLLKGCQDANSQARLLCGECLGELGAIDPGRLDFSTTETQGKDFTFVTGVEDSSFAYGLLMELTRAYLAYADNSRAQDSAAYAIQELLSIYDCREMETNGPGHQLWRRFPEHVREILEPHLNTRYKSSQKSTDWSGVKKPIYLSKLGSNFAEWSASWAGYLITKVRHDLASKIFTCCSIMMKHDFKVTIYLLPHILVYVLLGCNQEDQQEVYAEIMAVLKHDDQHTINTQDIASDLCQLSTQTVFSMLDHLTQWARHKFQALKAEKCPHSKSNRNKVDSMVSTVDYEDYQSVTRFLDLIPQDTLAVASFRSKAYTRAVMHFESFITEKKQNIQEHLGFLQKLYAAMHEPDGVAGVSAIRKAEPSLKEQILEHESLGLLRDATACYDRAIQLEPDQIIHYHGVVKSMLGLGQLSTVITQVNGVHANRSEWTDELNTYRVEAAWKLSQWDLVENYLAADGKSTTWSVRLGQLLLSAKKRDITAFYDSLKLVRAEQIVPLSAASFERGSYQRGYEYIVRLHMLCELEHSIKPLFQHSPGDSSQEDSLNWVARLEMTQNSYRAKEPILALRRALLSLNKRPDYNEMVGECWLQSARVARKAGHHQTAYNALLNAGESRLAELYVERAKWLWSKGDVHQALIVLQKGVELCFPENETPPEGKNMLIHGRAMLLVGRFMEETANFESNAIMKKYKDVTACLPEWEDGHFYLAKYYDKLMPMVTDNKMEKQGDLIRYIVLHFGRSLQYGNQFIYQSMPRMLTLWLDYGTKAYEWEKAGRSDRVQMRNDLGKINKVITEHTNYLAPYQFLTAFSQLISRICHSHDEVFVVLMEIIAKVFLAYPQQAMWMMTAVSKSSYPMRVNRCKEILNKAIHMKKSLEKFVGDATRLTDKLLELCNKPVDGSSSTLSMSTHFKMLKKLVEEATFSEILIPLQSVMIPTLPSILGTHANHASHEPFPGHWAYIAGFDDMVEILASLQKPKKISLKGSDGKFYIMMCKPKDDLRKDCRLMEFNSLINKCLRKDAESRRRELHIRTYAVIPLNDECGIIEWVNNTAGLRPILTKLYKEKGVYMTGKELRQCMLPKSAALSEKLKVFREFLLPRHPPIFHEWFLRTFPDPTSWYSSRSAYCRSTAVMSMVGYILGLGDRHGENILFDSLTGECVHVDFNCLFNKGETFEVPEIVPFRLTHNMVNGMGPMGTEGLFRRACEVTMRLMRDQREPLMSVLKTFLHDPLVEWSKPVKGHSKAPLNETGEVVNEKAKTHVLDIEQRLQGVIKTRNRVTGLPLSIEGHVHYLIQEATDENLLCQMYLGWTPYM

SEQ ID NO: 1027449 - protein, 593 aa, Homo sapiens [sequence omitted]

SEQ ID NO: 1027450 - protein, 1678 aa, Homo sapiens
MGEHGLELASMIPALRELGSATPEEYNTVVQKPRQILCQFIDRILTDVNVVAVELVKKTDSQPTSVMLLDFIQHIMKSSPLMFVNVSGSHERKGSCIEFSNWIITRLLRIAATPSCHLLHKKICEVICSLLFLFKSKSPAIFGVLTKELLQLFEDLVYLHRRNVMGHAVEWPVVMSRFLSQLDEHMGYLQSAPLQLMSMQNLEFIEVTLLMVLTRIIAIVFFRRQELLLWQIGCVLLEYGSPKIKSLAISFLTELFQLGGLPAQPASTFFSSFLELLKHLVEMDTDQLKLYEEPLSKLIKTLFPFEAEAYRNIEPVYLNMLLEKLCVMFEDGVLMRLKSDLLKAALCHLLQYFLKFVPAGYESALQVRKVYVRNICKALLDVLGIEVDAEYLLGPLYAALKMESMEIIEEIQCQTQQENLSSNSDGISPKRRRLSSSLNPSKRAPKQTEEIKHVDMNQKSILWSALKQKAESLQISLEYSGLKNPVIEMLEGIAVVLQLTALCTVHCSHQNMNCRTFKDCQHKSKKKPSVVITWMSLDFYTKVLKSCRSLLESVQKLDLEATIDKVVKIYDALIYMQVNSSFEDHILEDLCGMLSLPWIYSHSDDGCLKLTTFAANLLTLSCRISDSYSPQAQSRCVFLLTLFPRRIFLEWRTAVYNWALQSSHEVIRASCVSGFFILLQQQNSCNRVPKILIDKVKDDSDIVKKEFASILGQLVCTLHGMFYLTSSLTEPFSEHGHVDLFCRNLKATSQHECSSSQLKASVCKPFLFLLKKKIPSPVKLAFIDNLHHLCKHLDFREDETDVKAVLGTLLNLMEDPDKDVRVAFSGNIKHILESLDSEDGFIKELFVLRMKEAYTHAQISRNNELKDTLILTTGDIGRAAKGDLVPFALLHLLHCLLSKSASVSGAAYTEIRALVAAKSVKLQSFFSQYKKPICQFLVESLHSSQMTALPNTPCQNADVRKQDVAHQREMALNTLSEIANVFDFPDLNRFLTRTLQVLLPDLAAKASPAASALIRTLGKQLNVNRREILINNFKYIFSHLVCSCSKDELERALHYLKNETEIELGSLLRQDFQGLHNELLLRIGEHYQQVFNGLSILASFASSDDPYQGPRDIISPELMADYLQPKLLGILAFFNMQLLSSSVGIEDKKMALNSLMSLMKLMGPKHVSSVRVKMMTTLRTGLRFKDDFPELCCRAWDCFVRCLDHACLGSLLSHVIVALLPLIHIQPKETAAIFHYLIIENRDAVQDFLHEIYFLPDHPELKKIKAVLQEYRKETSESTDLQTTLQLSMKAIQHENVDVRIHALTSLKETLYKNQEKLIKYATDSETVEPIISQLVTVLLKGCQDANSQARLLCGECLGELGAIDPGRLDFSTTETQGKDFTFVTGVEDSSFAYGLLMELTRAYLAYADNSRAQDSAAYAIQELLSIYDCREMETNGPGHQLWRRFPEHVREILEPHLNTRYKSSQKSTDWSGVKKPIYLSKLGSNFAEWSASWAGYLITKVRHDLASKIFTCCSIMMKHDFKVTIYLLPHILVYVLLGCNQEDQQEVYAEIMAVLKHDDQHTINTQDIASDLCQLSTQTVFSMLDHLTQWARHKFQALKAEKCPHSKSNRNKVDSMVSTVDYEDYQSVTRFLDLIPQDTLAVASFRSKAYTRAVMHFESFITEKKQNIQEHLGFLQV

SEQ ID NO: 1027451 - protein, 2626 aa, Homo sapiens
MGEHGLELASMIPALRELGSATPEEYNTVVQKPRQILCQFIDRILTDVNVVAVELVKKTDSQPTSVMLLDFIQHIMKSSPLMFVNVSGSHERKGSCIEFSNWIITRLLRIAATPSCHLLHKKICEVICSLLFLFKSKSPAIFGVLTKELLQLFEDLVYLHRRNVMGHAVEWPVVMSRFLSQLDEHMGYLQSAPLQLMSMQNLEFIEVTLLMVLTRIIAIVFFRRQELLLWQIGCVLLEYGSPKIKSLAISFLTELFQLGGLPAQPASTFFSSFLELLKHLVEMDTDQLKLYEEPLSKLIKTLFPFEAEAYRNIEPVYLNMLLEKLCVMFEDGVLMRLKSDLLKAALCHLLQYFLKFVPAGYESALQVRKVYVRNICKALLDVLGIEVDAEYLLGPLYAALKMESMEIIEEIQCQTQQENLSSNSDGISPKRRRLSSSLNPSKRAPKQTEEIKHVDMNQKSILWSALKQKAESLQISLEYSGLKNPVIEMLEGIAVVLQLTALCTVHCSHQNMNCRTFKDCQHKSKKKPSVVITWMSLDFYTKVLKSCRSLLESVQKLDLEATIDKVVKIYDALIYMQVNSSFEDHILEDLCGMLSLPWIYSHSDDGCLKLTTFAANLLTLSCRISDSYSPQAQSRCVFLLTLFPRRIFLEWRTAVYNWALQSSHEVIRASCVSGFFILLQQQNSCNRVPKILIDKVKDDSDIVKKEFASILGQLVCTLHGMFYLTSSLTEPFSEHGHVDLFCRNLKATSQHECSSSQLKASVCKPFLFLLKKKIPSPVKLAFIDNLHHLCKHLDFREDETDVKAVLGTLLNLMEDPDKDVRVAFSGNIKHILESLDSEDGFIKELFVLRMKEAYTHAQISRNNELKDTLILTTGDIGRAAKGDLVPFALLHLLHCLLSKSASVSGAAYTEIRALVAAKSVKLQSFFSQYKKPICQFLVESLHSSQMTALPNTPCQNADVRKQDVAHQREMALNTLSEIANVFDFPDLNRFLTRTLQVLLPDLAAKASPAASALIRTLGKQLNVNRREILINNFKYIFSHLVCSCSKDELERALHYLKNETEIELGSLLRQDFQGLHNELLLRIGEHYQQVFNGLSILASFASSDDPYQGPRDIISPELMADYLQPKLLGILAFFNMQLLSSSVGIEDKKMALNSLMSLMKLMGPKHVSSVRVKMMTTLRTGLRFKDDFPELCCRAWDCFVRCLDHACLGSLLSHVIVALLPLIHIQPKETAAIFHYLIIENRDAVQDFLHEIYFLPDHPELKKIKAVLQEYRKETSESTDLQTTLQLSMKAIQHENVDVRIHALTSLKETLYKNQEKLIKYATDSETVEPIISQLVTVLLKGCQDANSQARLLCGECLGELGAIDPGRLDFSTTETQGKDFTFVTGVEDSSFAYGLLMELTRAYLAYADNSRAQDSAAYAIQELLSIYDCREMETNGPGHQLWRRFPEHVREILEPHLNTRYKSSQKSTDWSGVKKPIYLSKLGSNFAEWSASWAGYLITKVRHDLASKIFTCCSIMMKHDFKVTIYLLPHILVYVLLGCNQEDQQEVYAEIMAVLKHDDQHTINTQDIASDLCQLSTQTVFSMLDHLTQWARHKFQALKAEKCPHSKSNRNKVDSMVSTVDYEDYQSVTRFLDLIPQDTLAVASFRSKAYTRAVMHFESFITEKKQNIQEHLGFLQKLYAAMHEPDGVAGVSAIRKAEPSLKEQILEHESLGLLRDATACYDRAIQLEPDQIIHYHGVVKSMLGLGQLSTVITQVNGVHANRSEWTDELNTYRVEAAWKLSQWDLVENYLAADGKSTTWSVRLGQLLLSAKKRDITAFYDSLKLVRAEQIVPLSAASFERGSYQRGYEYIVRLHMLCELEHSIKPLFQHSPGDSSQEDSLNWVARLEMTQNSYRAKEPILALRRALLSLNKRPDYNEMVGECWLQSARVARKAGHHQTAYNALLNAGESRLAELYVERAKWLWSKGDVHQALIVLQKGVELCFPENETPPEGKNMLIHGRAMLLVGRFMEETANFESNAIMKKYKDVTACLPEWEDGHFYLAKYYDKLMPMVTDNKMEKQGDLIRYIVLHFGRSLQYGNQFIYQSMPRMLTLWLDYGTKAYEWEKAGRSDRVQMRNDLGKINKVITEHTNYLAPYQFLTAFSQLISRICHSHDEVFVVLMEIIAKVFLAYPQQAMWMMTAVSKSSYPMRVNRCKEILNKAIHMKKSLEKFVGDATRLTDKLLELCNKPVDGSSSTLSMSTHFKMLKKLVEEATFSEILIPLQSVMIPTLPSILGTHANHASHEPFPGHWAYIAGFDDMVEILASLQKPKKISLKGSDGKFYIMMCKPKDDLRKDCRLMEFNSLINKCLRKDAESRRRELHIRTYAVIPLNDECGIIEWVNNTAGLRPILTKLYKEKGVYMTGKELRQCMLPKSAALSEKLKVFREFLLPRHPPIFHEWFLRTFPDPTSWYSSRSAYCRSTAVMSMVGYILGLGDRHGGLFNKGETFEVPEIVPFRLTHNMVNGMGPMGTEGLFRRACEVTMRLMRDQREPLMSVLKTFLHDPLVEWSKPVKGHSKAPLNETGEVVNEKAKTHVLDIEQRLQGVIKTRNRVTGLPLSIEGHVHYLIQEATDENLLCQMYLGWTPYM

SEQ ID NO: 1027452 - protein, 2596 aa, Homo sapiens; identical to SEQ ID NO: 1027445

SEQ ID NO: 1027453 - protein, 2596 aa, Homo sapiens; identical to SEQ ID NO: 1027445

SEQ ID NO: 1027454 - protein, 2644 aa, Homo sapiens; identical to SEQ ID NO: 1027444

SEQ ID NO: 1027455 - protein, 247 aa, Homo sapiens
  misc_feature (9)..(9): Xaa can be any naturally occurring amino acid
WTQKLARGXTETAIERFSDLSSGTTIMTHGHFAQEPTDWTTSNTEMCEVGQVCQETLLLLDVELTSTLVGTKGCSTVGAQNSQKTTIHSAPPGVLVASYTHFCSITAVAANASSSSVLLNSLPPQAAPVPGDRQCPTCVQPLGTCSSGSPRMTCPRGATHCYDGYIHLSGGGLSTKMSIQGCVAQPSSFLLNHTRQIGIFSAREKRDVQPPASQHEGGGAEGLESLTWGVGLALAPALWWGVVCPSC

SEQ ID NO: 1027456 - protein, 247 aa, Homo sapiens; identical to SEQ ID NO: 1027455
  misc_feature (9)..(9): Xaa can be any naturally occurring amino acid

SEQ ID NO: 1027457 - protein, 149 aa, Homo sapiens [sequence omitted]

SEQ ID NO: 1027458 - protein, 214 aa, Homo sapiens
MVLGGCPVSYLLLCGQAALLLGNLLLLHCVSRSHSQNATAEPELTSAGAAQPEGPGGAASWEYGDPHSPVILCSYLPDEFIECEDPVDHVGNATASQELGYGCLKFGGQAYSDVEHTSVQCHALDGIECASPRTFLRENKPCIKYTGHYFITTLLYSFFLGCFGVDRFCLGHTGTAVGKLLTLGGLGIWWFVDLILLITGGLMPSDGSNWCTVY

SEQ ID NO: 1027459 - protein, 214 aa, Homo sapiens; identical to SEQ ID NO: 1027458

SEQ ID NO: 1027460 - protein, 159 aa, Homo sapiens [sequence omitted]

SEQ ID NO: 1027461 - protein, 193 aa, Homo sapiens
MVLGGCPVSYLLLCGQAALLLGNLLLLHCVSRSHSQNATAEPELTSAGVILCSYLPDEFIECEDPVDHVGNATASQELGYGCLKFGGQAYSDVEHTSVQCHALDGIECASPRTFLRENKPCIKYTGHYFITTLLYSFFLGCFGVDRFCLGHTGTAVGKLLTLGGLGIWWFVDLILLITGGLMPSDGSNWCTVY

SEQ ID NO: 1027462 - protein, 103 aa, Homo sapiens
MVLGGCPVSYLLLCGQAALLLGNLLLLHCVSRSHSQNATAEPELTSAGAAQPEGPGGAASWEYGDPHSPVILCSYLELPVVEAVTWRVSRIYGFKGGRLGHAA

SEQ ID NO: 1027463 - protein, 159 aa, Homo sapiens [sequence omitted]

SEQ ID NO: 1027464 - protein, 159 aa, Homo sapiens [sequence omitted]

SEQ ID NO: 1027465 - protein, 214 aa, Homo sapiens; identical to SEQ ID NO: 1027458

SEQ ID NO: 1027466 - protein, 214 aa, Homo sapiens; identical to SEQ ID NO: 1027458

SEQ ID NO: 1027467 - protein, 214 aa, Homo sapiens; identical to SEQ ID NO: 1027458

SEQ ID NO: 1027468 - protein, 159 aa, Homo sapiens
VLEDPRRLSSSPGDGRPGREQRLRLRWLPGGQFQAQALRNASNPGYLVTVSAGFRESPIGVWGFGNTFQNTFPFFHKAKRSGRPFFERNSILRVCLENTLLGVHVGSGHSGQEAVALRPAATRRRQTQAMTWFIMRGARVDSVLGSRWRQNCRGFLPVP

SEQ ID NO: 1027469 - protein, 254 aa, Homo sapiens
ISSCTTRKMAEQEQRKIPLVPENLLKKRKAYQALKATQAKQALLAKKEQKKGKGLRFKRLESFLHDSWRQKRDKVRLRRLEVKPHALELPDKHSLAFVVRIERIDGVSLLVQRTIARLRLKKIFSGVFVKVTPQNLKMLRIVEPYVTWGFPNLKSVRELILKRGQAKVKNKTIPLTDNTVIEEHLGKFGVICLEDLIHEIAFPGKHFQEISWFLCPFHLSVARHATKNRVGFLKEMGTPGYRGERINQLIRQLN

SEQ ID NO: 1027470 - protein, 105 aa, Homo sapiens
ISSCTTRKMAEQEQRKIPLVPENLLKKRKAYQALKATQAKQALLAKKEQKKGKGLRFKRLESFLHDSWRQKRDKVRLRRLEVKPHALELPDKHSLAFVVRIEDYA

SEQ ID NO: 1027471 - protein, 300 aa, Homo sapiens
MCPQPEEGSTDRPPRGTLHSSAGHFTCFLLAVVRLDTDSTDRHIEFQKHEGMSERERQVMKKLKEVVDKQRDEIRAKDRKLGLKNEDVEALQQQQTRLMKINHDLRHRVTVVEAQGKALIEQKVELEADLQTKEQEMGSLRAELGKLRERLQGEHSQNGEEEPETEPVGEESISDAEKVAMDLKDPNRPRFTLQELRDVLHERNELKSKVFLLQEELAYYKSEEMEEENRIPQPPPIAHPRTSPQPESGIKRLFSFFSRDKKRLANTQRNVHIQESFGQWANTHRDDGYTEQGQEALQHL

SEQ ID NO: 1027472 - protein, 91 aa, Homo sapiens
  misc_feature (5)..(5): Xaa can be any naturally occurring amino acid
  misc_feature (7)..(7): Xaa can be any naturally occurring amino acid
  misc_feature (11)..(11): Xaa can be any naturally occurring amino acid
  misc_feature (13)..(13): Xaa can be any naturally occurring amino acid
  misc_feature (16)..(16): Xaa can be any naturally occurring amino acid
  misc_feature (24)..(24): Xaa can be any naturally occurring amino acid
  misc_feature (39)..(40): Xaa can be any naturally occurring amino acid
  misc_feature (44)..(44): Xaa can be any naturally occurring amino acid
  misc_feature (46)..(46): Xaa can be any naturally occurring amino acid
  misc_feature (72)..(72): Xaa can be any naturally occurring amino acid
  misc_feature (85)..(85): Xaa can be any naturally occurring amino acid
MSVHXSXGTFXNXWQXLTPQILKXTGLDSRFIMSIDGSXXLARXSXTGSTVPPIKINSFVMISTISQNLSWXGAGMDAKEGSVLXAVVVGG

SEQ ID NO: 1027473 - protein, 297 aa, Homo sapiens
LGARHWNPPAQACQAPQQQRGQKTKQFMPTLSQRDVNFSEEEFQKHKGMSERERQVMKKLKEVVDKQRDEIRAKDRKLGLKNEDVEALQQQQTRLMKINHDLRHRVTVVEAQGKALIEQKVELEADLQTKEQEMGSLRAELGKLRERLQGEHSQNGEEEPETEPVGEESISDAEKVAMDLKDPNRPRFTLQELRDVLHERNELKSKVFLLQEELAYYKSEEMEEENRIPQPPPIAHPRTSPQPESGIKRLFSFFSRDKKRLANTQRNVHIQESFGQWANTHRDDGYTEQGQEALQHL

SEQ ID NO: 1027474 - protein, 300 aa, Homo sapiens; identical to SEQ ID NO: 1027471

SEQ ID NO: 1027475 - protein, 67 aa, Homo sapiens
AESAADHMLRTVYRADIFGLSEECRHWCHRDLVWILYTRYVIMKRVNLHPIKTNHNNLKTNDNHTQH

SEQ ID NO: 1027476 - protein, 67 aa, Homo sapiens; identical to SEQ ID NO: 1027475

SEQ ID NO: 1027477 - protein, 293 aa, Homo sapiens
MTTVSTTHLHTLQHSPLNTNTPTHNTHNTHNTTTAQTPKRGETASPYRLSHHQRAQQSNKKKPREDIQTTKKRRATTQPPTHNTKSTQQHRARPDTIPPATLPAHTRDRHTRNHHRQHPHTRRDRKTQNTQRDEEHNHKVRQPPHPQKTPNATEGEPEPFPPPYQARDTRDNQTDRAHHTPTRKPPRNNHPTTLHHKRNGVNHAPPPAPRPTKPLRSPDTNAAARPPQPPRRRREQANTGRRRQPKHQESKTRSTTSDSKSTRTGDEAEEQLTGSERQPGQKPAHHRNQNHTG

SEQ ID NO: 1027478 - protein, 67 aa, Homo sapiens; identical to SEQ ID NO: 1027475

SEQ ID NO: 1027479 - protein, 67 aa, Homo sapiens; identical to SEQ ID NO: 1027475

SEQ ID NO: 1027480 - protein, 67 aa, Homo sapiens; identical to SEQ ID NO: 1027475

SEQ ID NO: 1027481 - protein, 67 aa, Homo sapiens; identical to SEQ ID NO: 1027475

SEQ ID NO: 1027482 - protein, 67 aa, Homo sapiens; identical to SEQ ID NO: 1027475

SEQ ID NO: 1027483 - protein, 165 aa, Homo sapiens
MALEKSLVRLLLLVLILLVLGWVQPSLGKESRAKKFQRQHMDSDSSPSSSSTYCNQMMRRRNMTQGRCKPVTTFVHKPWENVQMVCFQKRVTGRTGQGTVFRTTSGCAYQNVPCENGSRSPTVCIRHQPKGNTFMWAVKGTGTRFGDPALNLEIVRIACSVGKCD

SEQ ID NO: 1027484 - protein, 93 aa, Homo sapiens
MALEKSLVRLLLLVLILLVLGWVQPSLGKESRAKKFQRQHMDSDSSPSSSSTYCNQMMRRRNMTQGRCKSSGHHSVHERVSRGPEEGTVRDVI

SEQ ID NO: 1027485 - protein, 100 aa, Homo sapiens
MALEKSLVRLLLLVLILLVLGWVQPSLGKESRAKKFQRQHMDSDSSPSSSSTYCNQMMRRRNMTQGRCKTLNSFVHETLVDVPNVCFQGKVFGKIGQGHR

SEQ ID NO: 1027486 - protein, 106 aa, Homo sapiens
MALEKSLVRLLLLVLILLVLGWVQPSLGKESRAKKFQRQHMDSDSSPSSSSTYCNQMMRRRNMTQGRCNQWTPCARALVDVRCLFRKVTARRQALYKRLSMNHRMP

SEQ ID NO: 1027487 - protein, 203 aa, Homo sapiens
  misc_feature (12)..(12): Xaa can be any naturally occurring amino acid
  misc_feature (22)..(22): Xaa can be any naturally occurring amino acid
  misc_feature (53)..(54): Xaa can be any naturally occurring amino acid
  misc_feature (70)..(70): Xaa can be any naturally occurring amino acid
  misc_feature (81)..(81): Xaa can be any naturally occurring amino acid
  misc_feature (84)..(84): Xaa can be any naturally occurring amino acid
  misc_feature (86)..(86): Xaa can be any naturally occurring amino acid
  misc_feature (110)..(110): Xaa can be any naturally occurring amino acid
TEQGVVLEGSVXSDFVFLEALXNQGVIRKQCVDHYNEVKSVTVCDYLPPPPGXXIDVPVPEVQRRIQKKXDPHEMKITSAXLQXIXNAYKKTFLPKMSEKCEVLQYSARXAQYSKKVVEDIEYLKFDKGPWLKQDNRTLYHLRLLVQDKFEVLNNTSIPIFLPEVTIGAHQTDRVLHQFRELPGRKYSPGYNTEVGDKWIWLK

SEQ ID NO: 1027488 - protein, 203 aa, Homo sapiens; identical to SEQ ID NO: 1027487
  misc_feature (12)..(12): Xaa can be any naturally occurring amino acid
  misc_feature (22)..(22): Xaa can be any naturally occurring amino acid
  misc_feature (53)..(54): Xaa can be any naturally occurring amino acid
  misc_feature (70)..(70): Xaa can be any naturally occurring amino acid
  misc_feature (81)..(81): Xaa can be any naturally occurring amino acid
  misc_feature (84)..(84): Xaa can be any naturally occurring amino acid
  misc_feature (86)..(86): Xaa can be any naturally occurring amino acid
  misc_feature (110)..(110): Xaa can be any naturally occurring amino acid

SEQ ID NO: 1027489 - protein, 203 aa, Homo sapiens; identical to SEQ ID NO: 1027487
  misc_feature (12)..(12): Xaa can be any naturally occurring amino acid
  misc_feature (22)..(22): Xaa can be any naturally occurring amino acid
  misc_feature (53)..(54): Xaa can be any naturally occurring amino acid
  misc_feature (70)..(70): Xaa can be any naturally occurring amino acid
  misc_feature (81)..(81): Xaa can be any naturally occurring amino acid
  misc_feature (84)..(84): Xaa can be any naturally occurring amino acid
  misc_feature (86)..(86): Xaa can be any naturally occurring amino acid
  misc_feature (110)..(110): Xaa can be any naturally occurring amino acid

SEQ ID NO: 1027490 - protein, 203 aa, Homo sapiens; identical to SEQ ID NO: 1027487
  misc_feature (12)..(12): Xaa can be any naturally occurring amino acid
  misc_feature (22)..(22): Xaa can be any naturally occurring amino acid
  misc_feature (53)..(54): Xaa can be any naturally occurring amino acid
  misc_feature (70)..(70): Xaa can be any naturally occurring amino acid
  misc_feature (81)..(81): Xaa can be any naturally occurring amino acid
  misc_feature (84)..(84): Xaa can be any naturally occurring amino acid
  misc_feature (86)..(86): Xaa can be any naturally occurring amino acid
  misc_feature (110)..(110): Xaa can be any naturally occurring amino acid

SEQ ID NO: 1027491 - protein, 203 aa, Homo sapiens; identical to SEQ ID NO: 1027487
  misc_feature (12)..(12): Xaa can be any naturally occurring amino acid
  misc_feature (22)..(22): Xaa can be any naturally occurring amino acid
  misc_feature (53)..(54): Xaa can be any naturally occurring amino acid
  misc_feature (70)..(70): Xaa can be any naturally occurring amino acid
  misc_feature (81)..(81): Xaa can be any naturally occurring amino acid
  misc_feature (84)..(84): Xaa can be any naturally occurring amino acid
  misc_feature (86)..(86): Xaa can be any naturally occurring amino acid
  misc_feature (110)..(110): Xaa can be any naturally occurring amino acid

SEQ ID NO: 1027492 - protein, 203 aa, Homo sapiens; identical to SEQ ID NO: 1027487
  misc_feature (12)..(12): Xaa can be any naturally occurring amino acid
  misc_feature (22)..(22): Xaa can be any naturally occurring amino acid
  misc_feature (53)..(54): Xaa can be any naturally occurring amino acid
  misc_feature (70)..(70): Xaa can be any naturally occurring amino acid
  misc_feature (81)..(81): Xaa can be any naturally occurring amino acid
  misc_feature (84)..(84): Xaa can be any naturally occurring amino acid
  misc_feature (86)..(86): Xaa can be any naturally occurring amino acid
  misc_feature (110)..(110): Xaa can be any naturally occurring amino acid

SEQ ID NO: 1027493 - protein, 2611 aa, Homo sapiens
MKWHLLIQEQRGEAELLKTARHPPCLHSNPGAGATFFAFIYPQIRGDRQEVLMAVPAIIANPFASLCIDLNSDFVNFQGVGNIIEFSEWAWLILCKLKVMGHKNSKSGTSFKKESTLRASIGWELFSMPRLAALRTAGTACCYKKEIDSAALGALTDYDCWEIPRTLNARANLSMCSETSGGSVILWLCVVLIMVQCGHEMKTPKWAYRYDMFEMFVFNKNILTLFGNGNRKIAKWILTLRKDEQVTCSKAGGCELPLSEGIPSSTFSLLVRTTRRHPPGPPALHCLSSLLNNSSLSSNMYKKKSLLYKFANKEIFFKSPQYILPVTIVMGTFAFGRFLLYAWDKYIFKQKWDYAIKFYFVTLIYSEQPFLMMTGCSLAWLYQFKQSCFNGHYRVFSSFFFLLENNTCDDFPCSSDFFNVCCYLFGNAEYIHFEKEMTVKLLRLQVHIAKLPSREEIFSISVLTGEANLMPSPLPQNRLYHIENLCSSDGIESAFPVDVSIALSAGDWTSLPCVNWPFVVCVCVRVCVCVCVYDFLIPSHFSIDCFAKAIYILRILIIFCYICCKYFFPVYRLPFNFVFQVDKSKTIFLGEFITVVSELVMCRSFPPQEYININPYFLMELVWFRFLHLNLLPRGVCCGICVCVRRGMVLQNPPPVAREPCPVRVVITVAGFNSEDLEGRLMFPEWAPGCCLSLTLHFPILSGFGPNRALELVRILTGLLGNFMSGSKLLNLPKPVSVKMRVNECEMFGSSYSLLSSHSELSCLCPPSPPPLVPSVRSSHFLLGPSPFSVAGCLPAWRWTFHVTGISMYILVWSVSTLNFVSSSISLYRQSSQTHLKRLFLRILNLPKGSPMDGFLEVYKCSEIVFFCGKHNFHLLVRAQKRSGMNDCMILCHCAYTKGYVAHLLSCETVLTTLNRAAVSISVNLVYTCIPWSGINSAVSTYGFITLFTDSNDSRKLHFLLGVYDDPFPYIATNIRFLQFYLFLATLRNFCGEIHIIEVDYAESFLSIHSVVLSMSPLLYNQSPELFHLAKQTLYPLNNIKHSIPSSLSNPISTFCFCEFDYSKHFISVKIMKYLSVCDWLISLSTVSSRCVYVVAYVRISFLFKRSKEYSYFISFFYPFIHEWTLGLLLAIVNNGAMYKYLYYCIYKYNAVMYTHLFEILTFSSFEYIARSGITKSYDISIFNLLRNHCEFFIATAPFYVLTKSAQGFRGSHILPNTCYFLLFLDCSHHSGCEVTFHCGFDLHFPNEEDAEHLFICLLVICMLSLEKCLFKSFDYFKNWVIRVIVVVDLEEFLSIFWILIPYQIYDLQISSLIPQGYFFTLLIVFFDDIEVFSFEIVYIYLFLLLWSVLLVSYPRNPCQIQRYKVLLRYFSCLQSIFLYSPFFIHSSVDGHVGWFHIFAILNCAVIRCLFSIMIYSPLRRYPVVEIAGSNGFYNFLFYHSFSLHFSSLTTNHVKFYIDLYNDHELLVSLGRPHLPLMIVNLILHFSCYCWCKKHLLYQDFKNQSDKSLISLIIITDKSIEFASDYFFFSSYTCMYSYDYNEHSSPFKLIIYIDEISKMLMTKYCLGFFVPGQSILTSYNFLFFLYVCVCVYFFFFNFNGFGVQMAFGHIDEFYSSEVCRFYCTGHLSSVHCTQYVVFYTLPPSYPPHFESLVSIMSLCIPFCTHKLALTYKGEHTVFGFPFLSCFTENNILQLHPKLLQKKKKPQTLFCSFLLLSHIPWCRDTTFYLSTHWLMGWFHIFAIVTCTAIKCLSGIMTSFPLGRYPGVGLLDQMVLNIFSLDLFLEILAPVFVVVVNKMQWNVMIITFHYALKSGKWRLEHSCKARIFSLLELKYTELGKSQSYIFDSGHNMALFYLLSLIVFNNVVSISESPIQYKNKDNTDSNSYGYNEHSSPLKLIIYTDEIEIENFNELNTVFDFLFQVCQYELLIIFFFFLYVCVCVYIYIYLISMAFGVQMAFGHIYEFYSSEDLRFYYTFHLCGPTPPASPAASCHPLGQGNNHPESWVYLSLAFFSYNFAKESDLNVFFRVYIYILAVLRENLLFCMSSYGTFSFNTMVRFSPCPGDSSFSLFTGYSSSCDYTSVSLSVLPSMVTRLPLSLSTTLFLSVLVEDDMWVFSPYTELKGDDNNVGTTNPPPSRGVTSVYQFAVFPATPRLIHFHLYLKNVLHGFFSIEVVKCYCVLYIIDYFFSFNSREMPGSTQRTALIVFNFCLYVCEFSHSAVNGNLQYSESFDITNSSVRSSSYTTPCAQCMSVSQGRYQEVKFLGHQGVSPTFFSILPCCPPEWVSSFAYLSMRVSVVHILYDAPYMKLKFLLVAIFDLSCMQGPTKTVIGTVDSCHLCVNLAFMGLMLTRPPGSKTYESCIILSRYNFLNCFCHVSAGDAQPSALHPGHTVALSSAYACIAATVLKDQNYADLGKSMANVIILCAIVMDGAVEMYEFINHWSCNENSNTIEKGHVEDKSSSIIPDPKITTNDNFIYIPSDIFWLWMYKMYPIILCPKMESYKVYCYFYGSITCHIVRVGMVILTIFLVMALRYLQFPSHLKVCCGDLFCIPLGAELRHPEAVSRGGSICRCLHLLWLLAHLVGDTVFVRWVESTCCQNRIMLVLSSCAVELG

SEQ ID NO: 1027494 - protein, 2563 aa, Homo sapiens
MRQEVLMAVPAIIANPFASLCIDLNSDFVNFQGVGNIIEFSEWAWLILCKLKVMGHKNSKSGTSFKKESTLRASIGWELFSMPRLAALRTAGTACCYKKEIDSAALGALTDYDCWEIPRTLNARANLSMCSETSGGSVILWLCVVLIMVQCGHEMKTPKWAYRYDMFEMFVFNKNILTLFGNGNRKIAKGILTLRKDEQVHVPRQVAVNFLWVKASPPAPFSLLVRTTRRHPPGPPALHCLSSLLNNSSLSSNMYKKKFTVKFANKEIFFKSPQYILPVTIVMGTFAFGRFLLYAWDKYIFKQKWDYAIKFYFVTLIYVNTFFNDDRMFPCMAVSIKTILFQWAYRVFSSFFFLLENNTCDDFPCSSDFFNVCCYLFGNAEYIHFEKEMTVKLLRLQVHIAKLPSREGFFQISVLTGEANLMPSPLPQNRLYHIENLCSSDGIESAFPVDVSIALSAGDWTSLPCVNWPFVVCVCVRVCVCVCVYDFLIPSHFSIDCFAKAIYILRILIIFCYICCKYFFPVYRLPFNFVFQVDKSKTIFLGEFITVVSELVMCRSFPPQEYININPYFLMELVWFRFLHLNLLPRGVCCGICVCVRRGMVLQNPPPVAREPCPVRVVITVAGFNSEDLEGRLMFPEWAPGCCLSLTLHFPILSGFGPNRALELVRILTGLLGNFMSGSKLLNLPKPVSVKMRVNECEMFGSSYSLLSSHSELSCLCPPSPPPLVPSVRSSHFLLGPSPFSVAGCLPAWRWTFHVTGISMYILVWSVSTLNFVSSSISLYRQSSQTHLKRLFLRILNLPKGSPMDGFLEVYKCSEIVFFCGKHNFHLLVRAQKRSGMNDCMILCHCAYTKGYVAHLLSCETVLTTLNRAAVSISVNLVYTCIPWSGIYLGSEHLWFYNISSQTQMTPESYTSCCEYMISISLHSHYTSGFYNYYLFLATLRNFCGEIHIIEVDYAESFLSIHSVVLSMSPLLYNQSPELFHLAKQTLYPLNNIKHSIPSSLSNPISTFCFCEFDYSKHFISVEIMKYLSVCDWLISLSTVSSRCVYVVAYVRISFLFKKIQIIFLFYIFFLSIHPLVDTWVAFGFVNNGAMYKYLYYCIYKYNAVMYTHLFEILTFSSFEYIARSGITKSYDISIFNLLRNHCEFFIATAPFYVLTKSAQGFRGSHILPNTCYFLLFLDCSHHSGCEVTFHCGFDLHFPNEEDAEHLFICLLVICMLSLEKCLFKSFDYFKNWVIRVIVVVDLEEFLSIFWILIPYQIYDLQISSLIPQGYFFTLLIVFFDVKKFLVLKKSNLSVFTFVVCAFGVISKKSLPNPTYKVLLRYFSCLQSIFLYSPFFIHSSVDGHVGWFHIFAILNCAVIRCLFSIMIYSPLRRYPVVEIAGSNGFYNFLFYHSFSLHFSSLTTNHVKFYIDLYNDHELLVSLGRPHLPLMIVNLILHFSCYCWCKKHLLYQDFKNQSDKSLISLIIITDKSIEFASDYFFFSSYTCMYSYDYNEHSSPFKLIIYIDEISKMLMTKYCLGFFVPGQSILTSYNFLFFLYVCVCVYFFFFNFNGFGVQMAFGHIDEFYSSEDLRFYCTGHLSSVHCTQYVVFYTLPPSYPPHFESLVSIMSLCIPFCTHKLALTYKGEHTVFGFPFLSCFTENNILQLHPKLLQKKKKPQTLFCSFLLLSHIPWCRDTTFYLSTHWLMGWFHIFAIVTCTAIKCLSGIMTSFPLGRYPGVGLLDQMVLNIFSLDLFLEILAPVFVVVVNKMQWNVMIITFHYALKSGKWRLEHSCKARIFSLLELKYTELGKSQSYIFDSGHNMALFYLLSLIVFNNVVSISESPIQYKNKDNTDSNSYGYNEHSSPLKLIIYTDEIEIENFNDLNTVFDFLFQVCQYELLIIFFFFLYVCVCVYIYIYLISMAFGVQMAFGHIYEFYSSEDLRFYYTFHLCGPTPPASPAASCHPLGQGNNHPESWVYLSLAFFSYNFAKESDLNVFFRVYIYILAVLRENLLFCMSSYGTFSFNTMVRFSPCPGDSSFSLFTGESSSCDYTSVSLSVLPSMVTRLPLSLSTTLFLSVLVEDDMWVFSPYTELKGDDNNVGTTNPPPSRGVTSVYQFAVFPATPRLIHFHLYLKNVLHGFFSIEVVKCYCVLYIIDYFFSFNSREMPGSTQRTALIVFNFCLYVCEFSHSAVNGNLQYSESFDITNSSVRSSSYTTPCAQCMSVSQGRYQEVKFLGHEGVSPTFFSILPCCPPEWVSSFAYLSMRVSVVHILYDAPYMKLKFLLVAIFDLSCMQGPTKTVIGTVDSCHLCVNLAFMGLMLTRPPGSKTYESCIILSRYNFLNCFCHVSAGDAQPSALHPGHTVALSSAYACIAATVLKDQNYADLGKSMANVIILCAIVMDGAVEMYEFINHWSCNENSNTIEKGHVEDKSSSIIPDPKITTNDNFIYIPSDIFWLWMYKMYPIILCPKMESYKVYCYFYGSITCHIVRVGMVILTIFLVMALRLFAVSSHLKVCCGDLFCIPLGAELRHPEAVSRGGSICRCLHLLWLLAHLVGDTVLVRWVESTCCQNRIMLVLSSCAVELG

SEQ ID NO: 1027495 - protein, 2472 aa, Homo sapiens
MTTRRHPPGPPALHCLSSLLNNSSLSSNMYKKKKFTVKFANKEIFFKSPQYILPVTIVMGTFAFGRFLLYAWDKYIFKQKWDYAIKFYFVTLIYVNTFFNDDRMFPCMAVSIKTILFQWAYRVFSSFFFLLENNTCDDFPCSSDFFNVCCYLFGNAEYIHFEKEMTVKLLRLQVHIAKLPSREEIFSISVLTGEANLMPSPLPQNRLYHIENLCSSDGIESAFPVDVSIALSAGDWTSLPCVNWPFVVCVCVRVCVCVCVYDFLIPSHFSIDCFAKAIYILRILKSFVIFDANIFFQFIELPFNFVFQVDKSKTIFLGEFITVVSELVMCRSFPPQEYININPYFLMELVWFRFLHLNLLPRGVCCGICVCVRRGMVLQNPPPVAREPCPVRVVITVAGFNSEDLEGRLMFPEWAPGCCLSLTLHFPILSGFGPNRALELVRILTGLLGNFMSGSKLLNLPKPVSVKMRVNECEMFGSSYSLLSSHSELSCLCPPSPPPLVPSVRSSHFLLGPSPFSVAGCLPAWRWTFHVTGISMYILVWSVSTLNFVSSSISLYRQSSQTHLKRLFLRILNLPKGSPMDGFLEVYKCSEIVFFCGKHNFHLLVRAQKRSGMNDCMILCHCAYTKGYVAHLLSCETVLTTLNRAAVSISVNLVYTCIPWSGIYLGSEHLWFYNISSQTQMTPESYTSCCEYMISISLHSHYTSGFYNYYLFLATLRNFCGEIHIIEVDYAESFLSIHSVVLSMSPLLYNQSPELFHLAKQTLYPLNNIKHSIPSSLSNPISTFCFCEFDYSKHFISVEIMKYLSVCDWLISLSTVSSRCVYVVAYVRISFLFKKIQIIFLFYIFFLSIHPLVDTWVAFGFVNNGAMYKYLYYCIYKYNAVMYTHLFEILTFSSFEYIARSGITKSYDISIFNLLRNHCEFFIATAPFYVLTKSAQGFRGSHILPNTCYFLLFLDCSHHSGCEVTFHCGFDLHFPNEEDAEHLFICLLVICMLSLEKCLFKSFDYFKNWVIRVIVVVDLEEFLSIFWILIPYQIYDLQISSLIPQGYFFTLLIVFFDDIEVFSFEIRLIYLFLLLWSVLLVSYPRNPCQIQRYKVLLRYFSCLQSIFLYSPFFIHSSVDGHVGWFHIFAILNCAVIRCLFSIMIYSPLRRYPVVEIAGSNGFYNFLFYHSFSLHFSSLTTNHVKFYIDLYNDHELLVSLGRPHLPLMIVNLILHFSCYCWCKKHLLYQDFKNQSDKSLISLIIITDKSIEFASDYFFFSSYTCMYSYDYNEHSSPFKLIIYIDEISKMLMTKYCLGFFVPGQSILTSYNFLFFLYVCVCVYFFFFNFNGFGVQMAFGHIDEFYSSEDLRFYCTGHLSSVHCTQYVVFYTLPPSYPPHFESLVSIMSLCIPFCTHKLALTYKLRTHSIWFSIPELLHLENILQLHPKLLQKKKKPQTLFCSFLLLSHIPWCRDTTFYLSTHWLMGWFHIFAIVTCTAIKCLSGIMTSFPLGRYPGVGLLDQMVLNIFSLDLFLEILAPVFVVVVNKMQWNVMIITFHYALKSGKWRLEHSCKARIFSLLELKYTELGKSQSYIFDSGHNMALFYLLSLIVFNNVVSISESPIQYKNKDNTDSNSYGYNEHSSPLKLIIYTDEIEIENFNDYNTVFDFLFQVCQYELLIIFFFFLYVCVCVYIYIYLISMAFGVQMAFGHIYEFYSSEDLRFYYTFHLCGPTPPASPAASCHPLGQGNNHPESWVYLSLAFFSYNFAKESDLNVFFRVYIYILAVLRENLLFCMSSYGTFSFNTMVRFSPCPGDSSFSLFTGESSSCDYTSVSLSVLPSMVTRLPLSLSTTLFLSVLVEDDMWVFSPYTELKGDDNNVGTTNPPPSRGVTSVYQFAVFPATPRLIHFHLYLKNVLHGFFSIEVVKCYCVLYIIDYFFSFNSREMPGSTQRTALIVFNFCLYVCEFSHSAVNGNLQYSESFDITNSSVRSSSYTTPCAQCMSVSQGRYQEVKFLGHEGVSPTFFSILPCCPPEWVSSFAYLSMRVSVVHILYDAPYMKLKFLLVAIFDLSCMQGPTKTVIGTVDSCHLCVNLAFMGLMLTRPPGSKTYESCIILSRYNFLNCFCHVSAGDAQPSALHPGHTVALSSAYACIAATVLKDQNYADLGKSMANVIILCAIVMDGAVEMYEFINHWSCNENSNTIEKGHVEDKSSSIIPDPKITTNDNFIYIPSDIFWLWMYKMYPIILCPKMESYKVYCYFYGSITCHIVRVGMVILTIFLVMALRYLQFPSHLKVCCGDLFCIPLGAELRHPEAVSRGGSICRCLHLLWLLAHLVGDTVLGDGLKARAAKIENVGPLLMCRGTGVKLRSGCSCLSIPGIEYNTVPGLAQNSSGSCRPQSLIPGILSPTQIKKTKNKLFYESVCDICKKWYLMIFYSLVCLVCGNLKWHPGLGRSAVCACPPLGTAWLLQGLSTHFLSSKGPPHARSSGVSPALALTS

SEQ ID NO: 1027496 - protein, 825 aa, Homo sapiens
MVSISESPIQYKNKDNTDSNSYGYNEHSSPLKLIIYTDEIEIENFNDYNTVFDFLFQVCQYELLIIFFFFLYVCVCVYIYIYLISMAFGVQMAFGHIYEFYSSEDLRFYYTFHLCGPTPPASPAASCHPLGQGNNHPESWVYLSLAFFSYNFAKESDLNVFFRVYIYILAVLRENLLFCMSSYGTFSFNTMVRFSPCPGDSSFSLFTGESSSCDYTSVSLSVLPSMVTRLPLSLSTTLFLSVLVEVIMWVFSPYTELKGDDNNVGTTNPPPSRGVTSVYQFAVFPATPRLIHFHLYLKNVLHGFFSIEVVKCYCVLYIIDYFFSFNSREMPGSTQRTALIVFNFCTDVCEFSHSAVNGNLQYSESFDITNSSVRSSSYTTPCAQCMSVSQGRYQEVKFLGHEGVSPTFFSILPCCPPEWVSSFAYLSMRVSVVHILYDAPYMKLKFLLVAIFDLSCMQGPTKTVIGTVDSCHLCVNLAFMGLMLTRPPGSKTYESCIILSRYNFLNCFCHVSAGDAQPSALHPGHTVALSSAYACIAATVLKRPKLCRFRKSMANVIILCAIVMDGAVEMYEFINHWSCNENSNTIEKGHVEDKSSSIIPDPKITTNDNFIYIPSDIFWLWMYKMYPIILCPKMESYKVYCYFYGSITCHIVRVGMVILTIFLVMALRYLQFPSHLKVCCGDLFCIPLGAELRHPEAVSRGGSICRCLHLLWLLAHLVGDTVLGDGLKARAAKIENVGPLLMCRGTGVKLRSGCSCLSIPGIEYNTVPGLAQNSSGSCRPQSLIPGILSPTQIKKTKNKLFYESVCDICKKWYLMIFYSLVCLVC

SEQ ID NO: 1027497 - protein, 2485 aa, Homo sapiens
MTFLVAQTFSVCCYLFGNAEYIHFEKEMTVKLLRLQVHIAKLPSREGFFQISVLTGEANLMPSPLPQNRLYHIENLCSSDGIESAFPVDVSIALSAGDWTSLPCVNWPFVVCVCVRVCVCVCVYDFLIPSHFSIDCFAKAIYILRILIIFCYICCKYFFPVYRLPFNFVFQVDKSKTIFLGEFITVVSELVMCRSFPPQEYININPYFLMELVWFRFLHLNLLPRGVCCGICVCVRRGMVLQNPPPVAREPCPVRVVITVAGFNSEDLEGRLMFPEWAPGCCLSLTLHFPILSGFGPNRALELVRILTGLLGNFMSGSKLLNLPKPVSVKMRVNECEMFGSSYSLLSSHSELSCLCPPSPPPLVPSVRSSHFLLGPSPFSVAGCLPAWRWTFHVTGISMYILVWSVSTLNFVSSSISLYRQSSQTHLKRLFLRILNLPKGSPMDGFLEVYKCSEIVFFCGKHNFHLLVRAQKRSGMNDCMILCHCAYTKGYVAHLLSCETVLTTLNRAAVSISVNLVYTCIPWSGIYLGSEHLWFYNISSQTQMTPESYTSCCEYMISISLHSHYTSGFYNYYLFLATLRNFCGEIHIIEVDYLKSFLSIHSVVLSMSPLLYNQSPELFHLAKQTLYPLNNIKHSIPSSLSNPISTFCFCEFDYSKHFISVEIMKYLSVCDWLISLSTVSSRCVYVVAYVRISFLFKKIQIIFLFYIFFLSIHPLVDTWVAFGFVNNGAMYKYLYYCIYKYNAVMYTHLFEILTFSSFEYIARSGITKSYDISIFNLLRNHCEFFIATAPFYVLTKSAQGFRGSHILPNTCYFLLFLDCSHHSGCEVTFHCGFDLHFPNEEDAEHLFICLLVICMLSLEKCLFKSFDYFKNWVIRVIVVVDLEEFLSIFWILIPYQIYDLQISSLIPQGYFFTLLIVFFDDIEVFSFEIRLIYLFLLLWSVLLVSYPRNPCQIQRYKVLLRYFSCLQSIFLYSPFFIHSSVDGHVGWFHIFAILNCAVIRCLFSIMIYSPLRRYPVVEIAGSNGFYNFLFYHSFSLHFSSLTTNHVKFYIDLYNDHELLVSLGRPHLPLMIVNLILHFSCYCWCKKHLLYQDFKNQSDKSLISLIIITDKSIEFASDYFFFSSYTCMYSYDYNEHSSPFKLIIYIDEISKMLMTKYCLGFFVPGQSILTSYNFLFFLYVCVCVYFFFFNFKAFGVQMAFGHIDEFYSSEDLRFYCTGHLSSVHCTQYVVFYTLPPSYPPHFESLVSIMSLCIPFCTHKLALTYKLRTHSIWFSIPELLHLEKYPPAPSKIAAKKKKTTNIILFFFIAKSIPWCRDTTFYLSTHWLMGWFHIFAIVTCTAIKCLSGIMTSFPLGRYPGVGLLDQMVLNIFSLDLFLEILAPVFVVVVNKMQWNVMIITFHYALKSGKWRLEHSCKARIFSLLELKYTELGKSQSYIFDSGHNMALFYLLSLIVFYNVVSISESPIQYKNKDNTDSNSYGYNEHSSPLKLIIYTDEIEIENFNDYNTVFDFLFQVCQYELLIIFFFFLYVCVCVYIYIYLISMAFGVQMAFGHIYEFYSSEVCRFYYTFHLCGPTPPASPAASCHPLGQGNNHPESWVYLSLAFFSYNFAKESDLNVFFRVYIYILAVLRENLLFCMSSYGTFSFNTMVRFSPCPGDSSFSLFTGESSSCDYTSVSLSVLPSMVTRLPLSLSTTLFLSVLVEDDMWVFSPYTELKGDDNNVGTTNPPPSRGGNQCYQFAVFPATPRLIHFHLYLKNVLHGFFSIEVVKCYCVLYIIDYFFSFNSREMPGSTQRTALIVFNFCLYVCEFSHSAVNGNLQYSESFDITNSSVRSSSYTTPCAQCMSVSQGRYQEVKFLGHEGVSPTFFSILPCCPPEWVSSFAYLSMRVSVVHILYDAPYMKLKFLLVAIFDLSCMQCPTKTVIGTVDSCHLCVNLAFMGLMLTRPPGSKTYESCIILSRYNFLNCFCHVSAGDAQPSALHPGHTVALSSAYACIAATVLKRPKLCRFRKSMANVIILCAIVMDGAVEMYEFINHWSCNENSNTIEKGHVEDKSSSIIPDPKITTNDNFIYIPSDIFWLWMYKMYPIILCPKMESYKVYCYFYGSITCHIVRVGMVILTIFLVMALRYLQFPSHLKVCCGDLFCIPLGAELRHPEAVSRGGSICRCLHLLWLLAHLVGDTVLGDGLKARAAKIENVGPLLMCRGTGVKLRSGCSCLSIPGIEYNTVPGLAQNSSGSCRPQSLIPGILSPHRLNKPKTNYSRKASVTFEKVVFNDLLFTCLFSLLKSSVASWSGKECCLRLPSAGHSVAASGAKHTLSVFYRAATCQELRCEPGSGSYLIGSLIGAQGAEHCTQRGTTRLGICLGGLTTSRRKYLSSSGLSSRVTGVLSLLLFCQGDNCVTHHLCVKARPCLGLCSCADPKGKCFASFLPVNFTYEEMCENCSKPYLHMFELQTLWVIQWHLSLTPSLPSHRGHRHGQLLQFLSREPVYV

SEQ ID NO: 1027498 - protein, 419 aa, Homo sapiens
MAEPVGKRGRWSGGSGAGRGGRGGWGGRGRRPRAQRSPSRGTLDVVSVDLVTDSDEEILEVATARGAADEVEVEPPEPPGPVASRDNSNSDSEGEDRRPAGPPREPVRRRRRLVLDPGEAPLVPVYSGKVKSSLRLIPDDLSLLKLYPPGDEEEAELADSSGLYHEGSPSPGSPWKTKLRTKDKEEKKKTEFLDLDNSPLSPPSPRTKSRTHTRALKKLSEVNKRLQDLRSCLSPKPPQGQEQQGQEDEVVLVEGPTLPETPRLFPLKIRCRADLVRLPLRMSEPLQSVVDHMATHLGVSPSRILLLFGETELSPTATPRTLKLGVADIIDCVVLTSSPEATETSQQLQLRVQGKEKHQTLEVSLSRDSPLKTLMSHYEEAMGLSGRKLSFFFDGTKLSGRELPADLGMESGDLIEVWG

SEQ ID NO: 1027499 - protein, 419 aa, Homo sapiens; identical to SEQ ID NO: 1027498

SEQ ID NO: 1027500 - protein, 455 aa, Homo sapiens
MAEPVGKRGRWSGGSGAGRGGRGGWGGRGRRPRAQRSPSRGTLDVVSVDLVTDSDEEILEVATARGAADEVEVEPPEPPGPVASRDNSNSDSEGEDRRPAGPPREPVRRRRRLVLDPGEAPLVPVYSGKVKSSLRLIPDDLSLLSSWDYSCVLLCLANYVEIGSPHLAQPGLGLLGSSDPPGSASKSAGITGVSHCVRLCLIVQGSDFKDLWGQSLSIALRPAVSCFYRDLDNSPLSPPSPRTKSRTHTRALKKLSEVNKRLQDLRSCLSPKPPQGQEQQGQEDEVVLVEGPTLPETPRLFPLKIRCRADLVRLPLRMSEPLQSVVDHMATHLGVSPSRILLLFGETELSPTATPRTLKLGVADIIDCVVLTSSPEATETSQQLQLRVQGKEKHQTLEVSLSRDSPLKTLMSHYEEAMGLSGRKLSFFFDGTKLSGRELPADLGMESGDLIEVWG

SEQ ID NO: 1027501 - protein, 419 aa, Homo sapiens; identical to SEQ ID NO: 1027498

SEQ ID NO: 1027502 - protein, 401 aa, Homo sapiens
MAEPVGKRGRWSGGSGAGRGGRGGWGGRGRRPRAQRSPSRGTLDVVSVDLVTDSDEEILEVATARGAADEVEVEPPEPPGPVASRDNSNSDSEGEDRRPAGPPREPVRRRRRLVLDPGEAPLVPVYSGKVKSSLRLIPDDLSLLKLYPPGDEEEAELADSSGLYHEGSPSPGSPWKTKLRTKDKEEKKKTEFLDLDNSPLSPPSPRTKSRTHTRALKKLSEVNKRLQDLRSCLSPKPPQGQEQQGQEDEVVLVEGPTLPETPRLFPLKIRCRADLVRLPLRMSEPLQSVVDHMATHLGVSPSRILLLFGETELSPTATPRTLKLGVADIIDCVVLTSSPEATETSQQLQLRVQGKEKHQTLEVSLSRDSPLKTLMSHAKILWFYGFFPFLYTILSHKHPCL

SEQ ID NO: 1027503 - protein, 419 aa, Homo sapiens; identical to SEQ ID NO: 1027498

SEQ ID NO: 1027504 - protein, 285 aa, Homo sapiens
MAEPVGKRGRWSGGSGAGRGGRGGWGGRGRRPRAQRSPSRGTLDVVSVDLVTDSDEEILEVATARGAADEVEVEPPEPPGPVASRDNSNSDSEGEDRRPAGPPREPVRRRRRLVLDPGEAPLVPVYSGKVKSSLRLIPDDLSLLKLYPPGDEEEAELADSSGLYHEGSPSPGSPWKTKLRTKDKEEKKKTEFLDLDNSPLSPPSPRTKSRTHTRALKKLSEVNKRLQDLRSCLSPKPPQGQEQQGQEDEVVLVEGPTLPETPRLFPLKIRCRADLVRLPLRMVSA

SEQ ID NO: 1027505 - protein, 285 aa, Homo sapiens; identical to SEQ ID NO: 1027504

SEQ ID NO: 1027506 - protein, 206 aa, Homo sapiens
MAEPVGKRGRWSGGSGAGRGGRGGWGGRGRRPRAQRSPSRGTLDVVSVDLVTDSDEEILEVATARGAADEVEVEPPEPPGPVASRDNSNSDSEGEDRRPAGPPREPVRRRRRLVLDPGEAPLVPVYSGKVKSSLRLIPDDLSLLSSWDYSCVLLCLANYVEIGSPHLAQPGLGLLGSSDPPGSASKSAGITGVSHCVRLCLIVQGI

SEQ ID NO: 1027507 - protein, 193 aa, Homo sapiens
MAEPVGKRGRWSGGSGAGRGGRGGWGGRGRRPRAQRSPSRGTLDVVSVDLVTDSDEEILEVATARGAADEVEVEPPEPPGPVASRDNSNSDSEGEDRRPAGPPREPVRRRRRLVLDPGEAPLVPVYSGKVKSSLRLIPDDLSLLKLYPPGDEEEAELADSSGLYHEGSPSPGSPWKTKLRTKDKEEKKKTEFL

SEQ ID NO: 1027508 - protein, 127 aa, Homo sapiens
MATHLGVSPSRILLLFGETELSPTATPRTLKLGVADIIDCVVLTSSPEATETSQQLQLRVQGKEKHQTLEVSLSRDSPLKTLMSHYEEAMGLSGRKLSFFFDGTKLSGRELPADLGMESGDLIEVWG

SEQ ID NO: 1027509 - protein, 419 aa, Homo sapiens; identical to SEQ ID NO: 1027498

SEQ ID NO: 1027510 - protein, 419 aa, Homo sapiens; identical to SEQ ID NO: 1027498

SEQ ID NO: 1027511 - protein, 285 aa, Homo sapiens; identical to SEQ ID NO: 1027504

SEQ ID NO: 1027512 - protein, 377 aa, Homo sapiens
MAEPVGKRGRWSGGSGAGRGGRGGWGGRGRRPRAQRSPSRGTLDVVSVDLVTDSDEEILEVATARGAADEVEVEPPEPPGPVASRDNSNSDSEGEDRRPAGPPREPVRRRRRLVLDPGEAPLVPVYSGKVKSSLRLIPDDLSLLSSWDYSCVLLCLANYVEIGSPHLAQPGLGLLGSSDPPGSASKKCWDYRCEPLRPTMLDCPRDLISRIVGPVSLHCPPSCCLLLLQGSGQLSSVPTFTKDQKQNAYSGTQEVKVPSAGALAGMEEGNLGGWLTPVDPESCLHCSEMVVSSRGVLAEGTVILFPSCSLELPIILFSLSCLHTFCFLCLHFPNAPLSFWQTFYPFFKAPHKHPVSFFFLQKVVLLCPGWFRTPGLK

SEQ ID NO: 1027513 - protein, 153 aa, Homo sapiens
  misc_feature (7)..(7): Xaa can be any naturally occurring amino acid
TKRRRRXSAEVTGKSQNSNTLAGAWGVKNRRRERDVFQALQRRIQGQPKLPGSQNQFFYQCSTHCCHFSLLGTGKCCSKGFDLRLQEEDAGRTAGVLGFYSIWARSYVSNKPKGEKYEPSSHPIGAAENPAGSSGNGLACPAGSGKFEKSICS

SEQ ID NO: 1027514 - protein, 503 aa, Homo sapiens
MEYMAESTDRSPGHILCCECGVPISPNPANICVACLRSKVDISQGIPKQVSISFCKQCQRYFQPPGTWIQCALESRELLALCLKKIKAPLSKVRLVDAGFVWTEPHSKRLKVKLTIQKEVMNGAILQQVFVVDYVVQSQMCGDCHRVEAKDFWKAVIQVRQKTLHKKTFYYLEQLILKYGMHQNTLRIKEIHDGLDFYYSSKQHAQKMVEFLQCTVPCRYKASQRLISQDIHSNTYNYKSTFSVEIVPICKDNVVCLSPKLAQSLGNMNQICVCIRVTSAIHLIDPNTLQVADIDGSTFWSHPFNSLCHPKQLEEFIVMECSIVQDIKRAAGAGMISKKHTLGEVWVQKTSEMNTDKQYFCRTHLGHLLNPGDLVLGFDLANCNLNDEHVNKMNSDRVPDVVLIKKSYDRTKRQRRRNWKLKELARERENMDTDDERQYQDFLEDLEEDEAIRKNVNIYRDSAIPVESDTDDEGAPRISLAEMLEDLHISQDATGEEGASMLT

SEQ ID NO: 1027515 - protein, 218 aa, Homo sapiens
REYIGSRRSSLWRRQPGWQLTGQPGSILLRVFSKSRAGLEARKLKAYRTMEYMAESTDRSPGHILCCECGVPISPNPANICVACLRSKVDISQGIPKQVSISFCKQCQRYFQPPGTWIQCALESRELLALCLKKIKAPLSKVRLVDAGFVWTEPHSKRLKVKLTIQKEVMNGAILQQVFVVDYVVQSQMCGDCHRVEAKDFWKAVIQVRQKVMREDDE

SEQ ID NO: 1027516 - protein, 107 aa, Homo sapiens
SRLKSIPQETRCIRTKRQRRRNWKLKELARERENMDTDDERQYQDFLEDLEEDEAIRKNVNIYRDSAIPVESDTDDEGAPRISLAEMLEDLHISQDATGEEGASMLT

SEQ ID NO: 1027517 - protein, 187 aa, Homo sapiens
REYIGSRRSSLWRRQPGWQLTGQPGSILLRVFSKSRAGLEARKLKAYRTMEYMAESTDRSPGHILCCECGVPISPNPANICVACLRSKVDISQGIPKQVSISFCKQCQRYFQPPGTWIQCALESRELLALCLKKIKAPLSKVRLVDAGFVWTEPHSKRLKVKLTIQKEVMNGAILQQVFVVDYVVQS

SEQ ID NO: 1027518 - protein, 526 aa, Homo sapiens
REYIGSRRSSLWRRQPELKAYRTMEYMAESTDRSPGHILCCECGVPISPNPANICVACLRSKVDISQGIPKQVSISFCKQCQRYFQPPGTWIQCALESRELLALCLKKIKAPLSKVRLVDAGFVWTEPHSKRLKVKLTIQKEVMNGAILQQVFVVDYVVQSQMCGDCHRVEAKDFWKAVIQVRQKTLHKKTFYYLEQLILKYGMHQNTLRIKEIHDGLDFYYSSKQHAQKMVEFLQCTVPCRYKASQRLISQDIHSNTYNYKSTFSVEIVPICKDNVVCLSPKLAQSLGNMNQICVCIRVTSAIHLIDPNTLQVADIDGSTFWSHPFNSLCHPKQLEEFIVMECSIVQDIKRAAGAGMISKKHTLGEVWVQKTSEMNTDKQYFCRTHLGHLLNPGDLVLGFDLANCNLNDEHVNKMNSDRVPDVVLIKKSYDRTKRQRRRNWKLKELARERENMDTDDERQYQDFLEDLEEDEAIRKNVNIYRDSAIPVESDTDDEGAPRISLAEMLEDLHISQDATGEEGASMLT

SEQ ID NO: 1027519 - protein, 552 aa, Homo sapiens
REYIGSRRSSLWRRQPGWQLTGQPGSILLRVFSKSRAGLEARKLKAYRTMEYMAESTDRSPGHILCCECGVPISPNPANICVACLRSKVDISQGIPKQVSISFCKQCQRYFQPPGTWIQCALESRELLALCLKKIKAPLSKVRLVDAGFVWTEPHSKRLKVKLTIQKEVMNGAILQQVFVVDYVVQSQMCGDCHRVEAKDFWKAVIQVRQKTLHKKTFYYLEQLILKYGMHQNTLRIKEIHDGLDFYYSSKQHAQKMVEFLQCTVPCRYKASQRLISQDIHSNTYNYKSTFSVEIVPICKDNVVCLSPKLAQSLGNMNQICVCIRVTSAIHLIDPNTLQVADIDGSTFWSHPFNSLCHPKQLEEFIVMECSIVQDIKRAAGAGMISKKHTLGEVWVQKTSEMNTDKQYFCRTHLGHLLNPGDLVLGFDLANCNLNDEHVNKMNSDRVPDVVLIKKSYDRTKRQRRRNWKLKELARERENMDTDDERQYQDFLEDLEEDEAIRKNVNIYRDSAIPVESDTDDEGAPRISLAEMLEDLHISQDATGEEGASMLT

SEQ ID NO: 1027520 - protein, 218 aa, Homo sapiens; identical to SEQ ID NO: 1027515

SEQ ID NO: 1027521 - protein, 503 aa, Homo sapiens
MEYMAESTDRSPGHILCCECGVPISPNPANICVACLRSKVDISQGIPKQVSISFCKQCQRYFQPPGTWIQCALESRELLALCLKKIKAPLSKVRLVDAGFVWTEPHSKRLKVKLTIQKEVMNGAILQQVFVVDYVVQSQMCGDCHRVEAKDFWKAVIQVRQKTLHKKTFYYLEQLILKYGMHQNTLRIKEIHDGLDFYYSSKQHAQKMVEFLQCTVPCRYKASQRLISQDIHSNTYNYKSTFSVEIVPICKDNVVCLSPKLAQSLGNMNQICVCIRVTSAIHLIDPNTLQVADIDGSTFWSHPFNSLCHPKQLEEFIVIECSIVQDIKRAAGAGMISKKHTLGEVWVQKTSEMNTDKQYFCRTHLGHLLNPGDLVLGFDLANCNLNDEHVNKMNSDRVPDVVLIKKSYDRTKRQRRRNWKLKELARERENMDTDDERQYQDFLEDLEEDEAIRKNVNIYRDSAIPVESDTDDEGAPRISLAEMLEDLHISQDATGEEGASMLT

SEQ ID NO: 1027522 - protein, 564 aa, Homo sapiens
MATAERRALGIGFQWLSLATLVLICAGQGGRREDGGPACYGGFDLYFILDKSGSVLHHWNEIYYFVEQLAHKFISPQLRMSFIVFSTRGTTLMKLTEDREQIRQGLEELQKVLPGGDTYMHEGFERASEQIYYENRQGYRTASVIIALTDGELHEDLFFYSEREANRSRDLGAIVYCVGVKDFNETQLARIADSKDHVFPVNDGFQALQGIIHSILKKSCIEILAAEPSTICAGESFQVVVRGNGFRHARNVDRVLCSFKINDSVTLNEKPFSVEDTYLLCPAPILKEVGMKAALQVSMNDGLSFISSSVIITTTHCSDGSILAIALLILFLLLALALLWWFWPLCCTVIIKEVPPPPAEESEEEDDDGLPKKKWPTVDASYYGGRGVGGIKRMEVRWGEKGSTEEGAKLEKAKNARVKMPEQEYEFPEPRNLNNNMRRPSSPRKWYSPIKGKLDALWVLLRKGYDRVSVMRPQPGDTGRCINFTRVKNNQPAKYPLNNAYHTSSPPPAPIYTPPPPAPHCPPPPPSAPTPPIPSPPSTLPPPPQAPPPNRAPPPSRPPPRPSV

SEQ ID NO: 1027523 - protein, 333 aa, Homo sapiens
MATAERRALGIGFQWLSLATLVLICAGQGGRREDGGPACYGGFDLYFILDKSGSVLHHWNEIYYFVEQLAHKFISPQLRMSFIVFSTRGTTLMKLTEDREQIRQGLEELQKVLPGGDTYMHEGFERASEQIYYENRQGYRTASVIIALTDGELHEDLFFYSEREANRSRDLGAIVYCVGVKDFNETQLARIADSKDHVFPVNDGFQALQGIIHSILKKSCIEILAAEPSTICAGESFQVVVRGNGFRHARNVDRVLCSFKINDSVTLNEKPFSVEDTYLLCPAPILKEVGMKAALQVSMNDGLSFISSSVIITTTHCSLHKIASGPTTAACME

SEQ ID NO: 1027524 - protein, 521 aa, Homo sapiens
MATAERRALGIGFQWLSLATLVLICAGQGGRREDGGPACYGGFDLYFILDKSGSVLHHWNEIYYFVEQLAHKFISPQLRMSFIVFSTRGTTLMKLTEDREQIRQGLEELQKVLPGGDTYMHEGFERASEQIYYENRQGYRTASVIIALTDGELHEDLFFYSEREANRSRDLGAIVYCVGVKDFNETQLARIADSKDHVFPVNDGFQALQGIIHSILKKSCIEILAAEPSTICAGESFQVVVRGNGFRHARNVDRVLCSFKINDSVTLNEKPFSVEDTYLLCPAPILKEVGMKAALQVSMNDGLSFISSSVIITTTHCSDGSILAIALLILFLLLALALLWWFWPLCCTVIIKEVPPPPAEESEEEDDDGLPKKKWPTVDASYYGGRGVGGIKRMEVRWGEKGSTEEGAKLEKAKNARVKMPEQEYEFPEPRNLNNNMRRPSSPRKWYSPIKGKLDALWVLLRKGYDRVSVMRPQPGDTGRCINFTRVKNNQPAKYPLNNAYHTPPPNRAPPPSRPPPRPSV

SEQ ID NO: 1027525 - protein, 393 aa, Homo sapiens
GELVITDGFSGQPLSPVKAYIPLGSEYNYEPLSPNGFPKFSTSKPNQSPHVFVYLLCSQLARIADSKDHVFPVNDGFQALQGIIHSILKKSCIEILAAEPSTICAGESFQVVVRGNGFRHARNVDRVLCSFKINDSVTLNEKPFSVEDTYLLCPAPILKEVGMKAALQVSMNDGLSFISSSVIITTTHCSDGSILAIALLILFLLLALALLWWFWPLCCTVIIKEVPPPPAEESEEEDDDGLPKKKWPTVDASYYGGRGVGGIKRMEVRWGEKGSTEEGAKLEKAKNARVKMPEQEYEFPEPRNLNNNMRRPSSPRKWYSPIKGKLDALWVLLRKGYDRVSVMRPQPGDTGRCINFTRVKNNQPAKYPLNNAYHTPPPNRAPPPSRPPPRPSV

SEQ ID NO: 1027526 - protein, 521 aa, Homo sapiens; identical to SEQ ID NO: 1027524

SEQ ID NO: 1027527 - protein, 521 aa, Homo sapiens; identical to SEQ ID NO: 1027524

SEQ ID NO: 1027528 - protein, 564 aa, Homo sapiens; identical to SEQ ID NO: 1027522

SEQ ID NO: 1027529 - protein, 347 aa, Homo sapiens
MATAERRALGIGFQWLSLATLVLICAGQGGRREDGGPACYGGFDLYFILDKSGSVLHHWNEIYYFVEQLAHKFISPQLRMSFIVFSTRGTTLMKLTEDREQIRQGLEELQKVLPGGDTYMHEGFERASEQIYYENRQGYRTASVIIALTDGELHEDLFFYSEREANRSRDLGAIVYCVGVKDFNETQLARIADSKDHVFPVNDGFQALQGIIHSILKKSCIEILAAEPSTICAGESFQVVVRGNGFRHARNVDRVLCSFKINDSVTLNEKPFSVEDTYLLCPAPILKEVGMKAALQVSMNDGLSFISSSVIITTTHCDGLWFYIQSLETVKDHRNIRVRNSDLKYCL

SEQ ID NO: 1027530 - protein, 297 aa, Homo sapiens
MATAERRALGIGFQWLSLATLVLICAGQGGRREDGGPACYGGFDLYFILDKSGSVLHHWNEIYYFVEQLAHKFISPQLRMSFIVFSTRGTTLMKLTEDREQIRQGLEELQKVLPGGDTYMHEGFERASEQIYYENRQGYRTASVIIALTDGELHEDLFFYSEREANRSRDLGAIVYCVGVKDFNETQLARIADSKDHVFPVNDGFQALQGIIHSILKKSCIEILAAEPSTICAGESFQVVVRGNGFRHARNVDRVLCSFKINDSVTLSKSLQSPWVSSTSGFKEGNSHPCLPARPHT

SEQ ID NO: 1027531 - protein, 521 aa, Homo sapiens; identical to SEQ ID NO: 1027524

SEQ ID NO: 1027532 - protein, 207 aa, Homo sapiens
QFSLLAEAISQEHQELKARTTNIGYLWFWPLCCTVIIKEVPPPPAEESEEEDDDGLPKKKWPTVDASYYGGRGVGGIKRMEVRWGEKGSTEEGAKLEKAKNARVKMPEQEYEFPEPRNLNNNMRRPSSPRKWYSPIKGKLDALWVLLRKGYDRVSVMRPQPGDTGRCINFTRVKNNQPAKYPLNNAYHTPPPNRAPPPSRPPPRPSV

SEQ ID NO: 1027533 - protein, 83 aa, Homo sapiens
GCLEDPCIYSMALPRDSRGHSEVQAEMLTLLSNEMVSISANAPFSTSVICPVQLQDVVSAKHFDGIGNCKCMMILKRLSRICS

SEQ ID NO: 1027534 - protein, 521 aa, Homo sapiens; identical to SEQ ID NO: 1027524

SEQ ID NO: 1027535 - protein, 333 aa, Homo sapiens; identical to SEQ ID NO: 1027523

SEQ ID NO: 1027536 - protein, 248 aa, Homo sapiens
MKHYEVEILDAKTREKLCFLDKVEPHATIAEIKNLFTKTHPQWYPARQSLRLDPKGKSLKDEDVLQKLPVGTTATLYFRDLGAQISWVTVFLTEYAGPLFHLPALLLPECPSSMATNMTLRPVGIQWCTSPASVTHSTTSSACWRRSSCTVSPMALCLCATSSRTGPTTGASPRGWAITSITLSKSPYLRSSAGETGARHLCDLQLGNFSIQMACGNWGRGSKKRKIHNPQEPFRGSPGVPAQNYKGG

SEQ ID NO: 1027537 - protein, 104 aa, Homo sapiens
MKHYEVEILDAKTREKLCFLDKVEPHATIAEIKNLFTKTHPQWYPARQSLRLDPKGKSLKDEDVLQKLPVGTTATLYFRDLGAQIILVRVFLTENSGAPVHLPC

SEQ ID NO: 1027538 - protein, 191 aa, Homo sapiens
HETQRPGLERPALQRIMVQQAESLEAESNLPREALDTEEGEFMACSPVALDESDPDWCKTASGHIKRPMNAFMVWSKIERRKIMEQSPDMHNAEISKRLGKRWKMLKDSEKIPFIREAERLRLKHMADYPDYKYRPRKKPKMDPSAKPSASQSPEKSAAGGGGGSAGGGAGGAKTSKGSSKKCGKLKAPAA

SEQ ID NO: 1027539 - protein, 342 aa, Homo sapiens
SDRDHCAYSPIVEMKEKMLEGSQRERSGYPQREAHQTKQRISRQKLYKPEESGGRYSTFLKKRIFNPEFHIQPNIKDTIGTAAPAAPTPHRRLHLHGHPCGGRLTTSHHIIPRAELLKRDDAVPTTLPSSSLFILSVSLVLSFPVFTFFLRDSKPSTTSVYPPVPSEFNLALSHLHMAGRVETALSLGCEVCVRCETTLASALTQGPDEPTILGRVTGRRLCDYEDITLTSTSLEAPNDITEQPYKRFHNAPSRLMMTRYHNKGLQAANAPGTVNPSTYNAAWVPKATQQTKQKTEGSRSAATNKRSPHKRDDRQETHTQKTPANNNGNKKGAPKQRAPRKC

SEQ ID NO: 1027540 - protein, 166 aa, Homo sapiens
MAGRVETALSLGCEVCVRCETTLASALTQGPDEPTILGRVTGRRLCDTEDITLTSTSLEAPNDITEQPYKRFHNAPSRLMMTRTTQGTSGSERPWDRQSIDIQRSLGTQGDTTNKTEDRGEQERSNKQKKSPQKGRPQETHTQKTPANNNGNKKGAPKQRAPRKCQ

SEQ ID NO: 1027541 - protein, 166 aa, Homo sapiens; identical to SEQ ID NO: 1027540

SEQ ID NO: 1027542 - protein, 342 aa, Homo sapiens
MSKGTSSDTSLGRVSRAAFPSPTAAEMAEISRIQYEMEYTEGISQRMRVPEKLKVAPPNADLEQGFQEGVPNASVIMQVPERIVVAGNNEDVSFSRPADLDLIQSTPFKPLALKTPPRVLTLSERPLDFLDLERPPTTPQNEEIRAVGRLKRERSMSENAVRQNGQLVRNDSLWHRSDSAPRNKISRFQAPISAPEYTVTPSPQQARVCPPHMLPEDGANLSSARGILSLIQSSTRRAYQQILDVLDENRRPVLRGGSAAATSNPHHDNVRYGISNIDTTIEGTSDDLTVVDAASLRRQIIKLNRRLQLLEEENKERAKREMVMYSITVAFWLLNSWLWFRR

SEQ ID NO: 1027543 - protein, 291 aa, Homo sapiens; identical to SEQ ID NO: 886347

SEQ ID NO: 1027544 - protein, 228 aa, Homo sapiens
DHERLFRYGSQKGPARAFRASAVALCGPLRRCCPWAPPCSQPTASESAHSSAPGARGRGSSPGPSCGPRGGNNEDVSFSRPADLDLIQSTPFKPLALKTPPRVLTLSERPLDFLDLERPPTTPQNEEIRAVGRLKRERSMSENAVRQNGQLVRNDSLYGISNIDTTIEGTSDDLTVVDAASLRRQIIKLNRRLQLLEEENKERAKREMVMYSITVAFWLLNSWLWFRR

SEQ ID NO: 1027545 - protein, 342 aa, Homo sapiens; identical to SEQ ID NO: 1027542

SEQ ID NO: 1027546 - protein, 238 aa, Homo sapiens
MAEISRIQYEMEYTEGISQRMRVPEKLKVAPPNADLEQGFQEGVPNASVIMQVPERIVVAGNNEDVSFSRPADLDLIQSTPFKPLALKTPPRVLTLSERPLDFLDLERPPTTPQNEEIRAVGRLKRERSMSENAVRQNGQLVRNDSLPVLRGGSAAATSNPHHDNVRYGISNIDTTIEGTSDDLTVVDAASLRRQIIKLNRRLQLLEEENKERAKREMVMYSITVAFWLLNSWLWFRR

SEQ ID NO: 1027547 - protein, 264 aa, Homo sapiens
MSKGTSSDTSLGRVSRAAFPSPTAAEMAEISRIQYEMEYTEGISQRMRVPEKLKVAPPNADLEQGFQEGVPNASVIMQVPERIVVAGNNEDVSFSRPADLDLIQSTPFKPLALKTPPRVLTLSERPLDFLDLERPPTTPQNEEIRAVGRLKRERSMSENAVRQNGQLVRNDSLPVLRGGSAAATSNPHHDNVRYGISNIDTTIEGTSDDLTVVDAASLRRQIIKLNRRLQLLEEENKERAKREMVMYSITVAFWLLNSWLWFRR

SEQ ID NO: 1027548 - protein, 291 aa, Homo sapiens; identical to SEQ ID NO: 886347

SEQ ID NO: 1027549 - protein, 316 aa, Homo sapiens
MAEISRIQYEMEYTEGISQRMRVPEKLKVAPPNADLEQGFQEGVPNASVIMQVPERIVVAGNNEDVSFSRPADLDLIQSTPFKPLALKTPPRVLTLSERPLDFLDLERPPTTPQNEEIRAVGRLKRERSMSENAVRQNGQLVRNDSLWHRSDSAPRNKISRFQAPISAPEYTVTPSPQQARVCPPHMLPEDGANLSSARGILSLIQSSTRRAYQQILDVLDENRRPVLRGGSAAATSNPHHDNVRYGISNIDTTIEGTSDDLTVVDAASLRRQIIKLNRRLQLLEEENKERAKREMVMYSITVAFWLLNSWLWFRR

SEQ ID NO: 1027550 - protein, 291 aa, Homo sapiens; identical to SEQ ID NO: 886347

SEQ ID NO: 1027551 - protein, 243 aa, Homo sapiens
MAEISRIQYEMEYTEGISQRMRVPEKLKVAPPNADLEQGFQEGVPNASVIMQVPERIVVAGNNEDVSFSRPADLDLIQSTPFKPLALKTPPRVLTLSERPLDFLDLERPPTTPQNEEIRAVGRLKRERSMSENAVRQNGQLVRNDSLWHRSDSAPRNKISRFQAPISAPEYTYGISNIDTTIEGTSDDLTVVDAASLRRQIIKLNRRLQLLEEENKERAKREMVMYSITVAFWLLNSWLWFRR

SEQ ID NO: 1027552 - protein, 317 aa, Homo sapiens
MSKGTSSDTSLGRVSRAAFPSPTAAEMAEISRIQYEMEYTEGISQRMRVPEKLKVAPPNADLEQGFQEGVPNASVIMQVPERIVVAGNNEDVSFSRPADLDLIQSTPFKPLALKTPPRVLTLSERPLDFLDLERPPTTPQNEEIRAVGRLKRERSMSENAVRQNGQLVRNDSLVTPSPQQARVCPPHMLPEDGANLSSARGILSLIQSSTRRAYQQILDVLDENRRPVLRGGSAAATSNPHHDNVRYGISNIDTTIEGTSDDLTVVDAASLRRQIIKLNRRLQLLEEENKERAKREMVMYSITVAFWLLNSWLWFRR

SEQ ID NO: 1027553 - protein, 264 aa, Homo sapiens; identical to SEQ ID NO: 1027547

SEQ ID NO: 1027554 - protein, 249 aa, Homo sapiens
TSISGGRWSSTGTLLWSLGNNEDVSFSRPADLDLIQSTPFKPLALKTPPRVLTLSERPLDFLDLERPPTTPQNEEIRAVGRLKRERSMSENAVRQNGQLVRNDSLVTPSPQQARVCPPHMLPEDGANLSSARGILSLIQSSTRRAYQQILDVLDENRRPVLRGGSAAATSNPHHDNVRYGISNIDTTIEGTSDDLTVVDAASLRRQIIKLNRRLQLLEEENKERAKREMVMYSITVAFWLLNSWLWFRR

SEQ ID NO: 1027555 - protein, 269 aa, Homo sapiens
MSKGTSSDTSLGRVSRAAFPSPTAAEMAEISRIQYEMEYTEGISQRMRVPEKLKVAPPNADLEQGFQEGVPNASVIMQVPERIVVAGNNEDVSFSRPADLDLIQSTPFKPLALKTPPRVLTLSERPLDFLDLERPPTTPQNEEIRAVGRLKRERSMSENAVRQNGQLVRNDSLWHRSDSAPRNKISRFQAPISAPEYTYGISNIDTTIEGTSDDLTVVDAASLRRQIIKLNRRLQLLEEENKERAKREMVMYSITVAFWLLNSWLWFRR

SEQ ID NO: 1027556 - protein, 238 aa, Homo sapiens; identical to SEQ ID NO: 1027546

SEQ ID NO: 1027557 - protein, 160 aa, Homo sapiens
DHERLFRYGSQKGPARAFRASAVALCGPLRRCCPWAPPCSQPTASESAHSSAPGARGRGSSPGPSCGPRGSGRDLQPELAARPIAAAETLRPTGTRGGPGPPGSVSLTRVPSPGLLPSTLVFPPPRDLESPRRARERSAFCRCYWANLFTLCGSASPLVY

SEQ ID NO: 1027558 - protein, 317 aa, Homo sapiens; identical to SEQ ID NO: 1027552

SEQ ID NO: 1027559 - protein, 297 aa, Homo sapiens
MSKGTSSDTSLGRVSRAAFPSPTAAEMAEISRIQYEMEYTEGISQRMRVPEKLKVAPPNADLEQGFQEGVPNASVIMQVPERIVVAGNNEDVSFSRPADLDLIQSTPFKPLALKTPPRVLTLSERPLDFLDLERPPTTPQNEEIRAVGRLKRERSMSENAVRQNGQLVRNDSLVTPSPQQARVCPPHMLPEDGANLSSARGILSLIQSSTRRAYQQILDVLDENRRYGISNIDTTIEGTSDDLTVVDAASLRRQIIKLNRRLQLLEEENKERAKREMVMYSITVAFWLLNSWLWFRR

SEQ ID NO: 1027560 - protein, 316 aa, Homo sapiens; identical to SEQ ID NO: 1027549

SEQ ID NO: 1027561 - protein, 218 aa, Homo sapiens; identical to SEQ ID NO: 896326

SEQ ID NO: 1027562 - protein, 326 aa, Homo sapiens
DHERLFRYGSQKGPARAFRASAVALCGPLRRCCPWAPPCSQPTASESAHSSAPGARGRGSSPGPSCGPRGGNNEDVSFSRPADLDLIQSTPFKPLALKTPPRVLTLSERPLDFLDLERPPTTPQNEEIRAVGRLKRERSMSENAVRQNGQLVRNDSLWHRSDSAPRNKISRFQAPISAPEYTVTPSPQQARVCPPHMLPEDGANLSSARGILSLIQSSTRRAYQQILDVLDENRRPVLRGGSAAATSNPHHDNVRYGISNIDTTIEGTSDDLTVVDAASLRRQIIKLNRRLQLLEEENKERAKREMVMYSITVAFWLLNSWLWFRR

SEQ ID NO: 1027563 - protein, 228 aa, Homo sapiens; identical to SEQ ID NO: 1027544

SEQ ID NO: 1027564 - protein, 244 aa, Homo sapiens
MSKGTSSDTSLGRVSRAAFPSPTAAEMAEISRIQYEMEYTEGISQRMRVPEKLKVAPPNADLEQGFQEGVPNASVIMQVPERIVVAGNNEDVSFSRPADLDLIQSTPFKPLALKTPPRVLTLSERPLDFLDLERPPTTPQNEEIRAVGRLKRERSMSENAVRQNGQLVRNDSLYGISNIDTTIEGTSDDLTVVDAASLRRQIIKLNRRLQLLEEENKERAKREMVMYSITVAFWLLNSWLWFRR

SEQ ID NO: 1027565 - protein, 81 aa, Homo sapiens
DHERLFRYGSQKGPARAFRASAVALCGPLRRCCPWAPPCSQPTASESAHSSAPGARGRGSSPGPSCGPRGTKVALNPAHAH

SEQ ID NO: 1027566 - protein, 218 aa, Homo sapiens; identical to SEQ ID NO: 896326

SEQ ID NO: 1027567 - protein, 147 aa, Homo sapiens
RKSFQKELVMALLKMDCQGLVVRLIQDFVLLTTAVEVAQRWRELAEKLAKVSKQQMDAYESPHRDRNGVVDSEAMWKPAYDFLLTWSHQIGDSYRDVIQELHLGLDKMKNPITKRWKHLTGTLILVNSLDVLRAAAFSPADQDDFVI

SEQ ID NO: 1027568 - protein, 147 aa, Homo sapiens; identical to SEQ ID NO: 1027567

SEQ ID NO: 1027569 - protein, 147 aa, Homo sapiens; identical to SEQ ID NO: 1027567

SEQ ID NO: 1027570 - protein, 147 aa, Homo sapiens; identical to SEQ ID NO: 1027567

SEQ ID NO: 1027571 - protein, 172 aa, Homo sapiens
MADGGGGGSGGAGPASTRASGGGGPINPASLPPGDPQLIAIIVGQLKSRGLFDSFRRDCKADVDTKPAYQNLSQKADNFVSTHLDKQEWNPPANDNQLHDGLRQSVVQSGRSEAGVDRISSQVVDPKLNHIFRPQIEQIIHEFLVAQKEAAVPALPPEPEGQDPPAPSQDTS

SEQ ID NO: 1027572 - protein, 172 aa, Homo sapiens; identical to SEQ ID NO: 1027571

SEQ ID NO: 1027573 - protein, 172 aa, Homo sapiens; identical to SEQ ID NO: 1027571

SEQ ID NO: 1027574 - protein, 242 aa, Homo sapiens
  misc_feature (218)..(218): Xaa can be any naturally occurring amino acid
MSSLDPFCCNWLCCYHSLHPTAQNSKGCLNPAVNTQLGHFTSYLSFLSYKMGVAEVAFQCGVEGEMQEGTLSPQPRVLSSGKLTAPSPGLGFRIWAHVAVRLIKDSVQHLQTLTQSGADQHEAWNQTTVIHLQAAKVHCYYVTVKGFTEALEKLENEPAIQQVLKRLCDLHAIHGILTNSGDFLHDAFLSGAQVDMARTAYLDLLRLIRRMQPCNCCXDFNGQCFSTCCMRERYNAGPGLIG

SEQ ID NO: 1027575 - protein, 681 aa, Homo sapiens
MGSPVHRVSLGDTWSRQMHPDIESERYMQSFDVERLTNILDGGAQNTALRRKVESIIHSYPEFSCKDNYFMTQNERYKAAMRRAFHIRLIARRLGWLEDGRELGYAYRALSGDVALNIHRVFVRALRSLGSEEQIAKWDPLCKNIQIIATYAQTELGHGTYLQGLETEATYDAATQEFVIHSPTLTATKWWPGDLGRSATHALVQAQLICSGARRGMHAFIVPIRSLQDHTPLPGIIIGDIGPKMDFDQTDNGFLQLNHVRVPRENMLSRFAQVLPDGTYVKLGTAQSNYLPMVVVRVELLSGEILPILQKACVIAMRYSVIRRQSRLRPSDPEAKVLDYQTQQQKLFPQLAISYAFHFLAVSLLEFFQHSYTAILNQDFSFLPELHALSTGMKAMMSEFCTQGAEMCRRACGGHGYSKLSGLPSLVTKLSASCTYEGENTVLYLQVARFLVKSYLQTQMSPGSTPQRSLSPSVAYLTAPDLARCPAQRAADFLCPELYTTAWAHVAVRLIKDSVQHLQTLTQSGADQHEAWNQTTVIHLQAAKVHCYYVTVKGFTEALEKLENEPAIQQVLKRLCDLHAIHGILTNSGDFLHDAFLSGAQVDMARTAYLDLLRLIRKDAILLTDAFDFTDQCLNSALGCYDGNVYERLFQWAQKSPTNTQENPAYEEYIRPLLQSWRSKL

SEQ ID NO: 1027576 - protein, 729 aa, Homo sapiens
EREEGEELHKPRQGLESRQGLESRQGLESWPSSFSQLLCSSPSVGGEKGRTTSLPEAAAYSRGEASPAYSADTGQRGARFFALTNAESRPSEQPGWKCLSTVTRQIQDRMGSPVHRVSLGDTWSRQMHPDIESERYMQSFDVERLTNILDGGAQNTALRRKVDAMKQVGEKICRALSGDVALNIHRVFVRALRSLGSEEQIAKWDPLCNLQGLETEATYDAATQEFVIHSPTLTATKWWPGDLGRSATHALVQAQLICSGARRGMHAFIVPIRSLQDHTPLPGIIIGDIGPKMDFDQTDNGFLQLNHVRVPRENMLSRFAQVLPDGTYVKLGTAQSNYLPMVVVRVELLSGEILPILQKACVIAMRYSVIRRQSRLRPSDPEAKVLDYQTQQQKLFPQLAISYAFHFLAVSLLEFFQHSYTAILNQDFSFLPELHALSTGMKAMMSEFCTQGAEMCRRACGGHGYSKLSGLPSLVTKLSASCTYEGENTVLYLQVARFLVKSYLQTQMSPGSTPQRSLSPSVAYLTAPDLARCPAQRAADFLCPELYTTAWAHVAVRLIKDSVQHLQTLTQSGADQHEAWNQTTVIHLQAAKVHCYYVTVKGFTEALEKLENEPAIQQVLKRLCDLHAIHGILTNSGDFLHDAFLSGAQVDMARTAYLDLLRLIRKDAILLTDAFDFTDQCLNSALGCYDGNVYERLFQWAQKSPTNTQENPAYEEYIRPLLQSWRSKL

SEQ ID NO: 1027577 - protein, 593 aa, Homo sapiens
MTQNERYKAAMRRAFHIRLIARRLGWLEDGRELGYAYRALSGDVALNIHRVFVRALRSLGSEEQIAKWDPLCNLQGLETEATYDAATQEFVIHSPTLTATKWWPGDLGRSATHALVQAQLICSGARRGMHAFIVPIRSLQDHTPLPGIIIGDIGPKMDFDQTDNGFLQLNHVRVPRENMLSRFAQVLPDGTYVKLGTAQSNYLPMVVVRVELLSGEILPILQKACVIAMRYSVIRRQSRLRPSDPEAKVLDYQTQQQKLFPQLAISYAFHFLAVSLLEFFQHSYTAILNQDFSFLPELHALSTGMKAMMSEFCTQGAEMCRRACGGHGYSKLSGLPSLVTKLSASCTYEGENTVLYLQVARFLVKSYLQTQMSPGSTPQRSLSPSVAYLTAPDLARCPAQRAADFLCPELYTTAWAHVAVRLIKDSVQHLQTLTQSGADQHEAWNQTTVIHLQAAKVHCYYVTVKGFTEALEKLENEPAIQQVLKRLCDLHAIHGILTNSGDFLHDAFLSGAQVDMARTAYLDLLRLIRKDAILLTDAFDFTDQCLNSALGCYDGNVYERLFQWAQKSPTNTQENPAYEEYIRPLLQSWRSKL

SEQ ID NO: 1027578 - protein, 729 aa, Homo sapiens
EREEGEELHKPRQGLESRQGLESRQGLESWPSSFSQLLCSSPSVGGEKGRTTSLPEAAAYSRGEASPAYSADTGQRGARFFALTNAESRPSEQPGWKCLSTVTRQIQDRMGSPVHRVSLGDTWSRQMHPDIESERYMQSFDVERLTNILDGGAQNTALRRKVDPGSKWVRRFDLRSLGSEEQIAKWDPLCKNIQIIATYAQTELGHGTYLQGLETEATYDAATQEFVIHSPTLTATKWWPGDLGRSATHALVQAQLICSGARRGMHAFIVPIRSLQDHTPLPGIIIGDIGPKMDFDQTDNGFLQLNHVRVPRENMLSRFAQVLPDGTYVKLGTAQSNYLPMVVVRVELLSGEILPILQKACVIAMRYSVIRRQSRLRPSDPEAKVLDYQTQQQKLFPQLAISYAFHFLAVSLLEFFQHSYTAILNQDFSFLPELHALSTGMKAMMSEFCTQGAEMCRRACGGHGYSKLSGLPSLVTKLSASCTYEGENTVLYLQVARFLVKSYLQTQMSPGSTPQRSLSPSVAYLTAPDLARCPAQRAADFLCPELYTTAWAHVAVRLIKDSVQHLQTLTQSGADQHEAWNQTTVIHLQAAKVHCYYVTVKGFTEALEKLENEPAIQQVLKRLCDLHAIHGILTNSGDFLHDAFLSGAQVDMARTAYLDLLRLIRKDAILLTDAFDFTDQCLNSALGCYDGNVYERLFQWAQKSPTNTQENPAYEEYIRPLLQSWRSKL

SEQ ID NO: 1027579 - protein, 790 aa, Homo sapiens
EREEGEELHKPRQGLESRQGLESRQGLESWPSSFSQLLCSSPSVGGEKGRTTSLPEAAAYSRGEASPAYSADTGQRGARFFALTNAESRPSEQPGWKCLSTVTRQIQDRMGSPVHRVSLGDTWSRQMHPDIESERYMQSFDVERLTNILDGGAQNTALRRKVESIIHSYPEFSCKDNYFMTQNERYKAAMRRAFHIRLIARRLGWLEDGRELGYAYRALSGDVALNIHRVFVRALRSLGSEEQIAKWDPLCKNIQIIATYAQTELGHGTYLQGLETEATYDAATQEFVIHSPTLTATKWWPGDLGRSATHALVQAQLICSGARRGMHAFIVPIRSLQDHTPLPGIIIGDIGPKMDFDQTDNGFLQLNHVRVPRENMLSRFAQVLPDGTYVKLGTAQSNYLPMVVVRVELLSGEILPILQKACVIAMRYSVIRRQSRLRPSDPEAKVLDYQTQQQKLFPQLAISYAFHFLAVSLLEFFQHSYTAILNQDFSFLPELHALSTGMKAMMSEFCTQGAEMCRRACGGHGYSKLSGLPSLVTKLSASCTYEGENTVLYLQVARFLVKSYLQTQMSPGSTPQRSLSPSVAYLTAPDLARCPAQRAADFLCPELYTTAWAHVAVRLIKDSVQHLQTLTQSGADQHEAWNQTTVIHLQAAKVHCYYVTVKGFTEALEKLENEPAIQQVLKRLCDLHAIHGILTNSGDFLHDAFLSGAQVDMARTAYLDLLRLIRKDAILLTDAFDFTDQCLNSALGCYDGNVYERLFQWAQKSPTNTQENPAYEEYIRPLLQSWRSKL

SEQ ID NO: 1027580 - protein, 301 aa, Homo sapiens
DLRAELGMSRCSVSGAQGWSLWWRPPNTAQPPSMFSQLHALSTGMKAMMSEFCTQGAEMCRRACGGHGYSKLSGLPSLVTKLSASCTYEGENTVLYLQVARFLVKSYLQTQMSPGSTPQRSLSPSVAYLTAPDLARCPAQRAADFLCPELYTTAWAHVAVRLIKDSVQHLQTLTQSGADQHEAWNQTTVIHLQAAKVHCYYVTVKGFTEALEKLENEPAIQQVLKRLCDLHAIHGILTNSGDFLHDAFLSGAQVDMARTAYLDLLRLIREIRCKAIQAKEMGKVDSVNLRIKEMEGCHPVN

SEQ ID NO: 1027581 - protein, 98 aa, Homo sapiens
WEGGVTQYHCWAIGIYICRVFFCLDPPCAGFLQTFSLARLCTRLKRVSESIDRPLLAGRSYTSDYTVKPAPPYYWVTGKCNLSGPSFPMQTGVLPLKS

SEQ ID NO: 1027582 - protein, 333 aa, Homo sapiens
DLRAELGMSRCSVSGAQGWSLWWRPPNTAQPPSMFSQLHALSTGMKAMMSEFCTQGAEMCRRACGGHGYSKLSGLPSLVTKLSASCTYEGENTVLYLQVARFLVKSYLQTQMSPGSTPQRSLSPSVAYLTAPDLARCPAQRAADFLCPELYTTAWAHVAVRLIKDSVQHLQTLTQSGADQHEAWNQTTVIHLQAAKVHCYYVTVKGFTEALEKLENEPAIQQVLKRLCDLHAIHGILTNSGDFLHDAFLSGAQVDMARTAYLDLLRLIRKDAILLTDAFDFTDQCLNSALGCYDGNVYERLFQWAQKSPTNTQENPAYEEYIRPLLQSWRSKL

SEQ ID NO: 1027583 - protein, 801 aa, Homo sapiens
EREEGEELHKPRQGLESRQGLESRQGLESWPSSFSQLLCSSPSVGGEKGRTTSLPEAAAYSRGEASPAYSADTGQRGARFFALTNAESRPSEQPGWKCLSTVTRQIQDRMGSPVHRVSLGDTWSRQMHPDIESERYMQSFDVERLTNILDGGAQNTALRRKVDPGSKWVRRFEGARNLTQVPKPSVLLSSAESIIHSYPEFSCKDNYFMTQNERYKAAMRRAFHIRLIARRLGWLEDGRELGYAYRALSGDVALNIHRVFVRALRSLGSEEQIAKWDPLCNLQGLETEATYDAATQEFVIHSPTLTATKWWPGDLGRSATHALVQAQLICSGARRGMHAFIVPIRSLQDHTPLPGIIIGDIGPKMDFDQTDNGFLQLNHVRVPRENMLSRFAQVLPDGTYVKLGTAQSNYLPMVVVRVELLSGEILPILQKACVIAMRYSVIRRQSRLRPSDPEAKVLDYQTQQQKLFPQLAISYAFHFLAVSLLEFFQHSYTAILNQDFSFLPELHALSTGMKAMMSEFCTQGAEMCRRACGGHGYSKLSGLPSLVTKLSASCTYEGENTVLYLQVARFLVKSYLQTQMSPGSTPQRSLSPSVAYLTAPDLARCPAQRAADFLCPELYTTAWAHVAVRLIKDSVQHLQTLTQSGADQHEAWNQTTVIHLQAAKVHCYYVTVKGFTEALEKLENEPAIQQVLKRLCDLHAIHGILTNSGDFLHDAFLSGAQVDMARTAYLDLLRLIRKDAILLTDAFDFTDQCLNSALGCYDGNVYERLFQWAQKSPTNTQENPAYEEYIRPLLQSWRSKL

SEQ ID NO: 1027584 - protein, 370 aa, Homo sapiens
MGKVDTTGSDLNLLVLFLFSDPEAKVLDYQTQQQKLFPQLAISYAFHFLAVSLLEFFQHSYTAILNQDFSFLPELHALSTGMKAMMSEFCTQGAEMCRRACGGHGYSKLSGLPSLVTKLSASCTYEGENTVLYLQVARFLVKSYLQTQMSPGSTPQRSLSPSVAYLTAPDLARCPAQRAADFLCPELYTTAWAHVAVRLIKDSVQHLQTLTQSGADQHEAWNQTTVIHLQAAKVHCYYVTVKGFTEALEKLENEPAIQQVLKRLCDLHAIHGILTNSGDFLHDAFLSGAQVDMARTAYLDLLRLIRKDAILLTDAFDFTDQCLNSALGCYDGNVYERLFQWAQKSPTNTQENPAYEEYIRPLLQSWRSKL

SEQ ID NO: 1027585 - protein, 758 aa, Homo sapiens
EREEGEELHKPRQGLESRQGLESRQGLESWPSSFSQLLCSSPSVGGEKGRTTSLPEAAAYSRGEASPAYSADTGQRGARFFALTNAESRPSEQPGWKCLSTVTRQIQDRMGSPVHRVSLGDTWSRQMHPDIESERYMQSFDVERLTNILDGGAQNTALRRKVESIIHSYPEFSCKDNYFMTQNERYKAAMRRAFHIRLIARRLGWLEDGRELGYAYRALSGDVALNIHRVFVRALRSLGSEEQIAKWDPLCKNIQIIATYAQTELGHGTYLQGLETEATYDAATQEFVIHSPTLTATKWWPGDLGRSATHALVQAQLICSGARRGMHAFIVPIRSLQDHTPLPGIIIGDIGPKMDFDQTDNGFLQLNHVRVPRENMLSRFAQVLPDGTYVKLGTAQSNYLPMVVVRVELLSGEILPILQKACVIAMRYSVIRRQSRLRPSDPEAKVLDYQTQQQKLFPQLAISYAFHFLAVSLLEFFQHSYTAILNQDFSFLPELHALSTGMKAMMSEFCTQGAEMCRRACGGHGYSKLSGLPSLVTKLSASCTYEGENTVLYLQVARFLVKSYLQTQMSPGSTPQRSLSPSVAYLTAPDLARCPAQRAADFLCPELYTTAWAHVAVRLIKDSVQHLQTLTQSGADQHEAWNQTTVIHLQAAKVHCYYVTVKGFTEALEKLENEPAIQQVLKRLCDLHAIHGILTNSGDFLHDAFLSGAQVDMARTAYLDLLRLIREIRCKAIQAKEMGKVDSVNLRIKEMEGCHPVN

SEQ ID NO: 1027586 - protein, 681 aa, Homo sapiens; identical to SEQ ID NO: 1027575

SEQ ID NO: 1027587 - protein, 227 aa, Homo sapiens
  misc_feature (15)..(15): Xaa can be any naturally occurring amino acid
  misc_feature (29)..(29): Xaa can be any naturally occurring amino acid
  misc_feature (35)..(36): Xaa can be any naturally occurring amino acid
  misc_feature (39)..(39): Xaa can be any naturally occurring amino acid
  misc_feature (59)..(59): Xaa can be any naturally occurring amino acid
  misc_feature (61)..(61): Xaa can be any naturally occurring amino acid
  misc_feature (65)..(65): Xaa can be any naturally occurring amino acid
  misc_feature (68)..(68): Xaa can be any naturally occurring amino acid
  misc_feature (74)..(74): Xaa can be any naturally occurring amino acid
  misc_feature (93)..(93): Xaa can be any naturally occurring amino acid
  misc_feature (104)..(105): Xaa can be any naturally occurring amino acid
  misc_feature (112)..(112): Xaa can be any naturally occurring amino acid
  misc_feature (153)..(153): Xaa can be any naturally occurring amino acid
  misc_feature (189)..(189): Xaa can be any naturally occurring amino acid
  misc_feature (202)..(202): Xaa can be any naturally occurring amino acid
TVLVELTPDIHICGXCKQQFNNLDAFVAXKQSGCXXKGXSAAAPSTVQFVSEETVPATXTXPASXLIXSETQTXPVSAPEFVFAHGYQTSLPXESNETQTATVXXLPAQSRXKTPTTPPAQKRLNCCYPGCQFKTAYGMKDMGRHLKIHTGDXPHKCEVCGKCFSRKDKLKTHMRCHTGVKPCPVEAVXLRRRPHSSSLHKXLGIHSDERPFKCQICLLRHPSNINH

SEQ ID NO: 1027588 - protein, 244 aa, Homo sapiens
VLAVLTDRNYTVTGEEPHVQLYITPLPAPPRHPSFQPRLTSSKPTASSGDPPRPTTAVTPQATSGLPPTATLRSTATKPTVTQATTTATASTCQPSHDVHSSVHNTDHNDTTNPSHIRDKPHAAKIDQSGTARNNGHPDDRPTSNPSKHHRPNHPTARTTHEAHMPQRPLKQERLLNTQHPKAQTSHTLRLRRGVPSLPQGPVTATSFHATTTYPTPAHPETTLPTSRSTFLHLLGDPSTHVGE

SEQ ID NO: 1027589 - protein, 670 aa, Homo sapiens
MEEFRRSYSRLCRESGAEPQEAVLQQLHQLPRGRLDLATQSLTVETCRALGKLLPRETLCTELVLSDCMLSEEGATLLLRGLCANTVLRFLDLKGNNLRAAGAEALGKLLQQNKSIQSLTLEWNSLGTWDDAFATFCGGLAANGALQRLDLRNNQISHKGAEELALALKGNTTLQQLDLRWNNVGLLGGRALMNCLPSNRTLWRLDLAGNNIPGDVLRAVEQAMGHSQDRLTTFQENQARTHVLSKEVQHLREEKSKQFLDLMETIDKQREEMAKSSRASAARVGQLQEALNERHSIINALKAKLQMTEAALALSEQKAQDLGELLATAEQEQLSLSQRQAKELKLEQQEAAERESKLLRDLSAANEKNLLLQNQVDELERKFRCQQEQLFQTRQEMTSMSAELKMRAIQAEERLDMEKRRCRQSLEDSESLRIKEVEHMTRHLEESEKAMQERVQRLEAARLSLEEELSRVKAAALSERGQAEEELIKAKSQARLEEQQRLAHLEDKLRLLAQARDEAQGACLQQKQVVAEAQTRVSQLGLQVEGLRRRLEELQQELSLKDQERVAEVSRVRVELQEQNGRLQAELAAQEALREKAAALERQLKVMASDHREALLDRESENASLREKLRLREAEIARIRDEEAQRASFLQNAVLAYVQASPVRTLSPPK

SEQ ID NO: 1027590 - protein, 695 aa, Homo sapiens
MEEFRRSYSRLCRESGAEPQEAVLQQLHQLPRGRLDLATQSLTVETCRALGKLLPRETLCTELVLSDCMLSEEGATLLLRGLCANTVLRFLDLKGNNLRAAGAEALGKLLQQNKSIQSLTLEWNSLGTWDDAFATFCGGLAANGALQRLDLRNNQISHKGAEELALALKGNTTLQQLDLRWNNVGLLGGRALMNCLPSNRTLWRLDLAGNNIPGDVLRAVEQAMGHSQDRLTTFQENQARTHVLSKEVQHLREEKSKQFLDLMETIDKQREEMAKSSRASAARVGQLQEALNERHSIINALKAKLQMTEAALALSEQKAQDLGELLATAEQEQLSLSQRQAKELKLEQQEAAERESKLLRDLSAANEKNLLLQNQVDELERKFRCQQEQLFQTRQEMTSMSAELKMRAIQAEERLDMEKRRCRQSLEDSESLRIKEGGEIREEKVGRPALHSGPTIPAPEQVEHMTRHLEESEKAMQERVQRLEAARLSLEEELSRVKAAALSERGQAEEELIKAKSQARLEEQQRLAHLEDKLRLLAQARDEAQGACLQQKQVVAEAQTRVSQLGLQVEGLRRRLEELQQELSLKDQERVAEVSRVRVELQEQNGRLQAELAAQEALREKAAALERQLKVMASDHREALLDRESENASLREKLRLREAEIARIRDEEAQRASFLQNAVLAYVQASPVRTLSPPK

SEQ ID NO: 1027591 - protein, 478 aa, Homo sapiens [sequence omitted]

SEQ ID NO: 1027592 - protein, 649 aa, Homo sapiens
MTSQRDLLASANPDHRDSCPFLGLGSCPEKGPTGQGLAGQQGQRVTAGPPYTGATLLLRGLCANTVLRFLDLKGNNLRAAGAEALGKLLQQNKSIQSLTLEWNSLGTWDDAFATFCGGLAANGALQRLDLRNNQISHKGAEELALALKGNTTLQQLDLRWNNVGLLGGRALMNCLPSNRTLWRLDLAGNNIPGDVLRAVEQAMGHSQDRLTTFQENQARTHVLSKEVQHLREEKSKQFLDLMETIDKQREEMAKSSRASAARVGQLQEALNERHSIINALKAKLQMTEAALALSEQKAQDLGELLATAEQEQLSLSQRQAKELKLEQQEAAERESKLLRDLSAANEKNLLLQNQVDELERKFRCQQEQLFQTRQEMTSMSAELKMRAIQAEERLDMEKRRCRQSLEDSESLRIKEVEHMTRHLEESEKAMQERVQRLEAARLSLEEELSRVKAAALSERGQAEEELIKAKSQARLEEQQRLAHLEDKLRLLAQARDEAQGACLQQKQVVAEAQTRVSQLGLQVEGLRRRLEELQQELSLKDQERVAEVSRVRVELQEQNGRLQAELAAQEALREKAAALERQLKVMASDHREALLDRESENASLREKLRLREAEIARIRDEEAQRASFLQNAVLAYVQASPVRTLSPPK

SEQ ID NO: 1027593 - protein, 373 aa, Homo sapiens
EEMAKSSRASAARVGQLQEALNERPPSPVPGAGTAPHRAAPFQQLREHAEEALPAPRVMEEFRRSYSRLCRESGAEPQEAVLQQLHQLPRGRLFQTRQEMTSMSAELKMRAIQAEERLDMEKRRCRQSLEDSESLRIKEVEHMTRHLEESEKAMQERVQRLEAARLSLEEELSRVKAAALSERGQAEEELIKAKSQARLEEQQRLAHLEDKLRLLAQARDEAQGACLQQKQVVAEAQTRVSQLGLQVEGLRRRLEELQQELSLKDQERVAEVSRVRVELQEQNGRLQAELAAQEALREKAAALERQLKVMASDHREALLDRESENASLREKLRLREAEIARIRDEEAQRASFLQNAVLAYVQASPVRTLSPPK

SEQ ID NO: 1027594 - protein, 218 aa, Homo sapiens
EACNQDALQEAGTFRHTLWKRVQGAVTPLLASMISFIDRDGNLELLTRPDTPPWARDLWMFIFSDTMLLNIPLVMNNERHKGEMAYIVVQNHMNLSENASNNVPFSWKIKDYLEELWVQAQYITDAEGLPKKFVDIFQQTPLGRFLAQLHGEPQQELLQCYLKDFILLTMRVSTEEELKFLQMALWSCTRKLKAASEAPEEEVSLPWVHLPTIVGPAR

SEQ ID NO: 1027595 - protein, 205 aa, Homo sapiens
MLRTHLADASHILDNESLGRKPGTQVYMQQQPGPLVGRWEGHRSATPCCPSPQTLDAFAAMACTEMLTRNTLKPSPQAWLQLVKNLSMPLELICSDEHMQGSGSLAQAVIREVRAQWSRIFSTALFVEHVLLGTESRVPELQGLVTEHVFLLDKCLRENSDVKTHGPFEAVMRTLCECKETASKTLSRFGIQPCSICLGDAKDPV

SEQ ID NO: 1027596 - protein, 1511 aa, Homo sapiens
DLEDPMRDASINVPFSWKIKDYLEELWVQAQYITDAEGLPKKFVDIFQQTPLGRFLAQLHGEPQQELLQCYLKDFILLTMRVSTEEELKFLQMALWSCTRKLKAASEAPEEEVSLPWVHLAYQRFRSRLQNFSRILTIYPQVLHSLMEARWNHELAGCEMTLDAFAAMACTEMLTRNTLKPSPQAWLQLVKNLSMPLELICSDEHMQGSGSLAQAVIREVRAQWSRIFSTALFVEHVLLGTESRVPELQGLVTEHVFLLDKCLRENSDVKTHGPFEAVMRTLCECKETASKTLSRFGIQPCSICLGDAKDPVCLPCDHVHCLRCLRAWFASEQMICPYCLTALPDEFSPAVSQAHREAIEKHARFRQMCNSFFVDLVSTICFKDNAPPEKEVIESLLSLLFVQKGRLRDAAQRHCEHTKSLSPFNDVVDKTPVIRSVILKLLLKYSFHDVKDYIQEYLTLLKKKAFITEDKTELYMLFINCLEDSILEKTSAYSRNDELNHLEEEGRFLKAYSPASRGREPANEASVEYLQEVARIRLCLDRAADFLSEPEGGPEMAKEKQCYLQQVKQFCIRVENDWHRVYLVRKLSSQRGMEFVQGLSKPGRPHQWVFPKDVVKQQGLRQDHPGQMDRYLVYGDEYKALRDAVAKAVLECKPLGIKTALKACKTPQSQQSAYFLLTLFREVAILYRSHNASLHPTPEQCEAVSKFIGECKILSPPDISRFATSLVDNSVPLLRAGPSDSNLDGTVTEMAIHAAAVLLCGQNELLEPLKNLAFSPATMAHAFLPTMPEDLLAQARRWKGLERVHWYTCPNGHPCSVGECGRPMEQSICIDCHAPIGGIDHKPRDGFHLVKDKADRTQTGHVLGNPQRRDVVTCDRGLPPVVFLLIRLLTHLALLLGASQSSQALINIIKPPVRDPKGFLQQHILKDLEQLAKMLGHSADETIGVVHLVLRRLLQEQHQLSSRRLLNFDTELSTKEMRNNWEKEIAAVISPELEHLDKTLPTMNNLISQDKRISSNPVAKIIYGDPVTFLPHLPRKSVVHCSKIWSCRKRITVEYLQHIVEQKNGKERVPILWHFLQKEAELRLVKFLPEILALQRDLVKQFQNVQQVEYSSIRGFLSKHSSDGLRQLLHNRITVFLSTWNKLRRSLETNGEINLPKDYCSTDLDLDTEFEILLPRRRGLGLCATALVSYLIRLHNEIVYAVEKLSKENNSYSVDAAEVTELHVISYEVERDLTPLILSNCQYQVEEGRETVQEFDLEKIQRQIVSRFLQGKPRLSLKGIPTLVYRHDWNYEHLFMDIKNKMAQDSLPSSVISAISGQLQSYSDACEVLSVVEVTLGFLSTAGGDPNMQLNVYTQDILQMGDQTIHVLKALNRCQLKHTIALWQFLSAHKSEQLLRLHKEPFGEISSRYKADLSPENAKLLSTFLNQTGLDAFLLELHEMIILKLKNPQTQTEERFRPQWSLRDTLVSYMQTKESEILPEMASQFPEEILLASCVSVWKTAAVLKWNREMR

SEQ ID NO: 1027597 - protein, 1601 aa, Homo sapiens
EACNQDALQEAGTFRHTLWKRVQGAVTPLLASMISFIDRDGNLELLTRPDTPPWARDLWMFIFSDTMLLNIPLVMNNERHKGEMAYIVVQNHMNLSENASNNVPFSWKIKDYLEELWVQAQYITDAEGLPKKFVDIFQQTPLGRFLAQLHGEPQQELLQCYLKDFILLTMRVSTEEELKFLQMALWSCTRKLKAASEAPEEEVSLPWVHLAYQRFRSRLQNFSRILTIYPQVLHSLMEARWNHELAGCEMTLDAFAAMACTEMLTRNTLKPSPQAWLQLVKNLSMPLELICSDEHMQGSGSLAQAVIREVRAQWSRIFSTALFVEHVLLGTESRVPELQGLVTEHVFLLDKCLRENSDVKTHGPFEAVMRTLCECKETASKTLSRFGIQPCSICLGDAKDPVCLPCDHVHCLRCLRAWFASEQMICPYCLTALPDEFSPAVSQAHREAIEKHARFRQMCNSFFVDLVSTICFKDNAPPEKEVIESLLSLLFVQKGRLRDAAQRHCEHTKSLSPFNDVVDKTPVIRSVILKLLLKYSFHDVKDYIQEYLTLLKKKAFITEDKTELYMLFINCLEDSILEKTSAYSRNDELNHLEEEGRFLKAYSPASRGREPANEASVEYLQEVARIRLCLDRAADFLSEPEGGPEMAKEKQCYLQQVKQFCIRVENDWHRVYLVRKLSSQRGMEFVQGLSKPGRPHQWVFPKDVVKQQGLRQDHPGQMDRYLVYGDEYKALRDAVAKAVLECKPLGIKTALKACKTPQSQQSAYFLLTLFREVAILYRSHNASLHPTPEQCEAVSKFIGECKILSPPDISRFATSLVDNSVPLLRAGPSDSNLDGTVTEMAIHAAAVLLCGQNELLEPLKNLAFSPATMAHAFLPTMPEDLLAQARRWKGLERVHWYTCPNGHPCSVGECGRPMEQSICIDCHAPIGGIDHKPRDGFHLVKDKADRTQTGHVLGNPQRRDVVTCDRGLPPVVFLLIRLLTHLALLLGASQSSQALINIIKPPVRDPKGFLQQHILKDLEQLAKMLGHSADETIGVVHLVLRRLLQEQHQLSSRRLLNFDTELSTKEMRNNWEKEIAAVISPELEHLDKTLPTMNNLISQDKRISSNPVAKIIYGDPVTFLPHLPRKSVVHCSKIWSCRKRITVEYLQHIVEQKNGKERVPILWHFLQKEAELRLVKFLPEILALQRDLVKQFQNVQQVEYSSIRGFLSKHSSDGLRQLLHNRITVFLSTWNKLRRSLETNGEINLPKDYCSTDLDLDTEFEILLPRRRGLGLCATALVSYLIRLHNEIVYAVEKLSKENNSYSVDAAEVTELHVISYEVERDLTPLILSNCQYQVEEGRETVQEFDLEKIQRQIVSRFLQGKPRLSLKGIPTLVYRHDWNYEHLFMDIKNKMAQDSLPSSVISAISGQLQSYSDACEVLSVVEVTLGFLSTAGGDPNMQLNVYTQDILQMGDQTIHVLKALNRCQLKHTIALWQFLSAHKSEQLLRLHKEPFGEISSRYKADLSPENAKLLSTFLNQTGLDAFLLELHEMIILKLKNPQTQTEERFRPQWSLRDTLVSYMQTKESEILPEMASQFPEEILLASCVSVWKTAAVLKWNREMR

SEQ ID NO: 1027598 - protein, 557 aa, Homo sapiens
MTRKSAPTSGLLNFDTELSTKEMRNNWEKEIAAVISPELEHLDKTLPTMNNLISQDKRISSNPVAKIIYGDPVTFLPHLPRKSVVHCSKIWSCRKRITVEYLQHIVEQKNGKERVPILWHFLQKEAELRLVKFLPEILALQRDLVKQFQNVQQVEYSSIRGFLSKHSSDGLRQLLHNRITVFLSTWNKLRRSLETNGEINLPKDYCSTDLDLDTEFEILLPRRRGLGLCATALVSYLIRLHNEIVYAVEKLSKENNSYSVDAAEVTELHVISYEVERDLTPLILSNCQYQVEEGRETVQEFDLEKIQRQIVSRFLQGKPRLSLKGIPTLVYRHDWNYEHLFMDIKNKMAQDSLPSSVISAISGQLQSYSDACEVLSVVEVTLGFLSTAGGDPNMQLNVYTQDILQMGDQTIHVLKALNRCQLKHTIALWQFLSAHKSEQLLRLHKEPFGEISSRYKADLSPENAKLLSTFLNQTGLDAFLLELHEMIILKLKNPQTQTEERFRPQWSLRDTLVSYMQTKESEILPEMASQFPEEILLASCVSVWKTAAVLKWNREMR

SEQ ID NO: 1027599 - protein, 462 aa, Homo sapiens
SDLRILITCIVEQKNGKERVPILWHFLQKEAELRLVKFLPEILALQRDLVKQFQNVQQVEYSSIRGFLSKHSSDGLRQLLHNRITVFLSTWNKLRRSLETNGEINLPKDYCSTDLDLDTEFEILLPRRRGLGLCATALVSYLIRLHNEIVYAVEKLSKENNSYSVDAAEVTELHVISYEVERDLTPLILSNCQYQVEEGRETVQEFDLEKIQRQIVSRFLQGKPRLSLKGIPTLVYRHDWNYEHLFMDIKNKMAQDSLPSSVISAISGQLQSYSDACEVLSVVEVTLGFLSTAGGDPNMQLNVYTQDILQMGDQTIHVLKALNRCQLKHTIALWQFLSAHKSEQLLRLHKEPFGEISSRYKADLSPENAKLLSTFLNQTGLDAFLLELHEMIILKLKNPQTQTEERFRPQWSLRDTLVSYMQTKESEILPEMASQFPEEILLASCVSVWKTAAVLKWNREMR

SEQ ID NO: 1027600 - protein, 1229 aa, Homo sapiens
DLEDPMRDASINVPFSWKIKDYLEELWVQAQYITDAEGLPKKFVDIFQQTPLGRFLAQLHGEPQQELLQCYLKDFILLTMRVSTEEELKFLQMALWSCTRKLKAASEAPEEEVSLPWVHLAYQRFRSRLQNFSRILTIYPQVLHSLMEARWNHELAGCEMTLDAFAAMACTEMLTRNTLKPSPQAWLQLVKNLSMPLELICSDEHMQGSGSLAQAVIREVRAQWSRIFSTALFVEHVLLGTESRVPELQGLVTEHVFLLDKCLRENSDVKTHGPFEAVMRTLCECKETASKTLSRFGIQPCSICLGDAKDPVCLPCDHVHCLRCLRAWFASEQMICPYCLTALPDEFSPAVSQAHREAIEKHARFRQMCNSFFVDLVSTICFKDNAPPEKEVIESLLSLLFVQKGRLRDAAQRHCEHTKSLSPFNDVVDKTPVIRSVILKLLLKYSFHDVKDYIQEYLTLLKKKAFITEDKTELYMLFINCLEDSILEKTSAYSRNDELNHLEEEGRFLKAYSPASRGREPANEASVEYLQEVARIRLCLDRAADFLSEPEGGPEMAKEKQCYLQQVKQFCIRVENDWHRVYLVRKLSSQRGMEFVQGLSKPGRPHQWVFPKDVVKQQGLRQDHPGQMDRYLVYGDEYKALRDAVAKAVLECKPLGIKTALKACKTPQSQQSAYFLLTLFREVAILYRSHNASLHPTPEQCEAVSKFIGECKILSPPDISRFATSLVDNSVPLLRAGPSDSNLDGTVTEMAIHAAAVLLCGQNELLEPLKNLAFSPATMAHAFLPTMPEDLLAQARRWKGLERVHWYTCPNGHPCSVGECGRPMEQSICIDCHAPIGGIDHKPRDGFHLVKDKADRTQTGHVLGNPQRRDVVTCDRGLAPSGLPPYPATHSLGSASGLGLCATALVSYLIRLHNEIVYAVEKLSKENNSYSVDAAEVTELHVISYEVERDLTPLILSNCQYQVEEGRETVQEFDLEKIQRQIVSRFLQGKPRLSLKGIPTLVYRHDWNYEHLFMDIKNKMAQDSLPSSVISAISGQLQSYSDACEVLSVVEVTLGFLSTAGGDPNMQLNVYTQDILQMGDQTIHVLKALNRCQLKHTIALWQFLSAHKSEQLLRLHKEPFGEISSRYKADLSPENAKLLSTFLNQTGLDAFLLELHEMIILKLKNPQTQTEERFRPQWSLRDTLVSYMQTKESEILPEMASQFPEEILLASCVSVWKTAAVLKWNREMR

SEQ ID NO: 1027601 - protein, 1511 aa, Homo sapiens; identical to SEQ ID NO: 1027596

SEQ ID NO: 1027602 - protein, 224 aa, Homo sapiens [sequence omitted]

SEQ ID NO: 1027603 - protein, 125 aa, Homo sapiens
TSARYPEKMPQTKEPFGEISSRYKADLSPENAKLLSTFLNQTGLDAFLLELHEMIILKLKNPQTQTEERFRPQWSLRDTLVSYMQTKESEILPEMASQFPEEILLASCVSVWKTAAVLKWNREMR

SEQ ID NO: 1027604 - protein, 1511 aa, Homo sapiens; identical to SEQ ID NO: 1027596

SEQ ID NO: 1027605 - protein, 1511 aa, Homo sapiens; identical to SEQ ID NO: 1027596

SEQ ID NO: 1027606 - protein, 1511 aa, Homo sapiens; identical to SEQ ID NO: 1027596

SEQ ID NO: 1027607 - protein, 1511 aa, Homo sapiens; identical to SEQ ID NO: 1027596

SEQ ID NO: 1027608 - protein, 1374 aa, Homo sapiens
DLEDPMRDASINVPFSWKIKDYLEELWVQAQYITDAEGLPKKFVDIFQQTPLGRFLAQLHGEPQQELLQCYLKDFILLTMRVSTEEELKFLQMALWSCTRKLKAASEAPEEEVSLPWVHLAYQRFRSRLQNFSRILTIYPQVLHSLMEARWNHELAGCEMTLDAFAAMACTEMLTRNTLKPSPQAWLQLVKNLSMPLELICSDEHMQGSGSLAQAVIREVRAQWSRIFSTALFVEHVLLGTESRVPELQGLVTEHVFLLDKCLRENSDVKTHGPFEAVMRTLCECKETASKTLSRFGIQPCSICLGDAKDPVCLPCDHVHCLRCLRAWFASEQMICPYCLTALPDEFSPAVSQAHREAIEKHARFRQMCNSFFVDLVSTICFKDNAPPEKEVIESLLSLLFVQKGRLRDAAQRHCEHTKSLSPFNDVVDKTPVIRSVILKLLLKYSFHDVKDYIQEYLTLLKKKAFITEDKTELYMLFINCLEDSILEKTSAYSRNDELNHLEEEGRFLKAYSPASRGREPANEASVEYLQEVARIRLCLDRAADFLSEPEGGPEMAKEKQCYLQQVKQFCIRVENDWHRVYLVRKLSSQRGMEFVQGLSKPGRPHQWVFPKDVVKQQGLRQDHPGQMDRYLVYGDEYKALRDAVAKAVLECKPLGIKTALKACKTPQSQQSAYFLLTLFREVAILYRSHNASLHPTPEQCEAVSKFIGECKILSPPDISRFATSLVDNSVPLLRAGPSDSNLDGTVTEMAIHAAAVLLCGQNELLEPLKNLAFSPATMAHAFLPTMPEDLLAQARRWKGLERVHWYTCPNGHPCSVGECGRPMEQSICIDCHAPIGGIDHKPRDGFHLVKDKADRTQTGHVLGNPQRRDVVTCDRGLPPVVFLLIRLLTHLALLLGASQSSQALINIIKPPVRDPKGFLQQHILKDLEQLAKMLGHSADETIGVVHLVLRRLLQEQHQLSSRRLLNFDTELSTKEMRNNWEKEIAAVISPELEHLDKTLPTMNNLISQDKRISSNPVAKIIYGDPVTFLPHLPRKSVVHCSKIWSCRKRITVEYLQHIVEQKNGKERVPILWHFLQKEAELRLVKFLPEILALQRDLVKQFQNVQQVEYSSIRGFLSKHSSDGLRQLLHNRITVFLSTWNKLRRSLETNGEINLPKDYCSTDLDLDTEFEILLPRRRGLGLCATALVSYLIRLHNEIVYAVEKLSKENNSYSVDAAEVTELHVISYEVERDLTPLILSNCQYQVEEGRETVQEFDLEKIQRQIVSRFLQGKPRLSLKGTHREKTVSREGDAWGWKKEALCLPRGWKELLLFPPFTPAWLRPAVFGSVCTQVFSEHIWGVFSSEVSPVGHSPTMLGARVIHTERGQKEGSSRVT

SEQ ID NO: 1027609 - protein, 268 aa, Homo sapiens
DLEDPMRDASINVPFSWKIKDYLEELWVQAQYITDAEGLPKKFVDIFQQTPLGRFLAQLHGEPQQELLQCYLKDFILLTMRVSTEEELKFLQMALWSCTRKLKAASEAPEEEVSLPWVHLAYQRFRSRLQNFSRILTIYPQVLHSLMEARWNHELAGCEMTLDAFAAMACTEMLTRNTLKPSPQAWLQLVKNLSMPLELICSDEHMQGSGSLAQAVIREVRAQWSRIFSTALFVEHVLLGTESRVPELQGLVTEHVFLLDKGLPGLVE

SEQ ID NO: 1027610 - protein, 146 aa, Homo sapiens
TLQDPARGVINLPKDYCSTDLDLDTEFEILLPRRRGLGLCATALVSYLIRLHNEIVYAVEKLSKENNSYSVDAAEVTELHVISYEVERDLTPLILSNCQYQVEEGRETVQEFDLEKIQRQIVSRFLQGKPRLSLKGTNEPATSHPT

SEQ ID NO: 1027611 - protein, 1344 aa, Homo sapiens
MACTEMLTRNTLKPSPQAWLQLVKNLSMPLELICSDEHMQGSGSLAQAVIREVRAQWSRIFSTALFVEHVLLGTESRVPELQGLVTEHVFLLDKCLRENSDVKTHGPFEAVMRTLCECKETASKTLSRFGIQPCSICLGDAKDPVCLPCDHVHCLRCLRAWFASEQMICPYCLTALPDEFSPAVSQAHREAIEKHARFRQMCNSFFVDLVSTICFKDNAPPEKEVIESLLSLLFVQKGRLRDAAQRHCEHTKSLSPFNDVVDKTPVIRSVILKLLLKYSFHDVKDYIQEYLTLLKKKAFITEDKTELYMLFINCLEDSILEKTSAYSRNDELNHLEEEGRFLKAYSPASRGREPANEASVEYLQEVARIRLCLDRAADFLSEPEGGPEMAKEKQCYLQQVKQFCIRVENDWHRVYLVRKLSSQRGMEFVQGLSKPGRPHQWVFPKDVVKQQGLRQDHPGQMDRYLVYGDEYKALRDAVAKAVLECKPLGIKTALKACKTPQSQQSAYFLLTLFREVAILYRSHNASLHPTPEQCEAVSKFIGECKILSPPDISRFATSLVDNSVPLLRAGPSDSNLDGTVTEMAIHAAAVLLCGQNELLEPLKNLAFSPATMAHAFLPTMPEDLLAQARRWKGLERVHWYTCPNGHPCSVGECGRPMEQSICIDCHAPIGGIDHKPRDGFHLVKDKADRTQTGHVLGNPQRRDVVTCDRGLPPVVFLLIRLLTHLALLLGASQSSQALINIIKPPVRDPKGFLQQHILKDLEQLAKMLGHSADETIGVVHLVLRRLLQEQHQLSSRRLLNFDTELSTKEMRNNWEKEIAAVISPELEHLDKTLPTMNNLISQDKRISSNPVAKIIYGDPVTFLPHLPRKSVVHCSKIWSCRKRITVEYLQHIVEQKNGKERVPILWHFLQKEAELRLVKFLPEILALQRDLVKQFQNVQQVEYSSIRGFLSKHSSDGLRQLLHNRITVFLSTWNKLRRSLETNGEINLPKDYCSTDLDLDTEFEILLPRRRGLGLCATALVSYLIRLHNEIVYAVEKLSKENNSYSVDAAEVTELHVISYEVERDLTPLILSNCQYQVEEGRETVQEFDLEKIQRQIVSRFLQGKPRLSLKGIPTLVYRHDWNYEHLFMDIKNKMAQDSLPSSVISAISGQLQSYSDACEVLSVVEVTLGFLSTAGGDPNMQLNVYTQDILQMGDQTIHVLKALNRCQLKHTIALWQFLSAHKSEQLLRLHKEPFGEISSRYKADLSPENAKLLSTFLNQTGLDAFLLELHEMIILKLKNPQTQTEERFRPQWSLRDTLVSYMQTKESEILPEMASQFPEEILLASCVSVWKTAAVLKWNREMR

SEQ ID NO: 1027612 - protein, 1673 aa, Homo sapiens
DLEDPMRDASINVPFSWKIKDYLEELWVQAQYITDAEGLPKKFVDIFQQTPLGRFLAQLHGEPQQELLQCYLKDFILLTMRVSTEEELKFLQMALWSCTRKLKAASEAPEEEVSLPWVHLAYQRFRSRLQNFSRILTIYPQVLHSLMEARWNHELAGCEMTLDAFAAMACTEMLTRNTLKPSPQAWLQLVKNLSMPLELICSDEHMQGSGSLAQAVIREVRAQWSRIFSTALFVEHVLLGTESRVPELQGLVTEHVFLLDKCLRENSDVKTHGPFEAVMRTLCECKETASKTLSRFGIQPCSICLGDAKDPVCLPCDHVHCLRCLRAWFASEQMICPYCLTALPDEFSPAVSQAHREAIEKHARFRQMCNSFFVDLVSTICFKDNAPPEKEVIESLLSLLFVQKGRLRDAAQRHCEHTKSLSPFNDVVDKTPVIRSVILKLLLKYSFHDVKDYIQEYLTLLKKKAFITEDKTELYMLFINCLEDSILEKTSAYSRNDELNHLEEEGRFLKAYSPASRGREPANEASVEYLQEVARIRLCLDRAADFLSEPEGGPEMAKEKQCYLQQVKQFCIRVENDWHRVYLVRKLSSQRGMEFVQGLSKPGRPHQWVFPKDVVKQQGLRQDHPGQMDRYLVYGDEYKALRDAVAKAVLECKPLGIKTALKACKTPQSQQSAYFLLTLFREVAILYRSHNASLHPTPEQCEAVSKFIGECKILSPPDISRFATSLVDNSVPLLRAGPSDSNLDGTVTEMAIHAAAVLLCGQNELLEPLKNLAFSPATMAHAFLPTMPEDLLAQARRWKGLERVHWYTCPNGHPCSVGECGRPMEQSICIDCHAPIGGIDHKPRDGFHLVKDKADRTQTGHVLGNPQRRDVVTCDRGLPPVVFLLIRLLTHLALLLGASQSSQALINIIKPPVRDPKGFLQQHILKDLEQLAKMLGHSADETIGVVHLVLRRLLQEQHQLSSRRLLNFDTELSTKEMRNNWEKEIAAVISPELEHLDKTLPTMNNLISQDKRISSNPVAKIIYGDPVTFLPHLPRKSVVHCSKIWSCRKRITVEYLQHIVEQKNGKERVPILWHFLQKEAELRLVKFLPEILALQRDLVKQFQNVQQVEYSSIRGFLSKHSSDGLRQLLHNRITVFLSTWNKLRRSLETNGEINLPKDYCSTDLDLDTEFEILLPRRRGLGLCATALVSYLIRLHNEIVYAVEKLSKENNSYSVDAAEVTELHVISYEVERDLTPLILSNCQYQVEEGRETVQEFDLEKIQRQIVSRFLQGKPRLSLKGIPTLVYRHDWNYEHLFMDIKNKMAQVIPINLILCTGLSAFSVCFPPCLAYSSLAPGVCCEPTVSAASLTESKQDSKSASFLVEEKQIDISVGLILRNDVDAMAMPAEAGSPWNRFVPALRMRVLIGRPVCLHGLQELPAHRAPKCQLLESWPPACGLGSEGARLSYQVVEMPETQPTDIPLLLFISQDSLPSSVISAISGQLQSYSDACEVLSVVEVTLGFLSTAGGDPNMQLNVYTQDILQMGDQTIHVLKALNRCQLKHTIALWQFLSAHKSEQLLRLHKEPFGEISSRYKADLSPENAKLLSTFLNQTGLDAFLLELHEMIILKLKNPQTQTEERFRPQWSLRDTLVSYMQTKESEILPEMASQFPEEILLASCVSVWKTAAVLKWNREMR

SEQ ID NO: 1027613 - protein, 443 aa, Homo sapiens
MVTGWSSLLQEAELRLVKFLPEILALQRDLVKQFQNVQQVEYSSIRGFLSKHSSDGLRQLLHNRITVFLSTWNKLRRSLETNGEINLPKDYCSTDLDLDTEFEILLPRRRGLGLCATALVSYLIRLHNEIVYAVEKLSKENNSYSVDAAEVTELHVISYEVERDLTPLILSNCQYQVEEGRETVQEFDLEKIQRQIVSRFLQGKPRLSLKGIPTLVYRHDWNYEHLFMDIKNKMAQDSLPSSVISAISGQLQSYSDACEVLSVVEVTLGFLSTAGGDPNMQLNVYTQDILQMGDQTIHVLKALNRCQLKHTIALWQFLSAHKSEQLLRLHKEPFGEISSRYKADLSPENAKLLSTFLNQTGLDAFLLELHEMIILKLKNPQTQTEERFRPQWSLRDTLVSYMQTKESEILPEMASQFPEEILLASCVSVWKTAAVLKWNREMR

SEQ ID NO: 1027614 - protein, 258 aa, Homo sapiens
MFDLEKIQRQIVSRFLQGKPRLSLKGIPTLVYRHDWNYEHLFMDIKNKMAQDSLPSSVISAISGQLQSYSDACEVLSVVEVTLGFLSTAGGDPNMQLNVYTQDILQMGDQTIHVLKALNRCQLKHTIALWQFLSAHKSEQLLRLHKEPFGEISSRYKADLSPENAKLLSTFLNQTGLDAFLLELHEMIILKLKNPQTQTEERFRPQWSLRDTLVSYMQTKESEILPEMASQFPEEILLASCVSVWKTAAVLKWNREMR

SEQ ID NO: 1027615 - protein, 1511 aa, Homo sapiens; identical to SEQ ID NO: 1027596

SEQ ID NO: 1027616 - protein, 1511 aa, Homo sapiens; identical to SEQ ID NO: 1027596

SEQ ID NO: 1027617 - protein, 1511 aa, Homo sapiens; identical to SEQ ID NO: 1027596

SEQ ID NO: 1027618 - protein, 1511 aa, Homo sapiens; identical to SEQ ID NO: 1027596

SEQ ID NO: 1027619 - protein, 1483 aa, Homo sapiens
DLEDPMRDASINVPFSWKIKDYLEELWVQAQYITDAEGLPKKFVDIFQQTPLGRFLAQLHGEPQQELLQCYLKDFILLTMRVSTEEELKFLQMALWSCTRKLKAASEAPEEEVSLPWVHLAYQRFRSRLQNFSRILTIYPQVLHSLMEARWNHELAGCEMTLDAFAAMACTEMLTRNTLKPSPQAWLQLVKNLSMPLELICSDEHMQGSGSLAQAVIREVRAQWSRIFSTALFVEHVLLGTESRVPELQGLVTEHVFLLDKCLRENSDVKTHGPFEAVMRTLCECKETASKTLSRFGIQPCSICLGDAKDPVCLPCDHVHCLRCLRAWFASEQMICPYCLTALPDEFSPAVSQAHREAIEKHARFRQMCNSFFVDLVSTICFKDNAPPEKEVIESLLSLLFVQKGRLRDAAQRHCEHTKSLSPFNDVVDKTPVIRSVILKLLLKYSFHDVKDYIQEYLTLLKKKAFITEDKTELYMLFINCLEDSILEKTSAYSRNDELNHLEEEGRFLKAYSPASRGREPANEASVEYLQEVARIRLCLDRAADFLSEPEGGPEMAKEKQCYLQQVKQFCIRVENDWHRVYLVRKLSSQRGMEFVQGLSKPGRPHQWVFPKDVVKQQGLRQDHPGQMDRYLVYGDEYKALRDAVAKAVLECKPLGIKTALKACKTPQSQQSAYFLLTLFREVAILYRSHNASLHPTPEQCEAVSKFIGECKILSPPDISRFATSLVDNSVPLLRAGPSDSNLDGTVTEMAIHAAAVLLCGQNELLEPLKNLAFSPATMAHAFLPTMPEDLLAQARRWKGLERVHWYTCPNGHPCSVGECGRPMEQSICIDCHAPIGGIDHKPRDGFHLVKDKADRTQTGHVLGNPQRRDVVTCDRGLPPVVFLLIRLLTHLALLLGASQSSQALINIIKPPVRDPKGFLQQHILKDLEQLAKMLGHSADETIGVVHLVLRRLLQEQHQLSSRRLLNFDTELSTKEMRNNWEKEIAAVISPELEHLDKTLPTMNNLISQDKRISSNPVAKIIYGDPVTFLPHLPRKSVVHCSKIWSCRKRITVEYLQHIVEQKNGKERVPILWHFLQKEAELRLVKFLPEILALQRDLVKQFQNVQQVEYSSIRGFLSKHSSDGLRQLLHNRITVFLSTWNKLRRSLETNGEINLPKDYCSTDLDLDTEFEILLPRRRGLGLCATALVSYLIRLHNEIVYAVEKLSKENNSYSVDAAEVTELHVISYEVERDLTPLILSNCQYQVEEGRETVQEFDLEKIQRQIVSRFLQGKPRLSLKGIPTLVYRHDWNYEHLFMDIKNKMAQDSLPSSVISAISGQLQSYSDACEVLSVVEVTLGFLSTAGGDPNMQLNVYTQDILQMGDQTIHVLKALNRCQLKHTIALWQFLSAHKSEQLLRLHKEPFGEISSRYKADLSPENAKLLSTFLNQTGLDAFLLELHEMIILKLKNPQTQTEERFRPQWRYGFAHLWGGADTMLCCLSCDLL

SEQ ID NO: 1027620 - protein, 312 aa, Homo sapiens
DLEDPMRDASINVPFSWKIKDYLEELWVQAQYITDAEGLPKKFVDIFQQTPLGRFLAQLHGEPQQELLQCYLKDFILLTMRVSTEEELKFLQMALWSCTRKLKAASEAPEEEVSLPWVHLAYQRFRSRLQNFSRILTIYPQVLHSLMEARWNHELAGCEMTLDAFAAMACTEMLTRNTLKPSPQAWLQLVKNLSMPLELICSDEHMQGSGSLAQAVIREVRAQWSRIFSTALFVEHVLLGTESRVPELQGLVTEHVFLLDKCLRENSDVKTHGPFEAVMRTLCECKETASKTLSRFGIQPCSICLGDAKDPV

SEQ ID NO: 1027621 - protein, 270 aa, Homo sapiens
IHLARLGMHVIIAGNNDSKAKQVVSKIKEETLNDKVEFLYCDLASMTSIRQFVQKFKMKKIPLHVLINNAGVMMVPQRKTRDGFEEHFGLNYLGHFLLTNLLLDTLKESGSPGHSARVVTVSSATHYVAELNMDDLQSSACYSPHAAYAQSKLALVLFTYHLQRLLAAEGSHVTANVVDPGVVNTDLYKHVFWATRLAKKLLGWLLFKTPDEGAWTSIYAAVTPELEGVGGRYLYNEKETKSLHVTYNQKLQQQLWSKSCEMTGVLDVTL

SEQ ID NO: 1027622 - protein, 270 aa, Homo sapiens; identical to SEQ ID NO: 1027621

SEQ ID NO: 1027623 - protein, 270 aa, Homo sapiens; identical to SEQ ID NO: 1027621

SEQ ID NO: 1027624 - protein, 259 aa, Homo sapiens
DNWALWNHFFVFRRDCQASPTPWNLEFLYCDLASMTSIRQFVQKFKMKKIPLHVLINNAGVMMVPQRKTRDGFEEHFGLNYLGHFLLTNLLLDTLKESGSPGHSARVVTVSSATHYVAELNMDDLQSSACYSPHAAYAQSKLALVLFTYHLQRLLAAEGSHVTANVVDPGVVNTDLYKHVFWATRLAKKLLGWLLFKTPDEGAWTSIYAAVTPELEGVGGRYLYNEKETKSLHVTYNQKLQQQLWSKSCEMTGVLDVTL

SEQ ID NO: 1027625 - protein, 270 aa, Homo sapiens; identical to SEQ ID NO: 1027621

SEQ ID NO: 1027626 - protein, 440 aa, Homo sapiens [sequence omitted]

SEQ ID NO: 1027627 - protein, 240 aa, Homo sapiens
MGQLRQENELLQNKLHNAVQMKQKDKQNISQLEKKLKAEQEARSFVEKQLMEEKKRKKLEEATAARAVAFAAASRGECTETLRNRIRELEAEGKKLTMDMKVKEDQIRELELKVQELRKYKENEKDTEVLMSALSAMQDKTQHLENSLSAETRIKLDLFSALGDAKRQLEIAQGQILQKDQEIKDLKQKIAEVMAVMPSITYSAATSPLSPVSPHYSSKFVETSPSGLDPNASVYQPLKK

SEQ ID NO: 1027628 - protein, 583 aa, Homo sapiens
ASTNVWVQYVWHTEWGVCLPTVSLWILFVYIEAAIRFKDLKNFHVDLCRPFAAHCIGYPVVTLGFGFKSYVSYKMRLRKQKEVQKENEFYMQLLQQALPPEQQMLQKQEKEAEEAAKGLPDMDSSILIHHNGGIPANKKLSTTLPEIEYREKGKEKDKDAKKHNLGINNNNILQPVDSKIQEIEYMENHINSKRLNNDLVGSTENLLKEDSCTASSKNYKNASGVVNSSPRSHSATNGSIPSSSSKNEKKQKCTSKSPSTHKDLMENCIPNNQLSKPDALVRLEQDIKKLKADLQASRQVEQELRSQISSLSSTERGIRSEMGQLRQENELLQNKLHNAVQMKQKDKQNISQLEKKLKAEQEARSFVEKQLMEEKKRKKLEEATAARAVAFAAASRGECTETLRNRIRELEAEGKKLTMDMKVKEDQIRELELKVQAESIDIDAKNYLVALAVDDDGEELRKYKENEKDTEVLMSALSAMQDKTQHLENSLSAETRIKLDLFSALGDAKRQLEIAQGQILQKDQEIKDLKQKIAEVMAVMPSITYSAATSPLSPVSPHYSSKFVETSPSGLDPNASVYQPLKK

SEQ ID NO: 1027629 - protein, 544 aa, Homo sapiens
ASTNVWVQYVWHTEWGVCLPTVSLWILFVYIEAAIRFKDLKNFHVDLCRPFAAHCIGYPVVTLGFGFKSYVSYKMRLRKQKEVQKENEFYMQLLQQALPPEQQMLQKQEKEAEEAAKGLPDMDSSILIHHNGGIPANKKLSTTLPEIEYREKGKEKDKDAKKHNLGINNNNILQPVDSKIQEIEYMENHINSKRLNNDLVGSTENLLKEDSCTASSKNYKNASGVVNSSPRSHSATNGSIPSSSSKNEKKQKCTSKSPSTHKDLMENCIPNNQLSKPDALVRLEQDIKKLKADLQASRQVEQELRSQISSLSSTERGIRSEMGQLRQENELLQNKLHNAVQMKQKDKQNISQLEKKLKAEQEARSFVEKQLMEEKKRKKLEEATAARAVAFAAASRGECTETLRNRIRELEAEGKKLTMDMKVKEDQIRELELKVPALSAMQDKTQHLENSLSAETRIKLDLFSALGDAKRQLEIAQGQILQKDQEIKDLKQKIAEVMAVMPSITYSAATSPLSPVSPHYSSKFVETSPSGLDPNASVYQPLKK

SEQ ID NO: 1027630 - protein, 561 aa, Homo sapiens
ASTNVWVQYVWHTEWGVCLPTVSLWILFVYIEAAIRFKDLKNFHVDLCRPFAAHCIGYPVVTLGFGFKSYVSYKMRLRKQKEVQKENEFYMQLLQQALPPEQQMLQKQEKEAEEAAKGLPDMDSSILIHHNGGIPANKKLSTTLPEIEYREKGKEKDKDAKKHNLGINNNNILQPVDSKIQEIEYMENHINSKRLNNDLVGSTENLLKEDSCTASSKNYKNASGVVNSSPRSHSATNGSIPSSSSKNEKKQKCTSKSPSTHKDLMENCIPNNQLSKPDALVRLEQDIKKLKADLQASRQVEQELRSQISSLSSTERGIRSEMGQLRQENELLQNKLHNAVQMKQKDKQNISQLEKKLKAEQEARSFVEKQLMEEKKRKKLEEATAARAVAFAAASRGECTETLRNRIRELEAEGKKLTMDMKVKEDQIRELELKVQELRKYKENEKDTEVLMSALSAMQDKTQHLENSLSAETRIKLDLFSALGDAKRQLEIAQGQILQKDQEIKDLKQKIAEVMAVMPSITYSAATSPLSPVSPHYSSKFVETSPSGLDPNASVYQPLKK

SEQ ID NO: 1027631 - protein, 440 aa, Homo sapiens [sequence omitted]

SEQ ID NO: 1027632 - protein, 561 aa, Homo sapiens; identical to SEQ ID NO: 1027630

SEQ ID NO: 1027633 - protein, 124 aa, Homo sapiens [sequence omitted]

SEQ ID NO: 1027634 - protein, 465 aa, Homo sapiens
TRMDDSVTPIDNRPRLIKKDVNYTQIVVDRTQALDGTVYDVMFVSTDRGALHKAISLEHAVHIIEETQLFQDFEPVQTLLLSSKKGNRFVYAGSNSGVVQAPLAFCGKHGTCEDCVLARDPYCAWSPPTATCVALHQTESPSRGLIQEMSGDASVCPDKSKGSYRQHFFKHGGTAELKCSQKSNLARVFWKFQNGVLKAESPKYGLMGRKNLLIFNLSEGDSGVYQCLSEERVKNKTVFQVVAKHVLEVKVVPKPVVAPTLSVVQTEGSRIATKVLVASTQGSSPPTPAVQATSSGAITLPPKPAPTGTSCEPKIVINTVPQLHSEKTMYLKSSDNRLLMSLFLFFFVLFLCLFFYNCYKGYLPRQCLKFRSALLIGKKKPKSDFCDREQSLKETLVEPGSFSQQNGEHPKPALDTGYETEQDTITSKVPTDREDSQRIDDLSARDKPFDVKCELKFADSDADGD

SEQ ID NO: 1027635 - protein, 572 aa, Homo sapiens
MFCITISSSFACRPFGIPVMLGLCWIQTLTRGSPPTGAHILARGTRLGFEVVCFSLWLQPLLTYSEAGKMTGSARLMHPLLQGGDLEVGTEQPPHWLRETRAEKRFAGGQAPVGAQTGERGIWTYGPVSPDIARGFCRKVTDLPCLPLVLSTSPPYCNVPCRYTLAASHTLVQKQRPCSWMPACLMLVLLCQGNRFVYAGSNSGVVQAPLAFCGKHGTCEDCVLARDPYCAWSPPTATCVALHQTESPSRGLIQEMSGDASVCPDKSKGSYRQHFFKHGGTAELKCSQKSNLARVFWKFQNGVLKAESPKYGLMGRKNLLIFNLSEGDSGVYQCLSEERVKNKTVFQVVAKHVLEVKVVPKPVVAPTLSVVQTEGSRIATKVLVASTQGSSPPTPAVQATSSGAITLPPKPAPTGTSCEPKIVINTVPQLHSEKTMYLKSSDNRLLMSLFLFFFVLFLCLFFYNCYKGYLPRQCLKFRSALLIGKKKPKSDFCDREQSLKETLVEPGSFSQQNGEHPKPALDTGYETEQDTITSKVPTDREDSQRIDDLSARDKPFDVKCELKFADSDADGD

SEQ ID NO: 1027636 - protein, 572 aa, Homo sapiens; identical to SEQ ID NO: 1027635

SEQ ID NO: 1027637 - protein, 572 aa, Homo sapiens; identical to SEQ ID NO: 1027635

SEQ ID NO: 1027638 - protein, 572 aa, Homo sapiens; identical to SEQ ID NO: 1027635

SEQ ID NO: 1027639 - protein, 352 aa, Homo sapiens
ESPSRYGAGCAAWGCPPCVWVNNTCRLFCRGLIQEMSGDASVCPDKSKGSYRQHFFKHGGTAELKCSQKSNLARVFWKFQNGVLKAESPKYGLMGRKNLLIFNLSEGDSGVYQCLSEERVKNKTVFQVVAKHVLEVKVVPKPVVAPTLSVVQTEGSRIATKVLVASTQGSSPPTPAVQATSSGAITLPPKPAPTGTSCEPKIVINTVPQLHSEKTMYLKSSDNRLLMSLFLFFFVLFLCLFFYNCYKGYLPRQCLKFRSALLIGKKKPKSDFCDREQSLKETLVEPGSFSQQNGEHPKPALDTGYETEQDTITSKVPTDREDSQRIDDLSARDKPFDVKCELKFADSDADGD

SEQ ID NO: 1027640 - protein, 572 aa, Homo sapiens; identical to SEQ ID NO: 1027635

SEQ ID NO: 1027641 - protein, 241 aa, Homo sapiens
  misc_feature (230)..(230): Xaa can be any naturally occurring amino acid
  misc_feature (233)..(233): Xaa can be any naturally occurring amino acid
MRGDRGRGRGGRFGSRGGPGGGFRPFVPHIPFDFYLCEMAFPRVKPAPDETSFSEALLKRNQDLAPNSAEQASILSLVTKINNVIDNLIVAPGTFEVQIEEVRQVGSYKKGTMTTGHNVADLVVILKILPTLEAVAALGNKVVESLRAQDPSEVLTMLTNETGFEISSSDATVKILITTVPPNLRKLDPELHLDIKVLQSALAAIRHARWFEENASQSTVKVLIRLLERXPEXNSVFPWAF

SEQ ID NO: 1027642 - protein, 187 aa, Homo sapiens
MRGDRGRGRGGRFGSRGGPGGGFRPFVPHIPFDFYLCEMAFPRVKPAPDETSFSEALLKRNQDLAPNSAEQASILSLVTKINNVIDNLIVAPGTFEVQIEEVRQVGSYKKGTMTTGHNVADLVVILKILPTLEAVAALGNKVVESLRAQDPSEVLHLLLILYLVAIGTRSCNCKYTFNKIRSDQMEE

SEQ ID NO: 1027643 - protein, 300 aa, Homo sapiens
MRGDRGRGRGGRFGSRGGPGGGFRPFVPHIPFDFYLCEMAFPRVKPAPDETSFSEALLKRNQDLAPNSAEQASILSLVTKINNVIDNLIVAPGTFEVQIEEVRQVGSYKILPTLEAVAALGNKVVESLRAQDPSEVLTMLTNETGFEISSSDATVKILITTVPPNLRKLDPELHLDIKVLQSALAAIRHARWFEENASQSTVKVLIRLLKDLRDPFPGFEPSHPGSLTNRPLCCDEQPHRSLWPLERCIKALHCMIRGMQDWYPAKVQVAYALTSCDEWELYEYTQVIDPRTAAMDSAVR

SEQ ID NO: 1027644 - protein, 274 aa, Homo sapiens
MDDNLLLSDEALLKRNQDLAPNSAEQASILSLVTKINNVIDNLIVAPGTFEVQIEEVRQVGSYKKGTMTTGHNVADLVVILKILPTLEAVAALGNKVVESLRAQDPSEVFTMLTQGNGFEISSSDATVKILITTVPPNLRKLDPELHLDIKVLQSALAAIRHARWFEENASQSTVKVLIRLLKDLRDPFPGFEPSHPGSLTNRPLCCDEQPHRSLWPLERCDTVRMHCMIRGMQDWYPAKVQVAYALTSCDEWELYEYTQVIDPRTAAMDSAVR

SEQ ID NO: 1027645 - protein, 318 aa, Homo sapiens
MRGDRGRGRGGRFGSRGGPGGGFRPFVPHIPFDFYLCEMAFPRVKPAPDETSFSEALLKRNQDLAPNSAEQASILSLVTKINNVIDNLIVAPGTFEVQIEEVRQVGSYKKGTMTTGHNVADLVVILKILPTLEAVAALGNKVVESLRAQDPSEVLTMLTNETGFEISSSDATVKILITTVPPNLRKLDPELHLDIKVLQSALAAIRHARWFEENASQSTVKVLIRLLKDLRDPFPGFEPSHPGSLTNRPLCCDEQPHRSLWPLERCIKALHCMIRGMQDWYPAKVQVAYALTSCDEWELYEYTQVIDPRTAAMDSAVR

SEQ ID NO: 1027646 - protein, 160 aa, Homo sapiens
TGSESSSVPGLLGSRGGPGGGFRPFVPHIPFDFYLCEMAFPRVKPAPDETSFSEALLKRNQDLAPNSAEQASILSLVTKINNVIDNLIVAPGTFEVQIEEVRQVGSYKKGTMTTGHNVADLVVILKILPTLEAVAALGNKVVESLRAQDPSEVLTKQPWY

SEQ ID NO: 1027647 - protein, 153 aa, Homo sapiens
MRGDRGRGRGGRFGSRGGPGGGFRPFVPHIPFDFYLCEMAFPRVKPAPDETSFSEALLKRNQDLAPNSAEQASILSLVTKINNVIDNLIVAPGTFEVQIEEVRQVGSYKKGTMTTGHNVADLVVILKILPTLEAVAALGNKVKQASGNSYHYY

SEQ ID NO: 1027648 - protein, 1798 aa, Homo sapiens
MELTSRERGRGQPLPWELRLGLLLSVLAATLAQAPAPDVPGCSRGSCYPATGDLLVGRADRLTASSTCGLNGPQPYCIVSHLQDEKKCFLCDSRRPFSARDNPHSHRIQNVVTSFAPQRRAAWWQSENGIPAVTIQLDLEAEFHFTHLIMTFKTFRPAAMLVERSADFGRTWHVYRYFSYDCGADFPGVPLAPPRHWDDVVCESRYSEIEPSTEGEVIYRVLDPAIPIPDPYSSRIQNLLKITNLRVNLTRLHTLGDNLLDPRREIREKYYYALYELVVRGNCFCYGHASECAPAPGAPAHAEGMVHGACICKHNTRGLNCEQCQDFYRDLPWRPAEDGHSHACRKCECHGHTHSCHFDMAVYLASGNVSGGVCDGCQHNTAGRHCELCRPFFYRDPTKDLRDPAVCRSCDCDPMGSQDGGRCDSHDDPALGLVSGQCRCKEHVVGTRCQQCRDGFFGLSISDRLGCRRCQCNARGTVPGSTPCDPNSGSCYCKRLVTGRGCDRCLPGHWGLSHDLLGCRPCDCDVGGALDPQCDEGTGQCHCRQHMVGRRCEQVQPGYFRPFLDHLIWEAEDTRGQVLDVVERLVTPGETPSWTGSGFVRLQEGQTLEFLVASVPKAMDYDLLLRLEPQVPEQWAELELIVQRPGPVPAHSLCGHLVPKDDRIQGTLQPHARYLIFPNPVCLEPGISYKLHLKLVRTGGSAQPETPYSGPGLLIDSLVLLPRVLVLEMFSGGDAAALERQATFERYQCHEEGLVPSKTSPSEACAPLLISLSTLIYNGALPCQCNPQGSLSSECNPHGGQCLCKPGVVGRRCDLCAPGYYGFGPTGCQACQCSHEGALSSLCEKTSGQCLCRTGAFGLRCDRCQRGQWGFPSCRPCVCNGHADECNTHTGACLGCRDHTGGEHCERCIAGFHGDPRLPYGGQCRPCPCPEGPGSQRHFATSCHQDEYSQQIVCHCRAGYTGLRCEACAPGHFGDPSRPGGRCQLCECSGNIDPMDPDACDPHTGQCLRCLHHTEGPHCAHCKPGFHGQAARQSCHRCTCNLLGTNPQQCPSPDQCHCDPSSGQCPCLPNVQGPSCDRCAPNFWNLTSGHGCQPCACHPSRARGPTCNEFTGQCHCRAGFGGRTCSECQELHWGDPGLQCHACDCDSRGIDTPQCHRFTGHCSCRPGVSGVRCDQCARAFSGIFPACHPCHACFGDWDRVVQDLAARTQRLEQRAQELQQTGVLGAFESSFWHMQEKLGIVQGIVGARNTSAASTAQLVEATEELRREIGEATEHLTQLEADLTDVQDENFNANHALSGLERDRLALNLTLRQLDQHLDLLKHSNFLGAYDSIRHAHSQSAEAERRANTSALAVPSPVSNSASARHRTEALMDAQKEDFNSKHMANQRALGKLSAHTHTLSLTDINELVCGAPGDAPCATSPCGGAGCRDEDGQPRCGGLSCNGAAATADLALGRARHTQAELQRALAEGGSILSRVAETRRQASEAQQRAQAALDKANASRGQVEQANQELQELIQSVKDFLNQEGADPDSIEMVATRVLELSIPASAEQIQHLAGAIAERVRSLADVDAILARTVGDVRRAEQLLQDARRARSWAEDEKQKAETVQAALEEAQRAQGIAQGAIRGAVADTRDTEQTLYQVQERMAGAERALSSAGERARQLDALLEALKLKRAGNSLAASTAEETAGSAQGRAQEAEQLLRGPLGDQYQTVKALAERKAQGVLAAQARAEQLRDEARDLLQAAQDKLQRLQELEGTYEENERALESKAAQLDGLEARMRSVLQAINLQVQIYNTCQ

SEQ ID NO: 1027649 - protein, 1798 aa, Homo sapiens
MELTSTERGRGQPLPWELRLPLLLSVLAATLAQAPAPDVPGCSRGSCYPATADLLVGRADRLTASSTCGLNGRQPYCIVSHLQDEKKCFLCDSRRPFSARDNPHTHRIQNVVTSFAPQRRAAWWQSQNGIPAVTIQLDLEAEFHFTHLIMTFKTFRPAAMLVERSADFGRTWHVYRYFSYHCGADFPGVPLAPPRHWDDVVCESRYSEIEPSTEGEVIYRVLDPAIPIPDPYSSRIQNLLKITNLRVNLTRLHTLGDNLLDPRREIREKYYYALYELVVRGNCFCYGHASECAPAPGAPAHAEGMVHGACICKHNTRGLNCEQCQDFYRDLPWRPAEDGHSHACRKCDRHGHTHSCHFDMAVYLGSGNVSGGVCDGCQHNTAWRHCELCRPFFYRDPTKDLRDPAVCRSCDCDPMGSQDGGRCDSHDDPALGLVSGQCRCKEHVVGTRCQQCRDGFFGLSISDPSGCRRCQCNARGTVPGSTPCDPNSGSCYCKRLVTGRGCDRCLPGHWGLSLDLLGCRPCDCDVGGALDPQCDEGTGQCHCRQHMVGRRCEQVQPGYFRPFLDHLIWEAENTRGQVLDVVERLVTPGETPSWTGSGFVRLQEGQTLEFLVASVPNAMDYDLLLRLEPQVPEQWAELELIVQRPGPVPAHSLCGHLVPRDDRIQGTLQPHARYLIFPNPVCLEPGISYKLHLKLVRTGGSAQPETPYSGPGLLIDSLVLLPRVLVLEMFSGGDAAALERQATFERYQCHEEGLVPSKTSPSEACAPLLISLSTLIYNGALPCQCNPQGSLSSECNPHGGQCLCKPGVVGRRCDTCAPGYYGFGPTGCQACQCSPRGALSSLCERTSGQCLCRTGAFGLRCDACQRGQWGFPSCRPCVCNGHADECNTHTGACLGCRDLTGGEHCERCIAGFHGDPRLPYGAQCRPCPCPEGPGSQRHFATSCHQDEYSQQIVCHCRAGYTGLRCEACAPGQFGDPSRPGGRCQLCECSGNIDPMDPDACDPHPGQCLRCLHHTEGPHCAHSKPGFHGQAARQSCHRCTCNLLGTNPQQCPSPDQCHCDPSSGQCPCLPNVQALAVDRCAPNFWNLTSGHGCQPCACLPSPEEGPTCNEFTGQCHCLCGFGGRTCSECQELHWGDPGLQCHACDCDSRGIDTPQCHRFTGHCTCRPGVSGVRCDQCARGFSGIFPACHPCHACFGDWDRVVQDLAARTQRLEQRAQELQQTGVLGAFESSFWHMQEKLGIVQGIVGARNTSAASTAQLVEATEELRREIGEATEHLTQLEADLTDVQDENFNANHALSGLERDRLALNLTLRQLDQHLDLLKHSNFLGAYDSIRHAHSQSAEAERRANTSALAVPSPVSNSASARHRTEALMDAQKEDFNSKHMANQRALGKLSAHTHTLSLTDINELVCGAQGLHHDRTSPCGGAGCRDEDGQPRCGGLSCNGAAATADLALGRARHTQAELQRALAEGGSILSRVAETRRQASEAQQRAQAALDKANASRGQVEQANQELQELIQSVKDFLNQEGADPDSIEMVATRVLELSIPASAEQIQHLAGAIAERVRSLADVDAILARTVGDVRRAEQLLQDARRARSWAEDEKQKAETVQAALEEAQRAQGIAQGAIRGAVADTRDTEQTLYQVQERMAGAERALSSAGERARQLDALLEALKLKRAGNSLAASTAEETAGSAQGRAQEAEQLLRGPLGDQYQTVKALAERKAQGVLAAQARAEQLPDEARDLLQAAQDKLQRLQELEGTYEENERALESKAAQLDGLEARMRSVLQAINLQVQIYNTCQ

SEQ ID NO: 1027650 - protein, 170 aa, Homo sapiens
CAACFKPSTCRCRSTTPASDPCPRAVADTRDTEQTLYQVQERMAGAERALSSAGERARQLDALLEALKLKRAGNSLAASTAEETAGSAQGRAQEAEQLLRGPLGDQYQTVKALAERKAQGVLAAQARAEQLRDEARDLLQAAQDKLQRLQELEGTYEATAQQASALPGHR

SEQ ID NO: 1027651 - protein, 1267 aa, Homo sapiens
MRSSLGTGQCHCRQHMVGRRCEQVQPGYFRPFLDHLIWEAEDTRGQVLDVVERLVTPGETPSWTGSGFVRLQEGQTLEFLVASVPKAMDYDLLLRLEPQVPEQWAELELIVQRPGPVPAHSLCGHLVPKDDRIQGTLQPHARYLIFPNPVCLEPGISYKLHLKLVRTGGSAQPETPYSGPGLLIDSLVLLPRVLVLEMFSGGDAAALERQATFERYQCHEEGLVPSKTSPSEACAPLLISLSTLIYNGALPCQCNPQGSLSSECNPHGGQCLCKPGVVGRRCDLCAPGYYGFGPTGCQACQCSHEGALSSLCEKTSGQCLCRTGAFGLRCDRCQRGQWGFPSCRPCVCNGHADECNTHTGACLGCRDHTGGEHCERCIAGFHGDPRLPYGGQCRPCPCPEGPGSQRHFATSCHQDEYSQQIVCHCRAGYTGLRCEACAPGHFGDPSRPGGRCQLCECSGNIDPMDPDACDPHTGQCLRCLHHTEGPHCAHCKPGFHGQAARQSCHRCTCNLLGTNPQQCPSPDQCHCDPSSGQCPCLPNVQGPSCDRCAPNFWNLTSGHGCQPCACHPSRARGPTCNEFTGQCHCRAGFGGRTCSECQELHWGDPGLQCHACDCDSRGIDTPQCHRFTGHCSCRPGVSGVRCDQCARGFSGIFPACHPCHACFGDWDRVVQDLAARTQRLEQRAQELQQTGVLGAFESSFWHMQEKLGIVQGIVGARNTSAASTAQLVEATEELRREIGEATEHLTQLEADLTDVQDENFNANHALSGLERDRLALNLTLRQLDQHLDLLKHSNFLGAYDSIRHAHSQSAEAERRANTSALAVPSPVSNSASARHRTEALMDAQKEDFNSKHMANQRALGKLSAHTHTLSLTDINELVCGAPGDAPCATSPCGGAGCRDEDGQPRCGGLSCNGAAATADLALGRARHTQAELQRALAEGGSILSRVAETRRQASEAQQRAQAALDKANASRGQVEQANQELQELIQSVKDFLNQEGADPDSIEMVATRVLELSIPASAEQIQHLAGAIAERVRSLADVDAILARTVGDVRRAEQLLQDARRARSWAEDEKQKAETVQAALEEAQRAQGIAQGAIRGAVADTRDTEQTLYQVQERMAGAERALSSAGERARQLDALLEALKLKRAGNSLAASTAEETAGSAQGRAQEAEQLLRGPLGDQYQTVKALAERKAQGVLAAQARAEQLRDEARDLLQAAQDKLQRLQELEGTYEENERALESKAAQLDGLEARMRSVLQAINLQVQIYNTCQ

SEQ ID NO: 1027652 - protein, 1001 aa, Homo sapiens
MVVSACASLEWLGAAVTSVPLATMALAPQAVKPASAATRGHSAVSVKRPVGNVSVELVPLGFAVTAASVASGDSLAAGHVSAMGMQMSATPTQALAWAAVITQGVSTVKGALLVSTGTHGCHMGASAGPVPVLKALGANGTLLLLATRMNIPSRLCATAGQAIRGCDVKLVPLGTLGTHQGQVAGANCVSAVGTLTQWILMPVTPTRGNACAVYTTQRVHTVPTASLASMGRLPDRAVTAAHATCWAQIRSSAHLLTSATVIQAVGSAHASPMSRALAVTAVPPTSGTSPVAMVASLVPATQAGPEATTCNEFTGQCHCRAGFGGRTCSECQELHWGDPGLQCHACDCDSRGIDTPQCHRFTGHCSCRPGVSGVRCDQCARGFSGIFPACHPCHACFGDWDRVVQDLAARTQRLEQRAQELQQTGVLGAFESSFWHMQEKLGIVQGIVGARNTSAASTAQLVEATEELRREIGEATEHLTQLEADLTDVQDENFNANHALSGLERDRLALNLTLRQLDQHLDLLKHSNFLGAYDSIRHAHSQSAEAERRANTSALAVPSPVSNSASARHRTEALMDAQKEDFNSKHMANQRALGKLSAHTHTLSLTDINELVCGAPGDAPCATSPCGGAGCRDEDGQPRCGGLSCNGAAATADLALGRARHTQAELQRALAEGGSILSRVAETRRQASEAQQRAQAALDKANASRGQVEQANQELQELIQSVKDFLNQEGADPDSIEMVATRVLELSIPASAEQIQHLAGAIAERVRSLADVDAILARTVGDVRRAEQLLQDARRARSWAEDEKQKAETVQAALEEAQRAQGIAQGAIRGAVADTRDTEQTLYQVQERMAGAERALSSAGERARQLDALLEALKLKRAGNSLAASTAEETAGSAQGRAQEAEQLLRGPLGDQYQTVKALAERKAQGVLAAQARAEQLRDEARDLLQAAQDKLQRLQELEGTYEENERALESKAAQLDGLEARMRSVLQAINLQVQIYNTCQ

SEQ ID NO: 1027653 - protein, 616 aa, Homo sapiens
SDTPKQWLKTLADTPHTLVQDLAARTQRLEQRAQELQQTGVLGAFESSFWHMQEKLGIVQGIVGARNTSAASTAQLVEATEELRREIGEATEHLTQLEADLTDVQDENFNANHALSGLERDRLALNLTLRQLDQHLDLLKHSNFLGAYDSIRHAHSQSAEAERRANTSALAVPSPVSNSASARHRTEALMDAQKEDFNSKHMANQRALGKLSAHTHTLSLTDINELVCGAPGDAPCATSPCGGAGCRDEDGQPRCGGLSCNGAAATADLALGRARHTQAELQRALAEGGSILSRVAETRRQASEAQQRAQAALDKANASRGQVEQANQELQELIQSVKDFLNQEGADPDSIEMVATRVLELSIPASAEQIQHLAGAIAERVRSLADVDAILARTVGDVRRAEQLLQDARRARSWAEDEKQKAETVQAALEEAQRAQGIAQGAIRGAVADTRDTEQTLYQVQERMAGAERALSSAGERARQLDALLEALKLKRAGNSLAASTAEETAGSAQGRAQEAEQLLRGPLGDQYQTVKALAERKAQGVLAAQARAEQLRDEARDLLQAAQDKLQRLQELEGTYEENERALESKAAQLDGLEARMRSVLQAINLQVQIYNTCQ

SEQ ID NO: 1027654 - protein, 509 aa, Homo sapiens
GVDSIRLLKHSTLGELLATLVQVDQDQSSADCLPLPNLGAYDSIRHAHSQSAEAERRANTSALAVPSPVSNSASARHRTEALMDAQKEDFNSKHMANQRALGKLSAHTHTLSLTDINELVCGAPGDAPCATSPCGGAGCRDEDGQPRCGGLSCNGAAATADLALGRARHTQAELQRALAEGGSILSRVAETRRQASEAQQRAQAALDKANASRGQVEQANQELQELIQSVKDFLNQEGADPDSIEMVATRVLELSIPASAEQIQHLAGAIAERVRSLADVDAILARTVGDVRRAEQLLQDARRARSWAEDEKQKAETVQAALEEAQRAQGIAQGAIRGAVADTRDTEQTLYQVQERMAGAERALSSAGERARQLDALLEALKLKRAGNSLAASTAEETAGSAQGRAQEAEQLLRGPLGDQYQTVKALAERKAQGVLAAQARAEQLRDEARDLLQAAQDKLQRLQELEGTYEENERALESKAAQLDGLEARMRSVLQAINLQVQIYNTCQ

SEQ ID NO: 1027655 - protein, 1881 aa, Homo sapiens
RQFPEGRGRVGVGALSARCCAPSQNPLRPFLPAAIPNFAQSRWTLSCRRDRWTDLGTDRGPGGKQAKDPQAELTRNPKARRRARARDRSPPLIPVPLFRMELTSRERGRGQPLPWELRLGLLLSVLAATLAQAPAPDVPGCSRGSCYPATGDLLVGRADRLTASSTCGLNGPQPYCIVSHLQDEKKCFLCDSRRPFSARDNPHSHRIQNVVTSFAPQRRAAWWQSENGIPAVTIQLDLEAEFHFTHLIMTFKTFRPAAMLVERSADFGRTWHVYRYFSYDCGADFPGVPLAPPRHWDDVVCESRYSEIEPSTEGEVIYRVLDPAIPIPDPYSSRIQNLLKITNLRVNLTRLHTLGDNLLDPRREIREKYYYALYELVVRGNCFCYGHASECAPAPGAPAHAEGMVHGACICKHNTRGLNCEQCQDFYRDLPWRPAEDGHSHACRKCECHGHTHSCHFDMAVYLASGNVSGGVCDGCQHNTAGRHCELCRPFFYRDPTKDLRDPAVCRSCDCDPMGSQDGGRCDSHDDPALGLVSGQCRCKEHVVGTRCQQCRDGFFGLSISDRLGCRRCQCNARGTVPGSTPCDPNSGSCYCKRLVTGRGCDRCLPGHWGLSHDLLGCRPCDCDVGGALDPQCDEGTGQCHCRQHMVGRRCEQVQPGYFRPFLDHLIWEAEDTRGQVLDVVERLVTPGETPSWTGSGFVRLQEGQTLEFLVASVPKAMDYDLLLRLEPQVPEQWAELELIVQRPGPVPAHSLCGHLVPKDDRIQGTLQPHARYLIFPNPVCLEPGISYKLHLKLVRTGGSAQPETPYSGPGLLIDSLVLLPRVLVLEMFSGGDAAALERQATFERYQCHEEGLVPSKTSPSEACAPLLISLSTLIYNGALPCQCNPQGSLSSECNPHGGQCLCKPGVVGRRCDLCAPGYYGFGPTGCQACQCSHEGALSSLCEKTSGQCLCRTGAFGLRCDRCQRGQWGFPSCRPCVCNGHADECNTHTGACLGCRDHTGGEHCERCIAGFHGDPRLPYGGQCRPCPCPEGPGSQRHFATSCHQDEYSQQIVCHCRAGYTGLRCEACAPGHFGDPSRPGGRCQLCECSGNIDPMDPDACDPHTGQCLRCLHHTEGPHCAHCKPGFHGQAARQSCHRCTCNLLGTNPQQCPSPDQCHCDPSSGQCPCLPNVQGPSCDRCAPNFWNLTSGHGCQPCACHPSRARGPTCNEFTGQCHCRAGFGGRTCSECQELHWGDPGLQCHACDCDSRGIDTPQCHRFTGHCSCRPGVSGVRCDQCARGFSGIFPACHPCHACFGDWDRVVQDLAARTQRLEQRAQELQQTGVLGAFESSFWHMQEKLGIVQGIVGARNTSAASTAQLVEATEELRREIGEATEHLTQLEADLTDVQDENFNANHALSGLERDRLALNLTLRQLDQHLDLLKHSNFLGAYDSIRHAHSQSAEAERRANTSALAVPSPVSNSASARHRTEALMDAQKEDFNSKHMANQRALGKLSAHTHTLSLTDINELVCGAPGDAPCATSPCGGAGCRDEDGQPRCGGLSCNGAAATADLALGRARHTQAELQRALAEGGSILSRVAETRRQASEAQQRAQAALDKANASRGQVEQANQELQELIQSVKDFLNQEGADPDSIEMVATRVLELSIPASAEQIQHLAGAIAERVRSLADVDAILARTVGDVRRAEQLLQDARRARSWAEDEKQKAETVQAALEEAQRAQGIAQGAIRGAVADTRDTEQTLYQVQERMAGAERALSSAGERARQLDALLEALKLKRAGNSLAASTAEETAGSAQGRAQEAEQLLRGPLGDQYQTVKALAERKAQGVLAAQARAEQLRDEARDLLQAAQDKLQRLQGKKWGTRDTRLRETPPKLTPALPRIGRHL

SEQ ID NO: 1027656 - protein, 1881 aa, Homo sapiens; identical to SEQ ID NO: 1027655

SEQ ID NO: 1027657 - protein, 1650 aa, Homo sapiens
RQFPEGRGRVGVGALSARCCAPSQNPLRPFLPAAIPNFAQSRWTLSCRRDRWTDLGTDRGPGGKQAKDPQAELTRNPKARRRARARDRSPPLIPVPLFRMELTSRERGRGQPLPWELRLGLLLSVLAATLAQAPAPDVPGCSRGSCYPATGDLLVGRADRLTASSTCGLNGPQPYCIVSHLQDEKKCFLCDSRRPFSARDNPHSHRIQNVVTSFAPQRRAAWWQSENGIPAVTIQLDLEAEFHFTHLIMTFKTFRPAAMLVERSADFGRTWHVYRYFSYDCGADFPGVPLAPPRHWDDVVCESRYSEIEPSTEGEVIYRVLDPAIPIPDPYSSRIQNLLKITNLRVNLTRLHTLGDNLLDPRREIREKYYYALYELVVRGNCFCYGHASECAPAPGAPAHAEGMVHGACICKHNTRGLNCEQCQDFYRDLPWRPAEDGHSHACRKCECHGHTHSCHFDMAVYLASGNVSGGVCDGCQHNTAGRHCELCRPFFYRDPTKDLRDPAVCRSCDCDPMGSQDGGRCDSHDDPALGLVSGQCRCKEHVVGTRCQQCRDGFFGLSISDRLGCRRCQCNARGTVPGSTPCDPNSGSCYCKRLVTGRGCDRCLPGHWGLSHDLLGCRPCDCDVGGALDPQCDEGTGQCHCRQHMVGRRCEQVQPGYFRPFLDHLIWEAEDTRGQVLDVVERLVTPGETPSWTGSGFVRLQEGQTLEFLVASVPKAMDYDLLLRLEPQVPEQWAELELIVQRPGPVPAHSLCGHLVPKDDRIQGTLQPHARYLIFPNPVCLEPGISYKLHLKLVRTGGSAQPETPYSGPGLLIDSLVLLPRVLVLEMFSGGDAAALERQATFERYQCHEEGLVPSKTSPSEACAPLLISLSTLIYNGALPCQCNPQGSLSSECNPHGGQCLCKPGVVGRRCDLCAPGYYGFGPTGCQACQCSHEGALSSLCEKTSGQCLCRTGAFGLRCDRCQRGQWGFPSCRPCVCNGHADECNTHTGACLGCRDHTGGEHCERCIAGFHGDPRLPYGGQCRPCPCPEGPGSQRHFATSCHQDEYSQQIVCHCRAGYTGLRCEACAPGHFGDPSRPGGRCQLCECSGNIDPMDPDACDPHTGQCLRCLHHTEGPHCAHCKPGFHGQAARQSCHRCTCNLLGTNPQQCPSPDQCHCDPSSGQCPCLPNVQGPSCDRCAPNFWNLTSGHGCQPCACHPSRARGPTCNEFTGQCHCRAGFGGRTCSECQELHWGDPGLQCHACDCDSRGIDTPQCHRFTGHCSCRPGVSGVRCDQCARGFSGIFPACHPCHACFGDWDRVVQDLAARTQRLEQRAQELQQTGVLGAFESSFWHMQEKLGIVQGIVGARNTSAASTAQLVEATEELRREIGEATEHLTQLEADLTDVQDENFNANHALSGLERDRLALNLTLRQLDQHLDLLKHSNFLGAYDSIRHAHSQSAEAERRANTSALAVPSPVSNSASARHRTEALMDAQKEDFNSKHMANQRALGKLSAHTHTLSLTDINELVCGAPGDAPCATSPCGGAGCRDEDGQPRCGGLSCNGAAATADLALGRARHTQAELQRALAEGGSILSRVAETRRQASEAQQRAQAALDKANASRGQVEQANQELQELIQSVKDFLNREPPTCPRPCGCPLWQLPVSVSPLVHT

SEQ ID NO: 1027658 - protein, 1284 aa, Homo sapiens
RQFPEGRGRVGVGALSARCCAPSQNPLRPFLPAAIPNFAQSRWTLSCRRDRWTDLGTDRGPGGKQAKDPQAELTRNPKARRRARARDRSPPLIPVPLFRMELTSRERGRGQPLPWELRLGLLLSVLAATLAQAPAPDVPGCSRGSCYPATGDLLVGRADRLTASSTCGLNGPQPYCIVSHLQDEKKCFLCDSRRPFSARDNPHSHRIQNVVTSFAPQRRAAWWQSENGIPAVTIQLDLEAEFHFTHLIMTFKTFRPAAMLVERSADFGRTWHVYRYFSYDCGADFPGVPLAPPRHWDDVVCESRYSEIEPSTEGEVIYRVLDPAIPIPDPYSSRIQNLLKITNLRVNLTRLHTLGDNLLDPRREIREKYYYALYELVVRGNCFCYGHASECAPAPGAPAHAEGMVHGACICKHNTRGLNCEQCQDFYRDLPWRPAEDGHSHACRKCECHGHTHSCHFDMAVYLASGNVSGGVCDGCQHNTAGRHCELCRPFFYRDPTKDLRDPAVCRSCDCDPMGSQDGGRCDSHDDPALGLVSGQCRCKEHVVGTRCQQCRDGFFGLSISDRLGCRRCQCNARGTVPGSTPCDPNSGSCYCKRLVTGRGCDRCLPGHWGLSHDLLGCRPCDCDVGGALDPQCDEGTGQCHCRQHMVGRRCEQVQPGYFRPFLDHLIWEAEDTRGQVLDVVERLVTPGETPSWTGSGFVRLQEGQTLEFLVASVPKAMDYDLLLRLEPQVPEQWAELELIVQRPGPVPAHSLCGHLVPKDDRIQGTLQPHARYLIFPNPVCLEPGISYKLHLKLVRTGGSAQPETPYSGPGLLIDSLVLLPRVLVLEMFSGGDAAALERQATFERYQCHEEGLVPSKTSPSEACAPLLISLSTLIYNGALPCQCNPQGSLSSECNPHGGQCLCKPGVVGRRCDLCAPGYYGFGPTGCQACQCSHEGALSSLCEKTSGQCLCRTGAFGLRCDRCQRGQWGFPSCRPCVCNGHADECNTHTGACLGCRDHTGGEHCERCIAGFHGDPRLPYGGQCRPCPCPEGPGSQRHFATSCHQDEYSQQIVCHCRAGYTGLRCEACAPGHFGDPSRPGGRCQLCECSGNIDPMDPDACDPHTGQCLRCLHHTEGPHCAHCKPGFHGQAARQSCHRCTCNLLGTNPQQCPSPDQCHCDPSSGQCPCLPNVQGPSCDRCAPNFWNLTSGHGCQPCACHPSRARGPTCNEFTGQCHCRAGNWKAPMRKMSGHWRVRQPSWTGWRPGCAACFKPSTCRCRSTTPASDPCPRPTPVPSTAPHACLPMH

SEQ ID NO: 1027659 - protein, 969 aa, Homo sapiens
RQFPEGRGRVGVGALSARCCAPSQNPLRPFLPAAIPNFAQSRWTLSCRRDRWTDLGTDRGPGGKQAKDPQAELTRNPKARRRARARDRSPPLIPVPLFRMELTSRERGRGQPLPWELRLGLLLSVLAATLAQAPAPDVPGCSRGSCYPATGDLLVGRADRLTASSTCGLNGPQPYCIVSHLQDEKKCFLCDSRRPFSARDNPHSHRIQNVVTSFAPQRRAAWWQSENGIPAVTIQLDLEAEFHFTHLIMTFKTFRPAAMLVERSADFGRTWHVYRYFSYDCGADFPGVPLAPPRHWDDVVCESRYSEIEPSTEGEVIYRVLDPAIPIPDPYSSRIQNLLKITNLRVNLTRLHTLGDNLLDPRREIREKYYYALYELVVRGNCFCYGHASECAPAPGAPAHAEGMVHGACICKHNTRGLNCEQCQDFYRDLPWRPAEDGHSHACRKCECHGHTHSCHFDMAVYLASGNVSGGVCDGCQHNTAGRHCELCRPFFYRDPTKDLRDPAVCRSCDCDPMGSQDGGRCDSHDDPALGLVSGQCRCKEHVVGTRCQQCRDGFFGLSISDRLGCRRCQCNARGTVPGSTPCDPNSGSCYCKRLVTGRGCDRCLPGHWGLSHDLLGCRPCDCDVGGALDPQCDEGTGQCHCRQHMVGRRCEQVQPGYFRPFLDHLIWEAEDTRGQVLDVVERLVTPGETPSWTGSGFVRLQEGQTLEFLVASVPKAMDYDLLLRLEPQVPEQWAELELIVQRPGPVPAHSLCGHLVPKDDRIQGTLQPHARYLIFPNPVCLEPGISYKLHLKLVRTGGSAQPETPYSGPGLLIDSLVLLPRVLVLEMFSGGDAAALERQATFERYQCHEEGLVPSKTSPSEACAPLLISLSTLIYNGALPCQCNPVSVCDVGDGAEVGTQPDLAQPSSPHACQCNPQGSLSSECNPHGGQCLCKPGVVGRRCDLCAPGYYGFGPTGCQALHLPRDGLR

SEQ ID NO: 1027660 - protein, 1650 aa, Homo sapiens; identical to SEQ ID NO: 1027657

SEQ ID NO: 1027661 - protein, 1676 aa, Homo sapiens
RQFPEGRGRVGVGALSARCCAPSQNPLRPFLPAAIPNFAQSRWTLSCRRDRWTDLGTDRGPGGKQAKDPQAELTRNPKARRRARARDRSPPLIPVPLFRMELTSRERGRGQPLPWELRLGLLLSVLAATLAQAPAPDVPGCSRGSCYPATGDLLVGRADRLTASSTCGLNGPQPYCIVSHLQDEKKCFLCDSRRPFSARDNPHSHRIQNVVTSFAPQRRAAWWQSENGIPAVTIQLDLEAEFHFTHLIMTFKTFRPAAMLVERSADFGRTWHVYRYFSYDCGADFPGVPLAPPRHWDDVVCESRYSEIEPSTEGEVIYRVLDPAIPIPDPYSSRIQNLLKITNLRVNLTRLHTLGDNLLDPRREIREKYYYALYELVVRGNCFCYGHASECAPAPGAPAHAEGMVHGACICKHNTRGLNCEQCQDFYRDLPWRPAEDGHSHACRKCECHGHTHSCHFDMAVYLASGNVSGGVCDGCQHNTAGRHCELCRPFFYRDPTKDLRDPAVCRSCDCDPMGSQDGGRCDSHDDPALGLVSGQCRCKEHVVGTRCQQCRDGFFGLSISDRLGCRRCQCNARGTVPGSTPCDPNSGSCYCKRLVTGRGCDRCLPGHWGLSHDLLGCRPCDCDVGGALDPQCDEGTGQCHCRQHMVGRRCEQVQPGYFRPFLDHLIWEAEDTRGQVLDVVERLVTPGETPSWTGSGFVRLQEGQTLEFLVASVPKAMDYDLLLRLEPQVPEQWAELELIVQRPGPVPAHSLCGHLVPKDDRIQGTLQPHARYLIFPNPVCLEPGISYKLHLKLVRTGGSAQPETPYSGPGLLIDSLVLLPRVLVLEMFSGGDAAALERQATFERYQCHEEGLVPSKTSPSEACAPLLISLSTLIYNGALPCQCNPQGSLSSECNPHGGQCLCKPGVVGRRCDLCAPGYYGFGPTGCQACQCSHEGALSSLCEKTSGQCLCRTGAFGLRCDRCQRGQWGFPSCRPCVCNGHADECNTHTGACLGCRDHTGGEHCERCIAGFHGDPRLPYGGQCRPCPCPEGPGSQRHFATSCHQDEYSQQIVCHCRAGYTGLRCEACAPGHFGDPSRPGGRCQLCECSGNIDPMDPDACDPHTGQCLRCLHHTEGPHCAHCKPGFHGQAARQSCHRCTCNLLGTNPQQCPSPDQCHCDPSSGQCPCLPNVQGPSCDRCAPNFWNLTSGHGCQPCACHPSRARGPTCNEFTGQCHCRAGFGGRTCSECQELHWGDPGLQCHACDCDSRGIDTPQCHRFTGHCSCRPGVSGVRCDQCARGFSGIFPACHPCHACFGDWDRVVQDLAARTQRLEQRAQELQQTGVLGAFESSFWHMQEKLGIVQGIVGARNTSAASTAQLVEATEELRREIGEATEHLTQLEADLTDVQDENFNANHALSGLERDRLALNLTLRQLDQHLDLLKHSNFLGAYDSIRHAHSQSAEAERRANTSALAVPSPVSNSASARHRTEALMDAQKEDFNSKHMANQRALGKLSAHTHTLSLTDINELVRLKCWVGQVGVMFLSQGPDLFCAWQVCGAPGDAPCATSPCGGAGCRDEDGQPRCGGLSCNGAAATADLALGRARHTQAELQRALAEGGSILSRVAETRRQASEAQQRAQAALDKANASRGQVEQANQELQELIQSVKDFLNREPPTCPRPCGCPLWQLPVSVSPLVHT

SEQ ID NO: 1027662 - protein, 700 aa, Homo sapiens
FRGSSPRTPNEFTGQCHCRAGFGGRTCSECQELHWGDPGLQCHACDCDSRGIDTPQCHRFTGHCSCRPGVSGVRCDQCARGFSGIFPACHPCHACFGDWDRVVQDLAARTQRLEQRAQELQQTGVLGAFESSFWHMQEKLGIVQGIVGARNTSAASTAQLVEATEELRREIGEATEHLTQLEADLTDVQDENFNANHALSGLERDRLALNLTLRQLDQHLDLLKHSNFLGAYDSIRHAHSQSAEAERRANTSALAVPSPVSNSASARHRTEALMDAQKEDFNSKHMANQRALGKLSAHTHTLSLTDINELVCGAPGDAPCATSPCGGAGCRDEDGQPRCGGLSCNGAAATADLALGRARHTQAELQRALAEGGSILSRVAETRRQASEAQQRAQAALDKANASRGQVEQANQELQELIQSVKDFLNQEGADPDSIEMVATRVLELSIPASAEQIQHLAGAIAERVRSLADVDAILARTVGDVRRAEQLLQDARRARSWAEDEKQKAETVQAALEEAQRAQGIAQGAIRGAVADTRDTEQTLYQVQERMAGAERALSSAGERARQLDALLEALKLKRAGNSLAASTAEETAGSAQGRAQEAEQLLRGPLGDQYQTVKALAERKAQGVLAAQARAEQLRDEARDLLQAAQDKLQRLQELEGTYEENERALESKAAQLDGLEARMRSVLQAINLQVQIYNTCQ

SEQ ID NO: 1027663 - protein, 284 aa, Homo sapiens [sequence omitted]

SEQ ID NO: 1027664 - protein, 1897 aa, Homo sapiens
RQFPEGRGRVGVGALSARCCAPSQNPLRPFLPAAIPNFAQSRWTLSCRRDRWTDLGTDRGPGGKQAKDPQAELTRNPKARRRARARDRSPPLIPVPLFRMELTSRERGRGQPLPWELRLGLLLSVLAATLAQAPAPDVPGCSRGSCYPATGDLLVGRADRLTASSTCGLNGPQPYCIVSHLQDEKKCFLCDSRRPFSARDNPHSHRIQNVVTSFAPQRRAAWWQSENGIPAVTIQLDLEAEFHFTHLIMTFKTFRPAAMLVERSADFGRTWHVYRYFSYDCGADFPGVPLAPPRHWDDVVCESRYSEIEPSTEGEVIYRVLDPAIPIPDPYSSRIQNLLKITNLRVNLTRLHTLGDNLLDPRREIREKYYYALYELVVRGNCFCYGHASECAPAPGAPAHAEGMVHGACICKHNTRGLNCEQCQDFYRDLPWRPAEDGHSHACRKCECHGHTHSCHFDMAVYLASGNVSGGVCDGCQHNTAGRHCELCRPFFYRDPTKDLRDPAVCRSCDCDPMGSQDGGRCDSHDDPALGLVSGQCRCKEHVVGTRCQQCRDGFFGLSISDRLGCRRCQCNARGTVPGSTPCDPNSGSCYCKRLVTGRGCDRCLPGHWGLSHDLLGCRPCDCDVGGALDPQCDEGTGQCHCRQHMVGRRCEQVQPGYFRPFLDHLIWEAEDTRGQVLDVVERLVTPGETPSWTGSGFVRLQEGQTLEFLVASVPKAMDYDLLLRLEPQVPEQWAELELIVQRPGPVPAHSLCGHLVPKDDRIQGTLQPHARYLIFPNPVCLEPGISYKLHLKLVRTGGSAQPETPYSGPGLLIDSLVLLPRVLVLEMFSGGDAAALERQATFERYQCHEEGLVPSKTSPSEACAPLLISLSTLIYNGALPCQCNPQGSLSSECNPHGGQCLCKPGVVGRRCDLCAPGYYGFGPTGCQACQCSHEGALSSLCEKTSGQCLCRTGAFGLRCDRCQRGQWGFPSCRPCVCNGHADECNTHTGACLGCRDHTGGEHCERCIAGFHGDPRLPYGGQCRPCPCPEGPGSQRHFATSCHQDEYSQQIVCHCRAGYTGLRCEACAPGHFGDPSRPGGRCQLCECSGNIDPMDPDACDPHTGQCLRCLHHTEGPHCAHCKPGFHGQAARQSCHRCTCNLLGTNPQQCPSPDQCHCDPSSGQCPCLPNVQGPSCDRCAPNFWNLTSGHGCQPCACHPSRARGPTCNEFTGQCHCRAGFGGRTCSECQELHWGDPGLQCHACDCDSRGIDTPQCHRFTGHCSCRPGVSGVRCDQCARGFSGIFPACHPCHACFGDWDRVVQDLAARTQRLEQRAQELQQTGVLGAFESSFWHMQEKLGIVQGIVGARNTSAASTAQLVEATEELRREIGEATEHLTQLEADLTDVQDENFNANHALSGLERDRLALNLTLRQLDQHLDLLKHSNFLGAYDSIRHAHSQSAEAERRANTSALAVPSPVSNSASARHRTEALMDAQKEDFNSKHMANQRALGKLSAHTHTLSLTDINELVCGAPGDAPCATSPCGGAGCRDEDGQPRCGGLSCNGAAATADLALGRARHTQAELQRALAEGGSILSRVAETRRQASEAQQRAQAALDKANASRGQVEQANQELQELIQSVKDFLNQEGADPDSIEMVATRVLELSIPASAEQIQHLAGAIAERVRSLADVDAILARTVGDVRRAEQLLQDARRARSWAEDEKQKAETVQAALEEAQRAQGIAQGAIRGAVADTRDTEQTLYQVQERMAGAERALSSAGERARQLDALLEALKLKRAGNSLAASTAEETAGSAQGRAQEAEQLLRGPLGDQYQTVKALAERKAQGVLAAQARAEQLRDEARDLLQAAQDKLQRLQELEGTYEENERALESKAAQLDGLEARMRSVLQAINLQVQIYNTCQ

SEQ ID NO: 1027665 - protein, 1872 aa, Homo sapiens
RQFPEGRGRVGVGALSARCCAPSQNPLRPFLPAAIPNFAQSRWTLSCRRDRWTDLGTDRGPGGKQAKDPQAELTRNPKARRRARARDRSPPLIPVPLFRMELTSRERGRGQPLPWELRLGLLLSVLAATLAQAPAPDVPGCSRGSCYPATGDLLVGRADRLTASSTCGLNGPQPYCIVSHLQDEKKCFLCDSRRPFSARDNPHSHRIQNVVTSFAPQRRAAWWQSENGIPAVTIQLDLEAEFHFTHLIMTFKTFRPAAMLVERSADFGRTWHVYRYFSYDCGADFPGVPLAPPRHWDDVVCESRYSEIEPSTEGEVIYRVLDPAIPIPDPYSSRIQNLLKITNLRVNLTRLHTLGDNLLDPRREIREKYYYALYELVVRGNCFCYGHASECAPAPGAPAHAEGMVHGACICKHNTRGLNCEQCQDFYRDLPWRPAEDGHSHACRKCECHGHTHSCHFDMAVYLASGNVSGGVCDGCQHNTAGRHCELCRPFFYRDPTKDLRDPAVCRSCDCDPMGSQDGGRCDSHDDPALGLVSGQCRCKEHVVGTRCQQCRDGFFGLSISDRLGCRRCQCNARGTVPGSTPCDPNSGSCYCKRLVTGRGCDRCLPGHWGLSHDLLGCRPCDCDVGGALDPQCDEGTGQCHCRQHMVGRRCEQVQPGYFRPFLDHLIWEAEDTRGQVLDVVERLVTPGETPSWTGSGFVRLQEGQTLEFLVASVPKAMDYDLLLRLEPQVPEQWAELELIVQRPGPVPAHSLCGHLVPKDDRIQGTLQPHARYLIFPNPVCLEPGISYKLHLKLVRTGGSAQPETPYSGPGLLIDSLVLLPRVLVLEMFSGGDAAALERQATFERYQCHEEGLVPSKTSPSEACAPLLISLSTLIYNGALPCQCNPQGSLSSECNPHGGQCLCKPGVVGRRCDLCAPGYYGFGPTGCQACQCSHEGALSSLCEKTSGQCLCRTGAFGLRCDRCQRGQWGFPSCRPCVCNGHADECNTHTGACLGCRDHTGGEHCERCIAGFHGDPRLPYGGQCRPCPCPEGPGSQRHFATSCHQDEYSQQIVCHCRAGYTGLRCEACAPGHFGDPSRPGGRCQLCECSGNIDPMDPDACDPHTGQCLRCLHHTEGPHCAHCKPGFHGQAARQSCHRCTCNLLGTNPQQCPSPDQCHCDPSSGQCPCLPNVQGPSCDRCAPNFWNLTSGHGCQPCACHPSRARGPTCNEFTGQCHCRAGFGGRTCSECQELHWGDPGLQCHACDCDSRGIDTPQCHRFTGHCSCRPGVSGVRCDQCARGFSGIFPACHPCHACFGDWDRVVQDLAARTQRLEQRAQELQQTGVLGAFESSFWHMQEKLGIVQGIVGARNTSAASTAQLVEATEELRREIGEATEHLTQLEADLTDVQDENFNANHALSGLERDRLALNLTLRQLDQHLDLLKHSNFLGAYDSIRHAHSQSAEAERRANTSALAVPSPVSNSASARHRTEALMDAQKEDFNSKHMANQRALGKLSAHTHTLSLTDINELVCGAPGDAPCATSPCGGAGCRDEDGQPRCGGLSCNGAAATADLALGRARHTQAELQRALAEGGSILSRVAETRRQASEAQQRAQAALDKANASRGQVEQANQELQELIQSVKDFLNQEGADPDSIEMVATRVLELSIPASAEQIQHLAGAIAERVRSLADVDAILARTVGDVRRAEQLLQDARRARSWAEDEKQKAETVQAALEEAQRAQGIAQGAIRGAVADTRDTEQTLYQVQERMAGAERALSSAGERARQLDALLEALKLKRAGNSLAASTAEETAGSAQGRAQEAEQLLRGPLGDQYQTVKALAERKAQGVLAAQARAEQLRDEARDLLQAAQDKLQRLQELEGTYEATAQQASALPGHR

SEQ ID NO: 1027666 - protein, 1700 aa, Homo sapiens
RQFPEGRGRVGVGALSARCCAPSQNPLRPFLPAAIPNFAQSRWTLSCRRDRWTDLGTDRGPGGKQAKDPQAELTRNPKARRRARARDRSPPLIPVPLFRMELTSRERGRGQPLPWELRLGLLLSVLAATLAQAPAPDVPGCSRGSCYPATGDLLVGRADRLTASSTCGLNGPQPYCIVSHLQDEKKCFLCDSRRPFSARDNPHSHRIQNVVTSFAPQRRAAWWQSENGIPAVTIQLDLEAEFHFTHLIMTFKTFRPAAMLVERSADFGRTWHVYRYFSYDCGADFPGVPLAPPRHWDDVVCESRYSEIEPSTEGEVIYRVLDPAIPIPDPYSSRIQNLLKITNLRVNLTRLHTLGDNLLDPRREIREKYYYALYELVVRGNCFCYGHASECAPAPGAPAHAEGMVHGACICKHNTRGLNCEQCQDFYRDLPWRPAEDGHSHACRKCECHGHTHSCHFDMAVYLASGNVSGGVCDGCQHNTAGRHCELCRPFFYRDPTKDLRDPAVCRSCDCDPMGSQDGGRCDSHDDPALGLVSGQCRCKEHVVGTRCQQCRDGFFGLSISDRLGCRRCQCNARGTVPGSTPCDPNSGSCYCKRLVTGRGCDRCLPGHWGLSHDLLGCRPCDCDVGGALDPQCDEGTGQCHCRQHMVGRRCEQVQPGYFRPFLDHLIWEAEDTRGQVLDVVERLVTPGETPSWTGSGFVRLQEGQTLEFLVASVPKAMDYDLLLRLEPQVPEQWAELELIVQRPGPVPAHSLCGHLVPKDDRIQGTLQPHARYLIFPNPVCLEPGISYKLHLKLVRTGGSAQPETPYSGPGLLIDSLVLLPRVLVLEMFSGGDAAALERQATFERYQCHEEGLVPSKTSPSEACAPLLISLSTLIYNGALPCQCNPQGSLSSECNPHGGQCLCKPGVVGRRCDLCAPGYYGFGPTGCQACQCSHEGALSSLCEKTSGQCLCRTGAFGLRCDRCQRGQWGFPSCRPCVCNGHADECNTHTGACLGCRDHTGGEHCERCIAGFHGDPRLPYGGQCRPCPCPEGPGSQRHFATSCHQDEYSQQIVCHCRAGYTGLRCEACAPGHFGDPSRPGGRCQLCECSGNIDPMDPDACDPHTGQCLRCLHHTEGPHCAHCKPGFHGQAARQSCHRCTCNLLGTNPQQCPSPDQCHCDPSSGQCPCLPNVQGPSCDRCAPNFWNLTSGHGCQPCACHPSRARGPTCNEFTGQCHCRAGFGGRTCSECQELHWGDPGLQCHACDCDSRGIDTPQCHRFTGHCSCRPGVSGVRCDQCARGFSGIFPACHPCHACFGDWDRVVQDLAARTQRLEQRAQELQQTGVLGAFESSFWHMQEKLGIVQGIVGARNTSAASTAQLVEATEELRREIGEATEHLTQLEADLTDVQDENFNANHALSGLERDRLALNLTLRQLDQHLDLLKHSNFLEEGADPDSIEMVATRVLELSIPASAEQIQHLAGAIAERVRSLADVDAILARTVGDVRRAEQLLQDARRARSWAEDEKQKAETVQAALEEAQRAQGIAQGAIRGAVADTRDTEQTLYQVQERMAGAERALSSAGERARQLDALLEALKLKRAGNSLAASTAEETAGSAQGRAQEAEQLLRGPLGDQYQTVKALAERKAQGVLAAQARAEQLRDEARDLLQAAQDKLQRLQELEGTYEENERALESKAAQLDGLEARMRSVLQAINLQVQIYNTCQ

SEQ ID NO: 1027667 - protein, 973 aa, Homo sapiens
RQFPEGRGRVGVGALSARCCAPSQNPLRPFLPAAIPNFAQSRWTLSCRRDRWTDLGTDRGPGGKQAKDPQAELTRNPKARRRARARDRSPPLIPVPLFRMELTSRERGRGQPLPWELRLGLLLSVLAATLAQAPAPDVPGCSRGSCYPATGDLLVGRADRLTASSTCGLNGPQPYCIVSHLQDEKKCFLCDSRRPFSARDNPHSHRIQNVVTSFAPQRRAAWWQSENGIPAVTIQLDLEAEFHFTHLIMTFKTFRPAAMLVERSADFGRTWHVYRYFSYDCGADFPGVPLAPPRHWDDVVCESRYSEIEPSTEGEVIYRVLDPAIPIPDPYSSRIQNLLKITNLRVNLTRLHTLGDNLLDPRREIREKYYYALYELVVRGNCFCYGHASECAPAPGAPAHAEGMVHGACICKHNTRGLNCEQCQDFYRDLPWRPAEDGHSHACRKCECHGHTHSCHFDMAVYLASGNVSGGVCDGCQHNTAGRHCELCRPFFYRDPTKDLRDPAVCRSCDCDPMGSQDGGRCDSHDDPALGLVSGQCRCKEHVVGTRCQQCRDGFFGLSISDRLGCRRCQCNARGTVPGSTPCDPNSGSCYCKRLVTGRGCDRCLPGHWGLSHDLLGCRPCDCDVGGALDPQCDEGTGQCHCRQHMVGRRCEQVQPGYFRPFLDHLIWEAEDTRGQVLDVVERLVTPGETPSWTGSGFVRLQEGQTLEFLVASVPKAMDYDLLLRLEPQVPEQWAELELIVQRPGPVPAHSLCGHLVPKDDRIQGTLQPHARYLIFPNPVCLEPGISYKLHLKLVRTGGSAQPETPYSGPGLLIDSLVLLPRVLVLEMFSGGDAAALERQATFERYQCHEEGLVPSKTSPSEACAPLLISLSTLIYNGALPCQCNPQGSLSSECNPHGGQCLCKPGVVGRRCDLCAPGYYGFGPTGCQGYSSAPCSLLCFSLLPITVLSPPSGPAAGFLKLSLGPSTLTLGQL

SEQ ID NO: 1027668 - protein, 738 aa, Homo sapiens
RQFPEGRGRVGVGALSARCCAPSQNPLRPFLPAAIPNFAQSRWTLSCRRDRWTDLGTDRGPGGKQAKDPQAELTRNPKARRRARARDRSPPLIPVPLFRMELTSRERGRGQPLPWELRLGLLLSVLAATLAQAPAPDVPGCSRGSCYPATGDLLVGRADRLTASSTCGLNGPQPYCIVSHLQDEKKCFLCDSRRPFSARDNPHSHRIQNVVTSFAPQRRAAWWQSENGIPAVTIQLDLEAEFHFTHLIMTFKTFRPAAMLVERSADFGRTWHVYRYFSYDCGADFPGVPLAPPRHWDDVVCESRYSEIEPSTEGEVIYRVLDPAIPIPDPYSSRIQNLLKITNLRVNLTRLHTLGDNLLDPRREIREKYYYALYELVVRGNCFCYGHASECAPAPGAPAHAEGMVHGACICKHNTRGLNCEQCQDFYRDLPWRPAEDGHSHACRKCECHGHTHSCHFDMAVYLASGNVSGGVCDGCQHNTAGRHCELCRPFFYRDPTKDLRDPAVCRSCDCDPMGSQDGGRCDSHDDPALGLVSGQCRCKEHVVGTRCQQCRDGFFGLSISDRLGCRRCQCNARGTVPGSTPCDPNSGSCYCKRLVTGRGCDRCLPGHWGLSHDLLGCRPCDCDVGGALDPQCDEGTGQCHCRQHMVGRRCEQVQPGYFRPFLDHLIWEAEDTRGQVLDVVERLVTPGETPSWTGSGFVRLQEGQTLEFLVASVPKAMDYDLLLRLEPQVRPCYLIWS

SEQ ID NO: 1027669 - protein, 1798 aa, Homo sapiens; identical to SEQ ID NO: 1027648

SEQ ID NO: 1027670 - protein, 1650 aa, Homo sapiens; identical to SEQ ID NO: 1027657

SEQ ID NO: 1027671 - protein, 1005 aa, Homo sapiens
RQFPEGRGRVGVGALSARCCAPSQNPLRPFLPAAIPNFAQSRWTLSCRRDRWTDLGTDRGPGGKQAKDPQAELTRNPKARRRARARDRSPPLIPVPLFRMELTSRERGRGQPLPWELRLGLLLSVLAATLAQAPAPDVPGCSRGSCYPATGDLLVGRADRLTASSTCGLNGPQPYCIVSHLQDEKKCFLCDSRRPFSARDNPHSHRIQNVVTSFAPQRRAAWWQSENGIPAVTIQLDLEAEFHFTHLIMTFKTFRPAAMLVERSADFGRTWHVYRYFSYDCGADFPGVPLAPPRHWDDVVCESRYSEIEPSTEGEVIYRVLDPAIPIPDPYSSRIQNLLKITNLRVNLTRLHTLGDNLLDPRREIREKYYYALYELVVRGNCFCYGHASECAPAPGAPAHAEGMVHGACICKHNTRGLNCEQCQDFYRDLPWRPAEDGHSHACRKCECHGHTHSCHFDMAVYLASGNVSGGVCDGCQHNTAGRHCELCRPFFYRDPTKDLRDPAVCRSCDCDPMGSQDGGRCDSHDDPALGLVSGQCRCKEHVVGTRCQQCRDGFFGLSISDRLGCRRCQCNARGTVPGSTPCDPNSGSCYCKRLVTGRGCDRCLPGHWGLSHDLLGCRPCDCDVGGALDPQCDEGTGQCHCRQHMVGRRCEQVQPGYFRPFLDHLIWEAEDTRGQVLDVVERLVTPGETPSWTGSGFVRLQEGQTLEFLVASVPKAMDYDLLLRLEPQVPEQWAELELIVQRPGPVPAHSLCGHLVPKDDRIQGTLQPHARYLIFPNPVCLEPGISYKLHLKLVRTGGSAQPETPYSGPGLLIDSLVLLPRVLVLEMFSGGDAAALERQATFERYQCHEEGLVPSKTSPSEACAPLLISLSTLIYNGALPCQCNPVSVCDVGVMGQRWGPSPDLAQPSSPHACQCNPQGSLSSECNPHGGQCLCKPGVVGRRCDLCAPGYYGFGPTGCQGYSSAPCSLLCFSLLPITVLSPPSGPAAGFLKLSLGPSTLTLGQL

SEQ ID NO: 1027672 - protein, 185 aa, Homo sapiens
MEGYSKVGCKSEKPEEGFWVMLPGWWAPMGSLEGVCLGRLVSGGSFVCQAENCPEELRVEGPGASGLRPDCGPELRSQRTHRRGRGHSFTLQETSRILREMLTNHKKTKNSREWRLKPVIPVLFERWRQEDHVSPTVREQPGQHSETLFLQTFQKLVEHGGMCLVPAPREAEERRLLEPRNWRLQ

SEQ ID NO: 1027673 - protein, 258 aa, Homo sapiens
MNALVLPGGEAGPAEIRYDHSQEILMERKEHREGEVTSWKRKIVERGNEGLGRGCPSEKGPQCWGDYSFGNCGMEGYSKVGCKSEKPEEGFWVMLPGWWAPMGSLEGVCLGRLVSGGSFVCQAENCPEELRVEGPGASGLRPDCGPELRSQRTHRRGRGHSFTLQETSRILREMLTNHKKTKNSREWRLKPVIPVLFERWRQEDHVSPTVREQPGQHSETLFLQTFQKLVEHGGMCLVPAPREAEERRLLEPRNWRLQ

SEQ ID NO: 1027674 - protein, 174 aa, Homo sapiens
EAQEPCSLLYAPETFVQLDQSLSRLEEQCVDALQAQGFSQVGFQGAPGQRAYVVLTTPLVGVPPDDFPGGPGLCEKQNRCPCRALGGVGSGQGVWFELPPTNLLPRSQISTESFLHLRYQGTDCALMVSAHQHPATARSPRAGGFGEPSWTGTCFLTPSPGKGPPLCLWGSSKY

SEQ ID NO: 1027675 - protein, 759 aa, Homo sapiens
EAQEPCSLLYAPETFVQLDQSLSRLEEQCVDALQAQGFPRSQISTESFLHLRYQGTDCALMVSAHQHPATARSPRAGGFGAAFVERYMREFGFVIPERPVVVDDVRVRGTGRSGLRLEDAPKAQTGPPRVDKMTQCYFEGGYQETPVYLLAELGYGHKLHGPCLIIDSNSTILVEPGCQAEVTKTGDICISVGAEVPGTVGPQLDPIQLSIFSHRFMSIAEQMGRILQRTAISTNIKERLDFSCALFGPDGGLVSNAPHIPVHLGAMQETVQFQIQHLGADLHPGDVLLSNHPSAGGSHLPDLTVITPVFWPGQTRPVFYVASRGHHADIGGITPGSMPPHSTMLQQEGAVFLSFKLVQGGVFQEEAVTEALRAPGKVPNCSGTRNLHDNLSDLRAQVAANQKGIQLVGELIGQYGLDVVQAYMGHIQANAELAVRDMLRAFGTSRQARGLPLEVSSEDHMDDGSPIRLRVQISLSQGSAVFDFSGTGPEVFGNLNAPRAVTLSALIYCLRCLVGRDIPLNQGCLAPVRVVIPRGSILDPSPEAAVVGGNVLTSQRVVDVILGAFGACAASQGCMNNVTLGNAHMGYYETVAGGAGAGPSWHGRSGVHSHMTNTRITDPEILESRYPVILRRFELRRGSGGRGRFRGGDGVTRELLFREEALLSVLTERRAFRPYGLHGGEPGARGLNLLIRKNGRTVNLGGKTSVTVYPGDVFCLHTPGGGGYGDPEDPAPPPGSPPQALAFPEHGSVYEYRRAQEAV

SEQ ID NO: 1027676 - protein, 835 aa, Homo sapiens
GQPLDSSHIASIRMGTTVATNALLERKGERVALLVTRGFRDLLHIGTQARGDLFDLAVPMPEVLYEEVLEVDERVVLHRGEAGTGTPVKGRTGDLLEVQQPVDLGALRGKLEGLLSRGIRSLAVVLMHSYTWAQHEQQVGVLARELGFTHVSLSSEAMPMVRIVPRGHTACADAYLTPAIQRYVQGFCRGFQGQLKDVQVLFMRSDGGLAPMDTFSGSSAVLSGPAGGVVGYSATTYQQEGGQPVIGFDMGGTSTDVSRYAGEFEHVFEASTAGVTLQAPQLDINTVAAGGGSRLFFRSGLFVVGPESAGAHPGPACYRKGGPVTVTDANLVLGRLLPASFPCIFGPGENQPLSPEASRKALEAVATEVNSFLTNGPCPASPLSLEEVAMGFVRVANEAMCRPIRALTQVRPPLLSRLLLPPAFVERYMREFGFVIPERPVVVDDVRVRGTGRSGLRLEDAPKAQTGPPRVDKMTQCYFEGGYQETPVYLLAELGYGHKLHGPCLIIDSNSTILVEPGCQAEVTKTGDICISVGAEVPGTVGPQLDPIQLSIFSHRFMSIAEQMGRILQRTAISTNIKERLDFSCALFGPDGGLVSNAPHIPVHLGAMQETVQFQIQHLGADLHPGDVLLSNHPSAGGSHLPDLTVITPVFWPGQTRPVFYVASRGHHADIGGITPGSMPPHSTMLQQEGAVFLSFKLVQGGVFQEEAVTEALRAPGKVPNCSGTRNLHDNLSDLRAQVAANQKGIQLVGELIGQYGLDVVQAYMGHIQANAELAVRDMLRAFGTSRQARGLPLEVSSEDHMDDGSPIRLRVQISLSQVGRGESASRRQGHGAAA

SEQ ID NO: 1027677 - protein, 1177 aa, Homo sapiens
GQPLDSSHIASIRMGTTVATNALLERKGERVALLVTRGFRDLLHIGTQARGDLFDLAVPMPEVLYEEVLEVDERVVLHRGEAGTGTPVKGRTGDLLEVQQPVDLGALRGKLEGLLSRGIRSLAVVLMHSYTWAQHEQQVGVLARELGFTHVSLSSEAMPMVRIVPRGHTACADAYLTPAIQRYVQGFCRGFQGQLKDVQVLFMRSDGGLAPMDTFSGSSAVLSGPAGGVVGYSATTYQQEGGQPVIGFDMGGTSTDVSRYAGEFEHVFEASTAGVTLQAPQLDINTVAAGGGSRLFFRSGLFVVGPESAGAHPGPACYRKGKSQDLAGLALPSAAAAGPAPPVSPIPAAYSCSPASSPQAPHPVHLPGGPVTVTDANLVLGRLLPASFPCIFGPGENQPLSPEASRKALEAVATEVNSFLTNGPCPASPLSLEEVAMGFVRVANEAMCRPIRALTQVRPPLLSRLLLPPAFVERYMREFGFVIPERPVVVDDVRVRGTGRSGLRLEDAPKAQTGPPRVDKMTQCYFEGGYQETPVYLLAELGYGHKLHGPCLIIDSNSTILVEPGCQAEVTKTGDICISVGAEVPGTVGPQLDPIQLSIFSHRFMSIAEQMGRILQRTAISTNIKERLDFSCALFGPDGGLVSNAPHIPVHLGAMQETVQFQIQHLGADLHPGDVLLSNHPSAGGSHLPDLTVITPVFWPGQTRPVFYVASRGHHADIGGITPGSMPPHSTMLQQEGAVFLSFKLVQGGVFQEEAVTEALRAPGKVPNCSGTRNLHDNLSDLRAQVAANQKGIQLVGELIGQYGLDVVQAYMGHIQANAELAVRDMLRAFGTSRQARGLPLEVSSEDHMDDGSPIRLRVQISLSQGSAVFDFSGTGPEVFGNLNAPRAVTLSALIYCLRCLVGRDIPLNQGCLAPVRVVIPRGSILDPSPEAAVVGGNVLTSQRVVDVILGAFGACAASQGCMNNVTLGNAHMGYYETVAGGAGAGPSWHGRSGVHSHMTNTRITDPEILESRYPVILRRFELRRGSGGRGRFRGGDGVTRELLFREEALLSVLTERRAFRPYGLHGARFPSPRGPPQPPPPPPPLVSLDSSPPSAGGEPGARGLNLLIRKNGRTVNLGGKTSVTVYPGDVFCLHTPGGGGYGDPEDPAPPPGSPPQALAFPEHGSVYEYRRAQEAV

SEQ ID NO: 1027678 - protein, 1100 aa, Homo sapiens
GQPLDSSHIASIRMGTTVATNALLERKGERVALLVTRGFRDLLHIGTQARGDLFDLAVPMPEVLYEEVLEVDERVVLHRGEAGTGTPVKGRTGDLLEVQQPVDLGALRGKLEGLLSRGIRSLAVVLMHSYTWAQHEQQVGVLARELGFTHVSLSSEAMPMVRIVPRGHTACADAYLTPAIQRYVQGFCRGFQGQLKDVQVLFMRSDGGLAPMDTFSGSSAVLSGPAGGVVGYSATTYQQEGGQPVIGFDMGGTSTDVSRYAGEFEHVFEASTAGVTLQAPQLDINTVAAGGGSRLFFRSGLFVVGPESAGAHPGPACYRKGGPVTVTDANLVLGRLLPASFPCIFGPGENQPLSPEASRKALEAVATEVNSFLTNGPCPASPLSLEEVAMGFVRVANEAMCRPIRALTQVRPPLLSRLLLPPAFVERYMREFGFVIPERPVVVDDVRVRGTGRSGLRLEDAPKAQTGPPRVDKMTQCYFEGGYQETPVYLLAELGYGHKLHGPCLIIDSNSTILVEPGCQAEVTKTGDICISVGAEVPGTVGPQLDPIQLSIFSHRFMSIAEQMGRILQRTAISTNIKERLDFSCALFGPDGGLVSNAPHIPVHLGAMQETVQFQIQHLGADLHPGDVLLSNHPSAGGSHLPDLTVITPVFWPGQTRPVFYVASRGHHADIGGITPGSMPPHSTMLQQEGAVFLSFKLVQGGVFQEEAVTEALRAPGKVPNCSGTRNLHDNLSDLRAQVAANQKGIQLVGELIGQYGLDVVQAYMGHIQANAELAVRDMLRAFGTSRQARGLPLEVSSEDHMDDGSPIRLRVQISLSQGSAVFDFSGTGPEVFGNLNAPRAVTLSALIYCLRCLVGRDIPLNQGCLAPVRVVIPRGSILDPSPEAAVVGGNVLTSQRVVDVILGAFGACAASQGCMNNVTLGNAHMGYYETVAGGAGAGPSWHGRSGVHSHMTNTRITDPEILESRYPVILRRFELRRGSGGRGRFRGGDGVTRELLFREEALLSVLTERRAFRPYGLHGGEPGARGLNLLIRKNGRTVNLGGKTSVTVYPGDVFCLHTPGGGGYGDPEDPAPPPGSPPQALAFPEHGSVYEYRRAQEAV

SEQ ID NO: 1027679 - protein, 986 aa, Homo sapiens
GQPLDSSHIASIRMGTTVATNALLERKGERVALLVTRGFRDLLHIGTQARGDLFDLAVPMPEVLYEEVLEVDERVVLHRGEAGTGTPVKGRTGDLLEVQQPVDLGALRGKLEGLLSRGIRSLAVVLMHSYTWAQHEQQVGVLARELGFTHVSLSSEAMPMVRIVPRGHTACADAYLTPAIQRYVQGFCRGFQGQLKDVQVLFMRSDGGLAPMDTFSGSSAVLSGPAGGVVGYSATTYQQEGGQPVIGFDMGGTSTDVSRYAGEFEHVFEASTAGVTLQAPQLDINTVAAGGGSRLFFRSGLFVVGPESAGAHPGPACYRKGGPVTVTDANLVLGRLLPASFPCIFGPGENQPLSPEASRKALEAVATEVNSFLTNGPCPASPLSLEEVAMGFVRVANEAMCRPIRALTQVRPPLLSRLLLPPAFVERYMREFGFVIPERPVVVDDVRVRGTGRSGLRLEDAPKAQTGPPRVDKMTQCYFEGGYQETPVYLLAELGYGHKLHGPCLIIDSNSTILVEPGCQAEVTKTGDICISVGAEVPGTVGPQLDPIQLSIFSHRFMSIAEQMGRILQRTAISTNIKERLDFSCALFGPDGGLVSNAPHIPVHLGAMQETVQFQIQHLGADLHPGDVLLSNHPSAGGSHLPDLTVITPVFWPGQTRPVFYVASRGHHADIGGITPGSMPPHSTMLQQEGAVFLSFKLVQGGVFQEEAVTEALRAPGKVPNCSGTRNLHDNLSDLRAQVAANQKGIQLVGELIGQYGLDVVQAYMGHIQANAELAVRDMLRAFGTSRQARGLPLEVSSEDHMDDGSPIRLRVQISLSQGSAVFDFSGTGPEVFGNLNAPRAVTLSALIYCLRCLVGRDIPLNQGCLAPVRVVIPRGSILDPSPEAAVVGGNVLTSQRVVDVILGAFGACAASQGCMNNVTLGNAHMGYYETVAGGAGAGPSWHGRSGVHSHMTNTRITDPEILESRYPATASPASCSFVRRRCCQC

SEQ ID NO: 1027680 - protein, 131 aa, Homo sapiens [sequence omitted]

SEQ ID NO: 1027681 - protein, 76 aa, Homo sapiens
  misc_feature (10)..(10): Xaa can be any naturally occurring amino acid
  misc_feature (23)..(23): Xaa can be any naturally occurring amino acid
  misc_feature (26)..(26): Xaa can be any naturally occurring amino acid
  misc_feature (31)..(31): Xaa can be any naturally occurring amino acid
ELHSVASCTXPQPVPTFQLTLRXRLXLTTLXQDPGLCNSANSPFLPGFSQSLTLSTGFRVIKKKLYSSEQLLIEEC

SEQ ID NO: 1027682 - protein, 388 aa, Homo sapiens
RRHTYWPPRRPVAASRCWPVGATPLGSVGGRTGKMDAATLTYDTLRFAEFEDFPETSEPVWILGRKYSIFTEKDEILSDVASRLWFTYRKNFPAIGGTGPTSDTGWGCMLRCGQMIFAQALVCRHLGRDWRWTQRKRQPDSYFSVLNAFIDRKDSYYSIHQIAQMGVGEGKSIGQWYGPNTVAQVLKKLAVFDTWSSLAVHIAMDNTVVMEEIRRLCRTSVPCAGATAFPADSDRHCNGFPAGAEVTNRPSPWRPLVLLIPLRLGLTDINEAYVETLKHCFMMPQSLGVIGGKPNSAHYFIGYVGEELIYLDPHTTQPAVEPTDGCFIPDESFHCQHPPCRMSIAELDPSIAVVRGGHLSTQAFGAECCLGMTRKTFGFLRFFFSMLG

SEQ ID NO: 1027683 - protein, 95 aa, Homo sapiens
GVGACGVGLTGCLLPVGLWPVGPSGHEHFSLLSATTGGTGPTSDTGWGCMLRCGQMIFAQALVCRHLGRGESQPWGGRMATVFSGSKGDCGVRAL

SEQ ID NO: 1027684 - protein, 393 aa, Homo sapiens
MDAATLTYDTLRFAEFEDFPETSEPVWILGRKYSIFTEKDEILSDVASRLWFTYRKNFPAIGGTGPTSDTGWGCMLRCGQMIFAQALVCRHLGRDWRWTQRKRQPDSYFSVLNAFIDRKDSYYSIHQIAQMGVGEGKSIGQWYGPNTVAQVLKKLAVFDTWSSLAVHIAMDNTVVMEEIRRLCRTSVPCAGATAFPADSDRHCNGFPAGAEVTNRPSPWRPLVLLIPLRLGLTDINEAYVETLKHCFMMPQSLGVIGGKPNSAHYFIGYVGEELIYLDPHTTQPAVEPTDGCFIPDESFHCQHPPCRMSIAELDPSIAVGFFCKTEDDFNDWCQQVKKLSLLGGALPMFELVEQQPSHLACPDVLNLSLDSSDVERLERFFDSEDEDFEILSL

SEQ ID NO: 1027685 - protein, 141 aa, Homo sapiens
MKTLKSCPFENPGVGGGTCESLGLLVPLRFIHPARSPAEGCAPCCLPPEGHPLCSWTEAALPGRPYCLVSDCPAQSARQGLCIRTRSRLLGASRVFSRHCQPRVSTWASVPLAPRRRFCGWFGIKVLFEVVRHRHEFLGAP

SEQ ID NO: 1027686 - protein, 141 aa, Homo sapiens; identical to SEQ ID NO: 1027685

SEQ ID NO: 1027687 - protein, 538 aa, Homo sapiens
MDAATLTYDTLRFAEFEDFPETSEPVWILGRKYSIFTEKDEILSDVASRLWFTYRKNFPAIGGTGPTSDTGWGCMLRCGQMIFAQALVCRHLGRDWRWTQRKRQPDSYFSVLNAFIDRKDSYYSIHQIAQMGVGEGKSIGQWYGPNTVAQVLKKLAVFDTWSSLAVHIAMDNTVVMEEIRRLCRTSVPCAGATAFPADSDRHCNGFPAGAEVTNRPSPWRPLVLLIPLRLGLTDINEAYVETLKHCFMMPQSLGVIGGKPNSAHYFIGYVGEELIYLDPHTTQPAVEPTDGCFIPDESFHCQHPPCRMSIAELDPSIAVGFFCKTEDDFNDWCQQVKKLSLLGGALPMFELVEQQPSHLACPDVLNLSLGESCQVQVGSLGGTICALASPVLAPLVLTIKVCVSLSREHLAVVLPVRPGMEWSVPSSKLAPSSPGPTSSSPPALPAGALWSWACYHGVLRGLEQTEHAGSVVTQSWVGDWFTWAPLAMGGVDPSDHGQRAAGAGLGSCSEVSGRERVLLISVSLWKTLQTRQWQWNHS

SEQ ID NO: 1027688 - protein, 393 aa, Homo sapiens; identical to SEQ ID NO: 1027684

SEQ ID NO: 1027689 - protein, 141 aa, Homo sapiens; identical to SEQ ID NO: 1027685

SEQ ID NO: 1027690 - protein, 141 aa, Homo sapiens; identical to SEQ ID NO: 1027685

SEQ ID NO: 1027691 - protein, 141 aa, Homo sapiens; identical to SEQ ID NO: 1027685

SEQ ID NO: 1027692 - protein, 141 aa, Homo sapiens; identical to SEQ ID NO: 1027685

SEQ ID NO: 1027693 - protein, 238 aa, Homo sapiens
ARYEAEYEAGRGGKMDAATLTYDTLRFAEFEDFPETSEPVWILGRKYSIFTEKDEILSDVASRLWFTYRKNFPAIGGTGPTSDTGWGCMLRCGQMIFAQALVCRHLGRDWRWTQRKRQPDSYFSVLNAFIDRKDSYYSIHQIGRLCRTSVPCAGATAFPADSDRHCNGFPAGAEVTNRPSPWRPLVLLIPLRLGLTDINEAYVETLKHCFMMPQSLGVIGGKPNSAHYFIGYVGEELI

SEQ ID NO: 1027694 - protein, 182 aa, Homo sapiens
ARYEAEYEAGRGGKMDAATLTYDTLRFAEFEDFPETSEPVWILGRKYSIFTEKDEILSDVASRLWFTYRKNFPAIGGTGPTSDTGWGCMLRCGQMIFAQALVCRHLGRDWRWTQRKRQPDSYFSVLNAFIDRKDSYYSIHQIGGRLQNVPGPTRAVWRGWSGRFPLRAFLVSWDVEQEAVNL

SEQ ID NO: 1027695 - protein, 380 aa, Homo sapiens [sequence omitted]

SEQ ID NO: 1027696 - protein, 538 aa, Homo sapiens; identical to SEQ ID NO: 1027687

SEQ ID NO: 1027697 - protein, 380 aa, Homo sapiens [sequence omitted]

SEQ ID NO: 1027698 - protein, 457 aa, Homo sapiens
RRHTYWPPRRPVAASRCWPVGATPLGSVGGRTGKMDAATLTYDTLRFAEFEDFPETSEPVWILGRKYSIFTEKDEILSDVASRLWFTYRKNFPAIGGTGPTSDTGWGCMLRCGQMIFAQALVCRHLGRDWRWTQRKRQPDSYFSVLNAFIDRKDSYYSIHQIAQMGVGEGKSIGQWYGPNTVAQVLKKLAVFDTWSSLAVHIAMDNTVVMEEIRRLCRTSVPCAGATAFPADSDRHCNGFPAGAEVTNRPSPWRPLVLLIPLRLGLTDINEAYVETLKHCFMMPQSLGVIGGKPNSAHYFIGYVGEELIYLDPHTTQPAVEPTDGCFIPDESFHCQHPPCRMSIAELDPSIAVGFFCKTEDDFNDWCQQVKKLSLLGGALPMFELVEQQPSHLACPDVLNLSLVENPGVGGGTVRAWALVRGFIIRRGAARWAERPPGAGAVEGGPGEWCESPREGS

SEQ ID NO: 1027699 - protein, 405 aa, Homo sapiens
RLLPCQVKALSRATSRTPAHISCQAPSLPASPKPTSDMKLPWAEPADWVSCACGMSCGLSWTVSSLVPCPLLSPLVSPSWASAGPWAPYGSGWGDRLLPPGTCAQSPAPPQHCFMMPQSLGVIGGKPNSAHYFIGYVGEELIYLDPHTTQPAVEPTDGCFIPDESFHCQHPPCRMSIAELDPSIAVGFFCKTEDDFNDWCQQVKKLSLLGGALPMFELVEQQPSHLACPDVLNLSLGESCQVQVGSLGGTICALASPVLAPLVLTIKVCVSLSREHLAVVLPVRPGMEWSVPSSKLAPSSPGPTSSSPPALPAGALWSWACYHGVLRGLEQTEHAGSVVTQSWVGDWFTWAPLAMGGVDPSDHGQRAAGAGLGSCSEVSGRERVLLISVSLWKTLQTRQWQWNHS

SEQ ID NO: 1027700 - protein, 376 aa, Homo sapiens
GRWTQVLLNVMQDFSQPLWQPETSGWRGPCPGLAWVQARRRRYPIYLVHRCGTWFALWHGYHGKMDAATLTYDTLRFAEFEDFPETSEPVWILGRKYSIFTEKDEILSDVASRLWFTYRKNFPAIGGTGPTSDTGWGCMLRCGQMIFAQALVCRHLGRDWRWTQRKRQPDSYFSVLNAFIDRKDSYYSIHQIAQMGVGEGKSIGQWYGPNTVAQVLKKLAVFDTWSSLAVHIAMDNTVVMEEISKWLRVSMDKKVEITGQHTTLPRLSPTGASASVVSRPMPCRCSVGPVRQARCTVASLSYPGGHTKRGEPRLSGGRDLVSHVVFVSWLQIVYEGPAVLRRPRVGILVKLFACLDVRQRDVATISSCTISSKGTS

SEQ ID NO: 1027701 - protein, 393 aa, Homo sapiens; identical to SEQ ID NO: 1027684

SEQ ID NO: 1027702 - protein, 393 aa, Homo sapiens; identical to SEQ ID NO: 1027684

SEQ ID NO: 1027703 - protein, 393 aa, Homo sapiens; identical to SEQ ID NO: 1027684

SEQ ID NO: 1027704 - protein, 141 aa, Homo sapiens; identical to SEQ ID NO: 1027685

SEQ ID NO: 1027705 - protein, 141 aa, Homo sapiens; identical to SEQ ID NO: 1027685

SEQ ID NO: 1027706 - protein, 141 aa, Homo sapiens; identical to SEQ ID NO: 1027685

SEQ ID NO: 1027707 - protein, 141 aa, Homo sapiens; identical to SEQ ID NO: 1027685

SEQ ID NO: 1027708 - protein, 419 aa, Homo sapiens
RRHTYWPPRRPVAASRCWPVGATPLGSVGGRTGKMDAATLTYDTLRFAEFEDFPETSEPVWILGRKYSIFTEKDEILSDVASRLWFTYRKNFPAIGGTGPTSDTGWGCMLRCGQMIFAQALVCRHLGRDWRWTQRKRQPDSYFSVLNAFIDRKDSYYSIHQIAQMGVGEGKSIGQWYGPNTVAQVLKKLAVFDTWSSLAVHIAMDNTVVMEEIRRLCRTSVPCAGATAFPADSDRHCNGFPAGAEVTNRPSPWRPLVLLIPLRLGLTDINEAYVETLKHCFMMPQSLGVIGGKPNSAHYFIGYVGEELIYLDPHTTQPAVEPTDGCFIPDESFHCQHPPCRMSIAELDPSIAVGFFCKTEDDFNDWCQQVKKLSLLGGALPMFELVEQQPSHLACPDVLNLSLGESCQVQVGSLGILLM

SEQ ID NO: 1027709 - protein, 141 aa, Homo sapiens; identical to SEQ ID NO: 1027685

SEQ ID NO: 1027710 - protein, 428 aa, Homo sapiens
RRHTYWPPRRPVAASRCWPVGATPLGSVGGRTGKMDAATLTYDTLRFAEFEDFPETSEPVWILGRKYSIFTEKDEILSDVASRLWFTYRKNFPAIGGTGPTSDTGWGCMLRCGQMIFAQALVCRHLGRDWRWTQRKRQPDSYFSVLNAFIDRKDSYYSIHQIAQMGVGEGKSIGQWYGPNTVAQVLKKLAVFDTWSSLAVHIAMDNTVVMEEIRRLCRTSVPCAGATAFPADSDRHCNGFPAGAEVTNRPSPWRPLVLLIPLRLGLTDINEAYVETLKHCFMMPQSLGVIGGKPNSAHYFIGYVGEELIYLDPHTTQPAVEPTDGCFIPDESFHCQHPPCRMSIAELDPSIAVGFFCKTEDDFNDWCQQVKKLSLLGGALPMFELVEQQPSHLACPDVLNLSLDSSDVERLERFFDSEDEDFEILSLC

SEQ ID NO: 1027711 - protein, 382 aa, Homo sapiens
RRHTYWPPRRPVAASRCWPVGATPLGSVGGRTGKMDAATLTYDTLRFAEFEDFPETSEPVWILGRKYSIFTEKDEILSDVASRLWFTYRKNFPAIGGTGPTSDTGWGCMLRCGQMIFAQALVCRHLGRDWRWTQRKRQPDSYFSVLNAFIDRKDSYYSIHQIAQMGVGEGKSIGQWYGPNTVAQVLKKLAVFDTWSSLAVHIAMDNTVVMEEIRRLCRTSVPCAGATAFPADSDRHCNGFPAGAEVTNRPSPWRPLVLLIPLRLGLTDINEAYVETLKHCFMMPQSLGVIGGKPNSAHYFIGYVGEELIYLDPHTTQPAVEPTDGCFIPDESFHCQHPPCRMSIAELDPSIAVGKQGRLVRSPFLGLHVRVHGAPLCWELQW

SEQ ID NO: 1027712 - protein, 281 aa, Homo sapiens [sequence omitted]

SEQ ID NO: 1027713 - protein, 1116 aa, Homo sapiens
MVLLEDSGSADFRRHFVNLSPFTITVVLLLSACFVTSSLGGTDKELRLVDGENKCSGRVEVKVQEEWGTVCNNGWSMEAVSVICNQLGCPTAIKAPGWANSSAGSGRIWMDHVSCRGNESALWDCKHDGWGKHSNCTHQQDAGVTCSDGSNLEMRLTRGGNMCSGRIEIKFQGRWGTVCDDNFNIDHASVICRQLECGSAVSFSGSSNFGEGSGPIWFDDLICNGNESALWNCKHQGWGKHNCDHAEDAGVICSKGADLSLRLVDGVTECSGRLEVRFQGEWGTICDDGWDSYDAAVACKQLGCPTAVTAIGRVNASKGFGHIWLDSVSCQGHEPAVWQCKHHEWGKHYCNHNEDAGVTCSDGSDLELRLRGGGSRCAGTVEVEIQRLLGKVCDRGWGLKEADVVCRQLGCGSALKTSYQVYSKIQATNTWLFLSSCNGNETSLWDCKNWQWGGLTCDHYEEAKITCSAHREPRLVGGDIPCSGRVEVKHGDTWGSICDSDFSLEAASVLCRELQCGTVVSILGGAHFGEGNGQIWAEEFQCEGHESHLSLCPVAPRPEGTCSHSRDVGVVCSRYTEIRLVNGKTPCEGRVELKTLGAWGSLCNSHWDIEDAHVLCQQLKCGVALSTPGGARFGKGNGQIWRHMFHCTGTEQHMGDCPVTALGASLCPSEQVASVICSGNQSQTLSSCNSSSLGPTRPTIPEESAVACIESGQLRLVNGGGRCAGRVEIYHEGSWGTICDDSWDLSDAHVVCRQLGCGEAINATGSAHFGEGTGPIWLDEMKCNGKESRIWQCHSHGWGQQNCRHKEDAGVICSEFMSLRLTSEASREACAGRLEVFYNGAWGTVGKSSMSETTVGVVCRQLGCADKGKINPASLDKAMSIPMWVDNVQCPKGPDTLWQCPSSPWEKRLASPSEETWITCDNKIRLQEGPTSCSGRVEIWHGGSWGTVCDDSWDLDDAQVVCQQLGCGPALKAFKEAEFGQGTGPIWLNEVKCKGNESSLWDCPARRWGHSECGHKEDAAVNCTDISVQKTPQKATTGRSSRQSSFIAVGILGVVLLAIFVALFFLTKKRRQRQRLAVSSRGENLVHQIQYREMNSCLNADDLDLMNSSGGHSEPH

SEQ ID NO: 1027714 - protein, 1149 aa, Homo sapiens [sequence omitted]

SEQ ID NO: 1027715 - protein, 1151 aa, Homo sapiens
MVLLEDSGSADFRRHFVNLSPFTITVVLLLSACFVTSSLGGTDKELRLVDGENKCSGRVEVKVQEEWGTVCNNGWSMEAVSVICNQLGCPTAIKAPGWANSSAGSGRIWMDHVSCRGNESALWDCKHDGWGKHSNCTHQQDAGVTCSDGSNLEMRLTRGGNMCSGRIEIKFQGRWGTVCDDNFNIDHASVICRQLECGSAVSFSGSSNFGEGSGPIWFDDLICNGNESALWNCKHQGWGKHNCDHAEDAGVICSKGADLSLRLVDGVTECSGRLEVRFQGEWGTICDDGWDSYDAAVACKQLGCPTAVTAIGRVNASKGFGHIWLDSVSCQGHEPAVWQCKHHEWGKHYCNHNEDAGVTCSDGSDLELRLRGGGSRCAGTVEVEIQRLLGKVCDRGWGLKEADVVCRQLGCGSALKTSYQVYSKIQATNTWLFLSSCNGNETSLWDCKNWQWGGLTCDHYEEAKITCSAHREPRLVGGDIPCSGRVEVKHGDTWGSICDSDFSLEAASVLCRELQCGTVVSILGGAHFGEGNGQIWAEEFQCEGHESHLSLCPVAPRPEGTCSHSRDVGVVCSRYTEIRLVNGKTPCEGRVELKTLGAWGSLCNSHWDIEDAHVLCQQLKCGVALSTPGGARFGKGNGQIWRHMFHCTGTEQHMGDCPVTALGASLCPSEQVASVICSGNQSQTLSSCNSSSLGPTRPTIPEESAVACIESGQLRLVNGGGRCAGRVEIYHEGSWGTICDDSWDLSDAHVVCRQLGCGEAINATGSAHFGEGTGPIWLDEMKCNGKESRIWQCHSHGWGQQNCRHKEDAGVICSEFMSLRLTSEASREACAGRLEVFYNGAWGTVGKSSMSETTVGVVCRQLGCADKGKINPASLDKAMSIPMWVDNVQCPKGPDTLWQCPSSPWEKRLASPSEETWITCDNKIRLQEGPTSCSGRVEIWHGGSWGTVCDDSWDLDDAQVVCQQLGCGPALKAFKEAEFGQGTGPIWLNEVKCKGNESSLWDCPARRWGHSECGHKEDAAVNCTDISVQKTPQKATTGRSSRQSSFIAVGILGVVLLAIFVALFFLTKKRRQRQRLAVSSRGENLVHQIQYREMNSCLNADDLDLMNSSENSHESADFSAAELISVSKFLPISGMEKEAILSHTEKENGNL

SEQ ID NO: 1027716 - protein, 112 aa, Homo sapiens
MVLLEDSGSADFRRHFVNLSPFTITVVLLLSACFVTSSLGGTDKELRLVDGENKCSGRVEVKVQEEWGTVCNNGWSMEAVSVICNQLGCPTASRTCTGISPSRGFDSSWTSQ

SEQ ID NO: 1027717 - protein, 473 aa, Homo sapiens [sequence omitted]

SEQ ID NO: 1027718 - protein, 1116 aa, Homo sapiens; identical to SEQ ID NO: 1027713

SEQ ID NO: 1027719 - protein, 1169 aa, Homo sapiens
MSKLRMVLLEDSGSADFRRHFVNLSPFTITVVLLLSACFVTSSLGGTDKELRLVDGENKCSGRVEVKVQEEWGTVCNNGWSMEAVSVICNQLGCPTAIKAPGWANSSAGSGRIWMDHVSCRGNESALWDCKHDGWGKHSNCTHQQDAGVTCSDGSNLEMRLTRGGNMCSGRIEIKFQGRWGTVCDDNFNIDHASVICRQLECGSAVSFSGSSNFGEGSGPIWFDDLICNGNESALWNCKHQGWGKHNCDHAEDAGVICSKGADLSLRLVDGVTECSGRLEVRFQGEWGTICDDGWDSYDAAVACKQLGCPTAVTAIGRVNASKGFGHIWLDSVSCQGHEPAVWQCKHHEWGKHYCNHNEDAGVTCSDGSDLELRLRGGGSRCAGTVEVEIQRLLGKVCDRGWGLKEADVVCRQLGCGSALKTSYQVYSKIQATNTWLFLSSCNGNETSLWDCKNWQWGGLTCDHYEEAKITCSAHREPRLVGGDIPCSGRVEVKHGDTWGSICDSDFSLEAASVLCRELQCGTVVSILGGAHFGEGNGQIWAEEFQCEGHESHLSLCPVAPRPEGTCSHSRDVGVVCSRYTEIRLVNGKTPCEGRVELKTLGAWGSLCNSHWDIEDAHVLCQQLKCGVALSTPGGARFGKGNGQIWRHMFHCTGTEQHMGDCPVTALGASLCPSEQVASVICSGNQSQTLSSCNSSSLGPTRPTIPEESAVACIESGQLRLVNGGGRCAGRVEIYHEGSWGTICDDSWDLSDAHVVCRQLGCGEAINATGSAHFGEGTGPIWLDEMKCNGKESRIWQCHSHGWGQQNCRHKEDAGVICSEFMSLRLTSEASREACAGRLEVFYNGAWGTVGKSSMSETTVGVVCRQLGCADKGKINPASLDKAMSIPMWVDNVQCPKGPDTLWQCPSSPWEKRLASPSEETWITCDNKIRLQEGPTSCSGRVEIWHGGSWGTVCDDSWDLDDAQVVCQQLGCGPALKAFKEAEFGQGTGPIWLNEVKCKGNESSLWDCPARRWGHSECGHKEDAAVNCTDISVQKTPQKATTGRSSRQSSFIAVGILGVVLLAIFVALFFLTKKRRQRQRLAVSSRGENLVHQIQYREMNSCLNADDLDLMNSSGGHSEPHWKTWTIEWSRNSPLSLTITVAFLWSSSSPRIPKTAAEFIKIKFVNVTT

SEQ ID NO: 1027720 - protein, 1050 aa, Homo sapiens
MVLLEDSGSADFRRHFVNLSPFTITVVLLLSACFVTSSLGGTDKELRLVDGENKCSGRVEVKVQEEWGTVCNNGWSMEAVSVICNQLGCPTAIKAPGWANSSAGSGRIWMDHVSCRGNESALWDCKHDGWGKHSNCTHQQDAGVTCSDGSNLEMRLTRGGNMCSGRIEIKFQGRWGTVCDDNFNIDHASVICRQLECGSAVSFSGSSNFGEGSGPIWFDDLICNGNESALWNCKHQGWGKHNCDHAEDAGVICSKGADLSLRLVDGVTECSGRLEVRFQGEWGTICDDGWDSYDAAVACKQLGCPTAVTAIGRVNASKGFGHIWLDSVSCQGHEPAVWQCKHHEWGKHYCNHNEDAGVTCSDGSDLELRLRGGGSRCAGTVEVEIQRLLGKVCDRGWGLKEADVVCRQLGCGSALKTSYQVYSKIQATNTWLFLSSCNGNETSLWDCKNWQWGGLTCDHYEEAKITCSAHREPRLVGGDIPCSGRVEVKHGDTWGSICDSDFSLEAASVLCRELQCGTVVSILGGAHFGEGNGQIWAEEFQCEGHESHLSLCPVAPRPEGTCSHSRDVGVVCSRYTEIRLVNGKTPCEGRVELKTLGAWGSLCNSHWDIEDAHVLCQQLKCGVALSTPGGARFGKGNGQIWRHMFHCTGTEQHMGDCPVTALGASLCPSEQVASVICSGNQSQTLSSCNSSSLGPTRPTIPEESAVACIESGQLRLVNGGGRCAGRVEIYHEGSWGTICDDSWDLSDAHVVCRQLGCGEAINATGSAHFGEGTGPIWLDEMKCNGKESRIWQCHSHGWGQQNCRHKEDAGVICSEFMSLRLTSEASREACAGRLEVFYNGAWGTVGKSSMSETTVGVVCRQLGCADKGKINPASLDKAMSIPMWVDNVQCPKGPDTLWQCPSSPWEKRLASPSEETWITCDNKIRLQEGPTSCSGRVEIWHGGSWGTVCDDSWDLDDAQVVCQQLGCGPALKAFKEAEFGQGTGPIWLNEVKCKGNESSLWDCPARRWGHSECGHKEDAAVNCTDISVQKTPQKATKKIPMSQLISVLLN

SEQ ID NO: 1027721 - protein, 931 aa, Homo sapiens
MVLLEDSGSADFRRHFVNLSPFTITVVLLLSACFVTSSLGGTDKELRLVDGENKCSGRVEVKVQEEWGTVCNNGWSMEAVSVICNQLGCPTAIKAPGWANSSAGSGRIWMDHVSCRGNESALWDCKHDGWGKHSNCTHQQDAGVTCSDGSNLEMRLTRGGNMCSGRIEIKFQGRWGTVCDDNFNIDHASVICRQLECGSAVSFSGSSNFGEGSGPIWFDDLICNGNESALWNCKHQGWGKHNCDHAEDAGVICSKGADLSLRLVDGVTECSGRLEVRFQGEWGTICDDGWDSYDAAVACKQLGCPTAVTAIGRVNASKGFGHIWLDSVSCQGHEPAVWQCKHHEWGKHYCNHNEDAGVTCSDGSDLELRLRGGGSRCAGTVEVEIQRLLGKVCDRGWGLKEADVVCRQLGCGSALKTSYQVYSKIQATNTWLFLSSCNGNETSLWDCKNWQWGGLTCDHYEEAKITCSAHREPRLVGGDIPCSGRVEVKHGDTWGSICDSDFSLEAASVLCRELQCGTVVSILGGAHFGEGNGQIWAEEFQCEGHESHLSLCPVAPRPEGTCSHSRDVGVVCSRYTEIRLVNGKTPCEGRVELKTLGAWGSLCNSHWDIEDAHVLCQQLKCGVALSTPGGARFGKGNGQIWRHMFHCTGTEQHMGDCPVTALGASLCPSEQVASVICSGNQSQTLSSCNSSSLGPTRPTIPEESAVACIESGQLRLVNGGGRCAGRVEIYHEGSWGTICDDSWDLSDAHVVCRQLGCGEAINATGSAHFGEGTGPIWLDEMKCNGKESRIWQCHSHGWGQQNCRHKEDAGVICSEFMSLRLTSEASREACAGRLEVFYNGAWGTVGKSSMSETTVGVVCRQLGCADKGKINPASLDKAMSIPMWVDNVQCPKGPDTLWQCPSSPWEKRLASPSEETWITCDSYMSLIFQTR

SEQ ID NO: 1027722 - protein, 1059 aa, Homo sapiens
MVLLEDSGSADFRRHFVNLSPFTITVVLLLSACFVTSSLGGTDKELRLVDGENKCSGRVEVKVQEEWGTVCNNGWSMEAVSVICNQLGCPTAIKAPGWANSSAGSGRIWMDHVSCRGNESALWDCKHDGWGKHSNCTHQQDAGVTCSDGSNLEMRLTRGGNMCSGRIEIKFQGRWGTVCDDNFNIDHASVICRQLECGSAVSFSGSSNFGEGSGPIWFDDLICNGNESALWNCKHQGWGKHNCDHAEDAGVICSKGADLSLRLVDGVTECSGRLEVRFQGEWGTICDDGWDSYDAAVACKQLGCPTAVTAIGRVNASKGFGHIWLDSVSCQGHEPAVWQCKHHEWGKHYCNHNEDAGVTCSDGSDLELRLRGGGSRCAGTVEVEIQRLLGKVCDRGWGLKEADVVCRQLGCGSALKTSYQVYSKIQATNTWLFLSSCNGNETSLWDCKNWQWGGLTCDHYEEAKITCSAHREPRLVGGDIPCSGRVEVKHGDTWGSICDSDFSLEAASVLCRELQCGTVVSILGGAHFGEGNGQIWAEEFQCEGHESHLSLCPVAPRPEGTCSHSRDVGVVCSRYTEIRLVNGKTPCEGRVELKTLGAWGSLCNSHWDIEDAHVLCQQLKCGVALSTPGGARFGKGNGQIWRHMFHCTGTEQHMGDCPVTALGASLCPSEQVASVICSGNQSQTLSSCNSSSLGPTRPTIPEESAVACIESGQLRLVNGGGRCAGRVEIYHEGSWGTICDDSWDLSDAHVVCRQLGCGEAINATGSAHFGEGTGPIWLDEMKCNGKESRIWQCHSHGWGQQNCRHKEDAGVICSEFMSLRLTSEASREACAGRLEVFYNGAWGTVGKSSMSETTVGVVCRQLGCADKGKINPASLDKAMSIPMWVDNVQCPKGPDTLWQCPSSPWEKRLASPSEETWITCDNKIRLQEGPTSCSGRVEIWHGGSWGTVCDDSWDLDDAQVVCQQLGCGPALKAFKEAEFGQGTGPIWLNEVKCKGNESSLWDCPARRWGHSECGHKEDAAVNCTGKCQKPGLSLESLAARGLGSDVCCACRIRYQLDSY

SEQ ID NO: 1027723 - protein, 257 aa, Homo sapiens [sequence omitted]

SEQ ID NO: 1027724 - protein, 1116 aa, Homo sapiens; identical to SEQ ID NO: 1027713

SEQ ID NO: 1027725 - protein, 1156 aa, Homo sapiens
MVLLEDSGSADFRRHFVNLSPFTITVVLLLSACFVTSSLGGTDKELRLVDGENKCSGRVEVKVQEEWGTVCNNGWSMEAVSVICNQLGCPTAIKAPGWANSSAGSGRIWMDHVSCRGNESALWDCKHDGWGKHSNCTHQQDAGVTCSDGSNLEMRLTRGGNMCSGRIEIKFQGRWGTVCDDNFNIDHASVICRQLECGSAVSFSGSSNFGEGSGPIWFDDLICNGNESALWNCKHQGWGKHNCDHAEDAGVICSKGADLSLRLVDGVTECSGRLEVRFQGEWGTICDDGWDSYDAAVACKQLGCPTAVTAIGRVNASKGFGHIWLDSVSCQGHEPAVWQCKHHEWGKHYCNHNEDAGVTCSDGSDLELRLRGGGSRCAGTVEVEIQRLLGKVCDRGWGLKEADVVCRQLGCGSALKTSYQVYSKIQATNTWLFLSSCNGNETSLWDCKNWQWGGLTCDHYEEAKITCSAHREPRLVGGDIPCSGRVEVKHGDTWGSICDSDFSLEAASVLCRELQCGTVVSILGGAHFGEGNGQIWAEEFQCEGHESHLSLCPVAPRPEGTCSHSRDVGVVCSRYTEIRLVNGKTPCEGRVELKTLGAWGSLCNSHWDIEDAHVLCQQLKCGVALSTPGGARFGKGNGQIWRHMFHCTGTEQHMGDCPVTALGASLCPSEQVASVICSGNQSQTLSSCNSSSLGPTRPTIPEESAVACIESGQLRLVNGGGRCAGRVEIYHEGSWGTICDDSWDLSDAHVVCRQLGCGEAINATGSAHFGEGTGPIWLDEMKCNGKESRIWQCHSHGWGQQNCRHKEDAGVICSEFMSLRLTSEASREACAGRLEVFYNGAWGTVGKSSMSETTVGVVCRQLGCADKGKINPASLDKAMSIPMWVDNVQCPKGPDTLWQCPSSPWEKRLASPSEETWITCDNKIRLQEGPTSCSGRVEIWHGGSWGTVCDDSWDLDDAQVVCQQLGCGPALKAFKEAEFGQGTGPIWLNEVKCKGNESSLWDCPARRWGHSECGHKEDAAVNCTDISVQKTPQKATTGRSSRQSSFIAVGILGVVLLAIFVALFFLTKKRRQRQRLAVSSRGENLVHQIQYREMNSCLNADDLDLMNSSGLWVLGGSIAQGFRSVAAVEAQTFYFDKQLKKSKNVIGSLDAYNGQE

SEQ ID NO: 1027726 - protein, 1151 aa, Homo sapiens; identical to SEQ ID NO: 1027715

SEQ ID NO: 1027727 - protein, 314 aa, Homo sapiens
MALAARLWRLLPFRRGAAPGSRLPAGPSGSRGIAAPARFRGFEVMGNPGTFNRGLLLSALSYLGFETYQVISQAAVVHATAKVEEILEQADYLYESGETEKLYQLLTQYKESEDAELLWRLARASRDVAQLSRTSEEEKKLLVYEALEYAKRALEKNESSFASHKWYAICLSDVGDYEGIKAKIANAYIIKEHFEKAIELNPKDATSIHLMGIWCYTFAEMPWYQRRIAKMLFATPPSSTYEKALGYFHRAEQVDPNFYSKNLLLLGKTYLKLHNKKLAAFWLMKAKDYPAHTEEDKQIQTEAAQLLTSFSEKN

SEQ ID NO: 1027728 - protein, 396 aa, Homo sapiens
MALAARLWRLLPFRRGAAPGSRLPAGTSGSRGHCGPCRFRGFEVMGNPGTFKRGLLLSALSYLGFETYQVISQAAVVHATAKVEEILEQADYLYESGETEKLYQLLTQYKESEDAELLWRLARASRDVAQLSRTSEEEKKLLVYEALEYAKRALEKNESSFASHKWYAICLSDVGDYEGIKAKIANAYIIKEHFEKAIELNPKDATSIHLMGIWCYTFAEMPWYQRRIAKMLFATPPSSTYEKALGYFHRAEQVDPNFYSKNLLLLGKTYLKLHNKKLAAFWLMKAKDYPAHTEEDKQEPDSPRVTLVRDVSPLRVRPITENKPQESLTFSFPCSPHLIVLVWIPELTAGLRCLFPHVHVYQSLKITRVFIIRIWKRSLFNQADLCLSFVFTMNSE

SEQ ID NO: 1027729 - protein, 360 aa, Homo sapiens
MALAARLWRLLPFRRGAAPGSRLPAGTSGSRGHCGPCRFRGFEVMGNPGTFKRGLLLSALSYLGFETYQVISQAAVVHATAKESRCVTEGECGGAISAHCNHCLLGSSDPPTSASQVAGITGMCHDATVEEILEQADYLYESGETEKLYQLLTQYKESEDAELLWRLARASRDVAQLSRTSEEEKKLLVYEALEYAKRALEKNESSFASHKWYAICLSDVGDYEGIKAKIANAYIIKEHFEKAIELNPKDATSIHLMGIWCYTFAEMPWYQRRIAKMLFATPPSSTYEKALGYFHRAEQVDPNFYSKNLLLLGKTYLKLHNKKLAAFWLMKAKDYPAHTEEDKQIQTEAAQLLTSFSEKN

SEQ ID NO: 1027730 - protein, 314 aa, Homo sapiens
MALAARLWRLLPFRRGAAPGSRLPAGTSGSRGHCGPCRFRGFEVMGNPGTFKRGLLLSALSYLGFETYQVISQAAVVHATAKVEEILEQADYLYESGETEKLYQLLTQYKESEDAELLWRLARASRDVAQLSRTSEEEKKLLVYEALEYAKRALEKNESSFASHKWYAICLSDVGDYEGIKAKIANAYIIKEHFEKAIELNPKDATSIHLMGIWCYTFAEMPWYQRRIAKMLFATPPSSTYEKALGYFHRAEQVDPNFYSKNLLLLGKTYLKLHNKKLAAFWLMKAKDYPAHTEEDKQIQTEAAQLLTSFSEKN

SEQ ID NO: 1027731 - protein, 70 aa, Homo sapiens
  misc_feature (4)..(4): Xaa can be any naturally occurring amino acid
FSSXSEHVGCAVQEAEVVQGQPASCRSWRWLLDCGAFCLSDVEPPRGLVSLRGLRAAAGIAAPVDSAASR

SEQ ID NO: 1027732 - protein, 314 aa, Homo sapiens; identical to SEQ ID NO: 1027730

SEQ ID NO: 1027733 - protein, 299 aa, Homo sapiens
MALAARLWRLLPFRRGAAPGSRLPAGTSGSRGHCGPCRFRGFEVMGNPGTFKRGLLLSALSYLGFETYQVISQAAVVHATAKVEEILEQADYLYESGETEKLYQLLTQYKESEDAELLWRLARASRDVAQLSRTSEEEKKLLVYEALEYAKRALEKNESSFASHKWYAICLSDVGDYEGIKAKIANAYIIKEHFEKAIELNPKDATSIHLMGIWCYTFAEMPWYQRRIAKMLFATPPSSTYEKALGYFHRAEQVDPNFYSKNLLLLGKTYLKLHNKKLAAFWLMKAKDYPAHTEEDKQA

SEQ ID NO: 1027734 - protein, 372 aa, Homo sapiens
MALAARLWRLLPFRRGAAPGSRLPAGTSGSRGHCGPCRFRGFEVMGNPGTFKRGLLLSALSYLGFETYQVISQAAVVHATAKVEEILEQADYLYESGETEKLYQLLTQYKESEDAELLWRLARASRDVAQLSRTSEEEKKLLVYEALEYAKRALEKNESSFASHKWYAICLSDVGDYEGIKAKIANAYIIKEHFEKAIELNPKDATSIHLMGIWCYTFAEMPWYQRRIAKMLFATPPSSTYEKALGYFHRAEQVDPNFYSKNLLLLGKTYLKLHNKKLAAFWLMKAKDYPAHTEEDKQEPDSPRVTLVRDVSPLRVRPITENKPQESLTFSFPCSPHLIVLVWIPELTAGLRCLFPHVHVYQRFCVASPSAS

SEQ ID NO: 1027735 - protein, 234 aa, Homo sapiens
MEVEEILEQADYLYESGETEKLYQLLTQYKESEDAELLWRLARASRDVAQLSRTSEEEKKLLVYEALEYAKRALEKNESSFASHKWYAICLSDVGDYEGIKAKIANAYIIKEHFEKAIELNPKDATSIHLMGIWCYTFAEMPWYQRRIAKMLFATPPSSTYEKALGYFHRAEQVDPNFYSKNLLLLGKTYLKLHNKKLAAFWLMKAKDYPAHTEEDKQIQTEAAQLLTSFSEKN

SEQ ID NO: 1027736 - protein, 167 aa, Homo sapiens
MALAARLWRLLPFRRGAAPGSRLPAGTSGSRGHCGPCRFRGFEVMGNPGTFKRGLLLSALSYLGFETYQVISQAAVVHATAKVEEILEQADYLYESGETEKLYQLLTQYKESEDAELLWRLARASRDVAQLSRTSEEEKKLLVYEALEYAKRALEKNESSFASHKSN

SEQ ID NO: 1027737 - protein, 301 aa, Homo sapiens
MALAARLWRLLPFRRGAAPGSRLPAGTSGSRGHCGPCRFRGFEVMGNPGTFKRGLLLSALSYLGFETYQVISQAAVVHATAKVEEILEQADYLYESGETEKLYQLLTQYKESEDAELLWRLARASRDVAQLSRTSEEEKKLLVYEALEYAKRALEKNESSFASHKWYAICLSDVGDYEGIKAKIANAYIIKEHFEKAIELNPKDATSIHLMGIWCYTFAEMPWYQRRIAKMLFATPPSSTYEKALGYFHRAEQGKTYLKLHNKKLAAFWLMKAKDYPAHTEEDKQIQTEAAQLLTSFSEKN

SEQ ID NO: 1027738 - protein, 314 aa, Homo sapiens; identical to SEQ ID NO: 1027727

SEQ ID NO: 1027739 - protein, 242 aa, Homo sapiens
MGNPGTFKRGLLLSALSYLGFETYQVISQAAVVHATAKVEEILEQADYLYESGETEKLYQLLTQYKESEDAELLWRLARASRDVAQLSRTSEEEKKLLVYEALEYAKRALEKNESSFASHKWYAICLSDVGDYEGIKAKIANAYIIKEHFEKAIELNPKDATSIHLMGIWCYTFAEMPWYQRRIAKMLFATPPSSTYEKALGYFHRAEQGKTYLKLHNKKLAAFWLMKAKDYPAHTEEDKQR

SEQ ID NO: 1027740 - protein, 372 aa, Homo sapiens; identical to SEQ ID NO: 1027734

SEQ ID NO: 1027741 - protein, 301 aa, Homo sapiens
MALAARLWRLLPFRRGAAPGSRLPAGTSGSRGHCGPCRFRGFEVMGNPGTFKRGLLLSALSYLGFETYQVISQAAVVHATAKVEEILEQADYLYESGETEKLYQLLTQYKESEDAELLWRLARASRDVAQLSRTSEEEKKLLVYEALEYAKRALEKNESSFASHKWYAICLSDVGDYEGIKAKIANAYIIKEHFEKAIELNPKDATSIHLMGIWCYTFAEMPWYQRRIAKMLFATPPSSTYEKALGYFHRAEQVDPNFYSKNLLLLGKTYLKLHNKKLAAFWLMKAKDYPAHTEEDKQEII

SEQ ID NO: 1027742 - protein, 66 aa, Homo sapiens
ISIIGYEKWKTLMNSPKPKLVLASCRVLCSLTYVHRNFLLEEDQHPENELESCLLQSNLLNHTYNE

SEQ ID NO: 1027743 - protein, 1189 aa, Homo sapiens
MESTPSFLKGTPTWEKTAPENGIVRQEPGSPPRDGLHHGPLCLGEPAPFWRGVLSTPDSWLPPGFPQGPKDMLPLVEGEGPQNGERKVNWLGSKEGLRWKEAMLTHPLAFCGPACPPRCGPLMPEHSGGHLKSDPVAFRPWHCPFLLETKILERAPFWVPTCLPPYLVSGLPPEHPCDWPLTPHPWVYSGGQPKVPSAFSLGSKGFYYKDPSIPRLAKEPLAAAEPGLFGLNSGGHLQRAGEAERPSLHQRDGEMGAGRQQNPCPLFLGQPDTVPWTSWPACPPGLVHTLGNVWAGPGDGNLGYQLGPPATPRCPSPEPPVTQRGCCSSYPPTKGGGLGPCGKCQEGLEGGASGASEPSEEVNKASGPRACPPSHHTKLKKTWLTRHSEQFECPRGCPEVEERPVARLRALKRAGSPEVQGAMGSPAPKRPPDPFPGTAEQGAGGWQEVRDTSIGNKDVDSGQHDEQKGPQDGQASLQDPGLQDIPCLALPAKLAQCQSCAQAAGEGGGHACHSQQVRRSPLGGELQQEEDTATNSSSEEGPGSGPDSRLSTGLAKHLLSGLGDRLCRLLRREREALAWAQREGQGPAVTEDSPGIPRCCSRCHHGLFNTHWRCPRCSHRLCVACGRVAGTGRAREKAGFQEQSAEECTQEAGHAACSLMLTQFVSSQALAELSTAMHQVWVKFDIRGHCPCQADARVWAPGDAGQQKESTQKTPPTPQPSCNGDTHRTKSIKEETPDSAETPAEDRAGRGPLPCPSLCELLASTAVKLCLGHERIHMAFAPVTPALPSDDRITNILDSIIAQVVERKIQEKALGPGLRAGPGLRKGLGLPLSPVRPRLPPPGALLWLQEPQPCPRRGFHLFQEHWRQGQPVLVSGIQRTLQGNLWGTEALGALGGQVQALSPLGPPQPSSLGSTTFWEGFSWPELRPKSDEGSVLLLHRALGDEDTSRVENLAASLPLPEYCALHGKLNLASYLPPGLALRPLEPQLWAAYGVSPHRGHLGTKNLCVEVADLVSILVHADTPLPAWHRAQKDFLSGLDGEGLWSPGSQVSTVWHVFRAQDAQRIRRFLQMVCPAGAGALEPGAPGSCYLDAGLRRRLREEWGVSCWTLLQAPGEAVLVPAGAPHQVQGLVSTVSVTQHFLSPETSALSAQLCHQGPSLPPDCHLLYAQMDWAVFQAVKVAVGTLQEAK

SEQ ID NO: 1027744 - protein, 1189 aa, Homo sapiens; identical to SEQ ID NO: 1027743

SEQ ID NO: 1027745 - protein, 1257 aa, Homo sapiens
MAQPTASAQKLVRPIRAVCRILQIPESDPSNLRPYSAPAAPGEGERERAEQTERENASSPAGREAPELAHGEQAPGAGHDDRHRPRRDRPVKPRDPPLGEPHEGRRVMESTPSFLKGTPTWEKTAPENGIVRQEPGSPPRDGLHHGPLCLGEPAPFWRGVLSTPDSWLPPGFPQGPKDMLPLVEGEGPQNGERKVNWLGSKEGLRWKEAMLTHPLAFCGPACPPRCGPLMPEHSGGHLKSDPVAFRPWHCPFLLETKILERAPFWVPTCLPPYLVSGLPPEHPCDWPLTPHPWVYSGGQPKVPSAFSLGSKGFYYKDPSIPRLAKEPLAAAEPGLFGLNSGGHLQRAGEAERPSLHQRDGEMGAGRQQNPCPLFLGQPDTVPWTSWPACPPGLVHTLGNVWAGPGDGNLGYQLGPPATPRCPSPEPPVTQRGCCSSYPPTKGGDLGPCGKCQEGLEGGASGASEPSEEVNKASGPRACPPSHHTKLKKTWLTRHSEQFECPRGCPEVEERPVARLRALKRAGSPEVQGAMGSPAPKRPPDPFPGTAEQGAGGWQEVRDTSIGNKDVDSGQHDEQKGPQDGQASLQDPGLQDIPCLALPAKLAQCQSCAQAAGEGGGHACHSQQVRRSPLGGELQQEEDTATNSSSEEGPGSGPDSRLSTGLAKHLLSGLGDRLCRLLRREREALAWAQREGQGPAVTEDSPGIPRCCSRCHHGLFNTHWRCPRCSHRLCVACGRVAGTGRAREKAGFQEQSAEECTQEAGHAACSLMLTQFVSSQEGITQKTPPTPQPSCNGDTHRTKSIKEETPDSAETPAEDRAGRGPLPCPSLCELLASTAVKLCLGHERIHMAFAPVTPALPSDDRITNILDSIIAQVVERKIQEKALGPGLRAGPGLRKGLGLPLSPVRPRLPPPGALLWLQEPQPCPRRGFHLFQEHWRQGQPVLVSGIQRTLQGNLWGTEALGALGGQVQALSPLGPPQPSSLGSTTFWEGFSWPELRPKSDEGSVLLLHRALGDEDTSRVENLAASLPLPEYCALHGKLNLASYLPPGLALRPLEPQLWAAYGVSPHRGHLGTKNLCVEVADLVSILVHADTPLPAWHRAQKDFLSGLDGEGLWSPGSQVSTVWHVFRAQDAQRIRRFLQMVCPAGAGALEPGAPGSCYLDAGLRRRLREEWGVSCWTLLQAPGEAVLVPAGAPHQVQGLVSTVSVTQHFLSPETSALSAQLCHQGPSLPPDCHLLYAQMDWAVFQAVKVAVGTLQEAK

SEQ ID NO: 1027746 - protein, 1101 aa, Homo sapiens
MAQPTASAQKLVRPIRAVCRILQIPESDPSNLRPYSAPAAPGEGERERAEQTERENASSPAGREAPELAHGEQAPGAGHDDRHRPRRDRPVKPRDPPLGEPHEGRRVMESTPSFLKGTPTWEKTAPENGIVRQEPGSPPRDGLHHGPLCLGEPAPFWRGVLSTPDSWLPPGFPQGPKDMLPLVEGEGPQNGERKVNWLGSKEGLRWKEAMLTHPLAFCGPACPPRCGPLMPEHSGGHLKSDPVAFRPWHCPFLLETKILERAPFWVPTCLPPYLVSGLPPEHPCDWPLTPHPWVYSGGQPKVPSAFSLGSKGFYYKDPSIPRLAKEPLAAAEPGLFGLNSGGHLQRAGEAERPSLHQRDGEMGAGRQQNPCPLFLGQPDTVPWTSWPACPPGLVHTLGNVWAGPGDGNLGYQLGPPATPRCPSPEPPVTQRGCCSSYPPTKGGDLGPCGKCQEGLEGGASGASEPSEEVNKASGPRACPPSHHTKLKKTWLTRHSEQFECPRGCPEVEERPVARLRALKRAGSPEVQGAMGSPAPKRPPDPFPGTAEQGAGGWQEVRDTSIGNKDVDSGQHDEQKGPQDGQASLQDPGLQDIPCLALPAKLAQCQSCAQAAGEGGGHACHSQQVRRSPLGGELQQEEDTATNSSSEEGPGSGPDSRLSTGLAKHLLSGLGDRLCRLLRREREALAWAQREGQGPAVTEDSPGIPRCCSRCHHGLFNTHWRCPRCSHRLCVACGRVAGTGRAREKAGFQEQSAEECTQEAGHAACSLMLTQFVSSQALAELSTAMHQVWVKFDIRGHCPCQADARVWAPGDAGQQKESTQKTPPTPQPSCNGDTHRTKSIKEETPDSAETPAEDRAGRGPLPCPSLCELLASTAVKLCLGHERIHMAFAPVTPALPSDDRITNILDSIIAQVVERKIQEKALGPGLRAGPGLRKGLGLPLSPVRPRLPPPGALLWLQEPQPCPRRGFHLFQEHWRQGQPVLVSGIQRTLQGNLWGTEALGALGGQVQALSPLGPPQPSSLGSTTFWEGFSWPELRPKSDEGSVLLLHRALGDEDTSRVENLAASLPLPEYCALHGKLNLASYLPPGAGPGEHSQRHSALPLP

SEQ ID NO: 1027747 - protein, 1296 aa, Homo sapiens
MAQPTASAQKLVRPIRAVCRILQIPESDPSNLRPYSAPAAPGEGERERAEQTERENASSPAGREAPELAHGEQAPGAGHDDRHRPRRDRPVKPRDPPLGEPHEGRRVMESTPSFLKGTPTWEKTAPENGIVRQEPGSPPRDGLHHGPLCLGEPAPFWRGVLSTPDSWLPPGFPQGPKDMLPLVEGEGPQNGERKVNWLGSKEGLRWKEAMLTHPLAFCGPACPPRCGPLMPEHSGGHLKSDPVAFRPWHCPFLLETKILERAPFWVPTCLPPYLVSGLPPEHPCDWPLTPHPWVYSGGQPKVPSAFSLGSKGFYYKDPSIPRLAKEPLAAAEPGLFGLNSGGHLQRAGEAERPSLHQRDGEMGAGRQQNPCPLFLGQPDTVPWTSWPACPPGLVHTLGNVWAGPGDGNLGYQLGPPATPRCPSPEPPVTQRGCCSSYPPTKGGDLGPCGKCQEGLEGGASGASEPSEEVNKASGPRACPPSHHTKLKKTWLTRHSEQFECPRGCPEVEERPVARLRALKRAGSPEVQGAMGSPAPKRPPDPFPGTAEQGAGGWQEVRDTSIGNKDVDSGQHDEQKGPQDGQASLQDPGLQDIPCLALPAKLAQCQSCAQAAGEGGGHACHSQQVRRSPLGGELQQEEDTATNSSSEEGPGSGPDSRLSTGLAKHLLSGLGDRLCRLLRREREALAWAQREGQGPAVTEDSPGIPRCCSRCHHGLFNTHWRCPRCSHRLCVACGRVAGTGRAREKAGFQEQSAEECTQEAGHAACSLMLTQFVSSQALAELSTAMHQVWVKFDIRGHCPCQADARVWAPGDAGQQKESTQKTPPTPQPSCNGDTHRTKSIKEETPDSAETPAEDRAGRGPLPCPSLCELLASTAVKLCLGHERIHMAFAPVTPALPSDDRITNILDSIIAQVVERKIQEKALGPGLRAGPGLRKGLGLPLSPVRPRLPPPGALLWLQEPQPCPRRGFHLFQEHWRQGQPVLVSGIQRTLQGNLWGTEALGALGGQVQALSPLGPPQPSSLGSTTFWEGFSWPELRPKSDEGSVLLLHRALGDEDTSRVENLAASLPLPEYCALHGKLNLASYLPPGLALRPLEPQLWAAYGVSPHRGHLGTKNLCVEVADLVSILVHADTPLPAWHRAQKDFLSGLDGEGLWSPGSQVSTVWHVFRAQDAQRIRRFLQMVCPAGAGALEPGAPGSCYLDAGLRRRLREEWGVSCWTLLQAPGEAVLVPAGAPHQVQGLVSTVSVTQHFLSPETSALSAQLCHQGPSLPPDCHLLYAQMDWAVFQAVKVAVGTLQEAK

SEQ ID NO: 1027748 - protein, 1189 aa, Homo sapiens; identical to SEQ ID NO: 1027743

SEQ ID NO: 1027749 - protein, 582 aa, Homo sapiens
KILAICPPSPLRPLSLALLPSCASALRCLCPESDIGADSACPGPAEWLSSLRAHVVRTGIGRARAELFEKQIVQHGGQLCPAQGPGVTHIVVDEGMDYERALRLLRLPQLPPGAQLVKSAWLSLCLQERRLVDVAGFSIFIPSRYLDHPQPSKAEQDASIPPGTHEALLQTALSPPPPPTRPVSPPQKAKEAPNTQAQPISDDEASDGEETQVSAADLEALISGHYPTSLEGDCEPSPAPAVLDKWVCAQPSSQKATNHNLHITEKLEVLAKAYSVQGDKWRALGYAKAINALKSFHKPVTSYQEACSIPGIGKRMAEKIIEILESGHLRKLDHISESVPVLELFSNIWGAGTKTAQMWYQQGFRSLEDIRSQASLTTQQAIGLKHYSDFLERMPREEATEIEQTVQKAAQAFNSGLLCVACGSYRRGKATCGDVDVLITHPDGRSHRGIFSRLLDSLRQEGFLTDDLVSQEENGQQQKYLGVCRLPGPGRRHRRLDIIVVPYSEFACALLYFTGSAHFNRSMRALAKTKGMSLSEHALSTAVVRNTHGCKVGPGRVLPTPTEKDVFRLLGLPYREPAERDW

SEQ ID NO: 1027750 - protein, 298 aa, Homo sapiens
MHHQKYLQRFLGGKREKKQKEACSIPGIGKRMAEKIIEILESGHLRKLDHISESVPVLELFSNIWGAGTKTAQMWYQQGFRSLEDIRSQASLTTQQAIGLKHYSDFLERMPREEATEIEQTVQKAAQAFNSGLLCVACGSYRRGKATCGDVDVLITHPDGRSHRGIFSRLLDSLRQEGFLTDDLVSQEENGQQQKYLGVCRLPGPGRRHRRLDIIVVPYSEFACALLYFTGSAHFNRSMRALAKTKGMSLSEHALSTAVVRNTHGCKVGPGRVLPTPTEKDVFRLLGLPYREPAERDW

SEQ ID NO: 1027751 - protein, 575 aa, Homo sapiens
MDPRGILKAFPKRQKIHADASSKVLAKIPRREEGEEAEEWLSSLRAHVVRTGIGRARAELFEKQIVQHGGQLCPAQGPGVTHIVVDEGMDYERALRLLRLPQLPPGAQLVKSAWLSLCLQERRLVDVAGFSIFIPSRYLDHPQPSKAEQDASIPPGTHEALLQTALSPPPPPTRPVSPPQKAKEAPNTQAQPISDDEASDGEETQVSAADLEALISGHYPTSLEGDCEPSPAPAVLDKWVCAQPSSQKATNHNLHITEKLEVLAKAYSVQGDKWRALGYAKAINALKSFHKPVTSYQEACSIPGIGKRMAEKIIEILESGHLRKLDHISESVPVLELFSNIWGAGTKTAQMWYQQGFRSLEDIRSQASLTTQQAIGLKHYSDFLERMPREEATEIEQTVQKAAQAFNSGLLCVACGSYRRGKATCGDVDVLITHPDGRSHRGIFSRLLDSLRQEGFLTDDLVSQEENGQQQKYLGVCRLPGPGRRHRRLDIIVVPYSEFACALLYFTGSAHFNRSMRALAKTKGMSLSEHALSTAVVRNTHGCKVGPGRVLPTPTEKDVFRLLGLPYREPAERDW

SEQ ID NO: 1027752 - protein, 483 aa, Homo sapiens
MDPRGILKAFPKRQKIHADASSKVLAKIPRREEGEEAEEWLSSLRAHVVRTGIGRARAELFEKQIVQHGGQLCPAQGPGVTHIVVDEGMDYERALRLLRLPQLPPGAQLVKSAWLSLCLQERRLVDVAGFSIFIPSRYLDHPQPSKAEQDASIPPGTHEALLQTALSPPPPPTRPVSPPQKAKEAPNTQAQPISDDEASDGEETQEACSIPGIGKRMAEKIIEILESGHLRKLDHISESVPVLELFSNIWGAGTKTAQMWYQQGFRSLEDIRSQASLTTQQAIGLKHYSDFLERMPREEATEIEQTVQKAAQAFNSGLLCVACGSYRRGKATCGDVDVLITHPDGRSHRGIFSRLLDSLRQEGFLTDDLVSQEENGQQQKYLGVCRLPGPGRRHRRLDIIVVPYSEFACALLYFTGSAHFNRSMRALAKTKGMSLSEHALSTAVVRNTHGCKVGPGRVLPTPTEKDVFRLLGLPYREPAERDW

SEQ ID NO: 1027753 - protein, 575 aa, Homo sapiens; identical to SEQ ID NO: 1027751

SEQ ID NO: 1027754 - protein, 575 aa, Homo sapiens; identical to SEQ ID NO: 1027751

SEQ ID NO: 1027755 - protein, 241 aa, Homo sapiens
MHHQKYLQRFLGGKREKKQKQGFRSLEDIRSQASLTTQQAIGLKHYSDFLERMPREEATEIEQTVQKAAQAFNSGLLCVACGSYRRGKATCGDVDVLITHPDGRSHRGIFSRLLDSLRQEGFLTDDLVSQEENGQQQKYLGVCRLPGPGRRHRRLDIIVVPYSEFACALLYFTGSAHFNRSMRALAKTKGMSLSEHALSTAVVRNTHGCKVGPGRVLPTPTEKDVFRLLGLPYREPAERDW

SEQ ID NO: 1027756 - protein, 575 aa, Homo sapiens; identical to SEQ ID NO: 1027751

SEQ ID NO: 1027757 - protein, 575 aa, Homo sapiens; identical to SEQ ID NO: 1027751

SEQ ID NO: 1027758 - protein, 575 aa, Homo sapiens; identical to SEQ ID NO: 1027751

SEQ ID NO: 1027759 - protein, 575 aa, Homo sapiens; identical to SEQ ID NO: 1027751

SEQ ID NO: 1027760 - protein, 575 aa, Homo sapiens; identical to SEQ ID NO: 1027751

SEQ ID NO: 1027761 - protein, 601 aa, Homo sapiens
KFWPFALLPPFVRSHWLCWPGSSHTSMDPRGILKAFPKRQKIHADASSKVLAKIPRREEGEEAEEWLSSLRAHVVRTGIGRARAELFEKQIVQHGGQLCPAQGPGVTHIVVDEGMDYERALRLLRLPQLPPGAQLVKSAWLSLCLQERRLVDVAGFSIFIPSRYLDHPQPSKAEQDASIPPGTHEALLQTALSPPPPPTRPVSPPQKAKEAPNTQAQPISDDEASDGEETQVSAADLEALISGHYPTSLEGDCEPSPAPAVLDKWVCAQPSSQKATNHNLHITEKLEVLAKAYSVQGDKWRALGYAKAINALKSFHKPVTSYQEACSIPGIGKRMAEKIIEILESGHLRKLDHISESVPVLELFSNIWGAGTKTAQMWYQQGFRSLEDIRSQASLTTQQAIGLKHYSDFLERMPREEATEIEQTVQKAAQAFNSGLLCVACGSYRRGKATCGDVDVLITHPDGRSHRGIFSRLLDSLRQEGFLTDDLVSQEENGQQQKYLGVCRLPGPGRRHRRLDIIVVPYSEFACALLYFTGSAHFNRSMRALAKTKGMSLSEHALSTAVVRNTHGCKVGPGRVLPTPTEKDVFRLLGLPYREPAERDW

SEQ ID NO: 1027762 - protein, 487 aa, Homo sapiens
MDYERALRLLRLPQLPPGAQLVKSAWLSLCLQERRLVDVAGFSIFIPSRYLDHPQPSKAEQDASIPPGTHEALLQTALSPPPPPTRPVSPPQKAKEAPNTQAQPISDDEASDGEETQVSAADLEALISGHYPTSLEGDCEPSPAPAVLDKWVCAQPSSQKATNHNLHITEKLEVLAKAYSVQGDKWRALGYAKAINALKSFHKPVTSYQEACSIPGIGKRMAEKIIEILESGHLRKLDHISESVPVLELFSNIWGAGTKTAQMWYQQGFRSLEDIRSQASLTTQQAIGLKHYSDFLERMPREEATEIEQTVQKAAQAFNSGLLCVACGSYRRGKATCGDVDVLITHPDGRSHRGIFSRLLDSLRQEGFLTDDLVSQEENGQQQKYLGVCRLPGPGRRHRRLDIIVVPYSEFACALLYFTGSAHFNRSMRALAKTKGMSLSEHALSTAVVRNTHGCKVGPGRVLPTPTEKDVFRLLGLPYREPAERDW

SEQ ID NO: 1027763 - protein, 301 aa, Homo sapiens
MDPRGILKAFPKRQKIHADASSKVLAKIPRREEGEEAEEWLSSLRAHVVRTGIGRARAELFEKQIVQHGGQLCPAQGPGVTHIVVDEGMDYERALRLLRLPQLPPGAQLVKSAWLSLCLQERRLVDVAGFSIFIPSRYLDHPQPSKAEQDASIPPGTHEALLQTALSPPPPPTRPVSPPQKAKEAPNTQAQPISDDEASDGEETQVSAADLEALISGHYPTSLEGDCEPSPAPAVLDKWVCAQPSSQKATNHNLHITEKLEVLAKAYSVQGDKWRALGYAKAINALKSFHKPVTSYQVPRG

SEQ ID NO: 1027764 - protein, 156 aa, Homo sapiens
DRFDFQFNLPPPRNWGPGVPHRGIFSRLLDSLRQEGFLTDDLVSQEENGQQQKYLGVCRLPGPGRRHRRLDIIVVPYSEFACALLYFTGSAHFNRSMRALAKTKGMSLSEHALSTAVVRNTHGCKVGPGRVLPTPTEKDVFRLLGLPYREPAERDW

SEQ ID NO: 1027765 - protein, 549 aa, Homo sapiens
KFWPFALLPPFVRSHWLCCSPDQRSNRPGSSHTSMDPRGILKAFPKRQKIHADASSKVLAKIPRREEGEEAEEWLSSLRAHVVRTGIGRARAELFEKQIVQHGGQLCPAQGPGVTHIVVDEGMDYERALRLLRLPQLPPGAQLVKSAWLSLCLQERRLVDVAGFSIFIPSRYLDHPQPSKAEQDASIPPGTHEALLQTALSPPPPPTRPVSPPQKAKEAPNTQAQPISDDEASDGEETQVSAADLEALISGHYPTSLEGDCEPSPAPAVLDKWVCAQPSSQKATNHNLHITEKLEVLAKAYSVQGDKWRALGYAKAINALKSFHKPVTSYQEACSIPGIGKRMAEKIIEILESGHLRKLDHISESVPVLELFSNIWGAGTKTAQMWYQQGFRSLEDIRSQASLTTQQAIGLKHYSDFLERMPREEATEIEQTVQKAAQAFNSGLLCVACGSYRRGKATCGDVDVLITHPDGRSHRGIFSRLLDSLRQEGFLTDDLVSQEENGQQQKYLGVCRLPGPGRRHRRLDIIVVPYSEFACALQGGAWPSAAHSH

SEQ ID NO: 1027766 - protein, 575 aa, Homo sapiens; identical to SEQ ID NO: 1027751

SEQ ID NO: 1027767 - protein, 524 aa, Homo sapiens
MDPRGILKAFPKRQKIHADASSKVLAKIPRREEGEEAEEWLSSLRAHVVRTGIGRARAELFEKQIVQHGGQLCPAQGPGVTHIVVDEGMDYERALRLLRLPQLPPGAQLVKSAWLSLCLQERRLVDVAGFSIFIPSRYLDHPQPSKAEQDASIPPGTHEALLQTALSPPPPPTRPVSPPQKAKEAPNTQAQPISDDEASDGEETQAEKLEVLAKAYSVQGDKWRALGYAKAINALKSFHKPVTSYQEACSIPGIGKRMAEKIIEILESGHLRKLDHISESVPVLELFSNIWGAGTKTAQMWYQQGFRSLEDIRSQASLTTQQAIGLKHYSDFLERMPREEATEIEQTVQKAAQAFNSGLLCVACGSYRRGKATCGDVDVLITHPDGRSHRGIFSRLLDSLRQEGFLTDDLVSQEENGQQQKYLGVCRLPGPGRRHRRLDIIVVPYSEFACALLYFTGSAHFNRSMRALAKTKGMSLSEHALSTAVVRNTHGCKVGPGRVLPTPTEKDVFRLLGLPYREPAERDW

SEQ ID NO: 1027768 - protein, 490 aa, Homo sapiens
MDPRGILKAFPKRQKIHADASSKVLAKIPRREEGEEAEEWLSSLRAHVVRTGIGRARAELFEKQIVQHGGQLCPAQGPGVTHIVVDEGMDYERALRLLRLPQLPPGAQLVKSAWLSLCLQERRLVDVAGFSIFIPSRYLDHPQPSKAEQDASIPPGTHEALLQTALSPPPPPTRPVSPPQKAKEAPNTQAQPISDDEASDGEETQEACSIPGIGKRMAEKIIEILESGHLRKLDHISESVPVLELFSNIWGAGTKTAQMWYQQGFRSLEDIRSQASLTTQQAIGLKHYSDFLERMPREEATEIEQTVQKAAQAFNSGLLCVACGSYRRGKATCGDVDVLITHPDGRSHRGIFSRLLDSLRQEAVPSVGARFLTDDLVSQEENGQQQKYLGVCRLPGPGRRHRRLDIIVVPYSEFACALLYFTGSAHFNRSMRALAKTKGMSLSEHALSTAVVRNTHGCKVGPGRVLPTPTEKDVFRLLGLPYREPAERDW

SEQ ID NO: 1027769 - protein, 609 aa, Homo sapiens
KFWPFALLPPFVRSHWLCCSPDQRSNRPGSSHTSMDPRGILKAFPKRQKIHADASSKVLAKIPRREEGEEAEEWLSSLRAHVVRTGIGRARAELFEKQIVQHGGQLCPAQGPGVTHIVVDEGMDYERALRLLRLPQLPPGAQLVKSAWLSLCLQERRLVDVAGFSIFIPSRYLDHPQPSKAEQDASIPPGTHEALLQTALSPPPPPTRPVSPPQKAKEAPNTQAQPISDDEASDGEETQVSAADLEALISGHYPTSLEGDCEPSPAPAVLDKWVCAQPSSQKATNHNLHITEKLEVLAKAYSVQGDKWRALGYAKAINALKSFHKPVTSYQEACSIPGIGKRMAEKIIEILESGHLRKLDHISESVPVLELFSNIWGAGTKTAQMWYQQGFRSLEDIRSQASLTTQQAIGLKHYSDFLERMPREEATEIEQTVQKAAQAFNSGLLCVACGSYRRGKATCGDVDVLITHPDGRSHRGIFSRLLDSLRQEGFLTDDLVSQEENGQQQKYLGVCRLPGPGRRHRRLDIIVVPYSEFACALLYFTGSAHFNRSMRALAKTKGMSLSEHALSTAVVRNTHGCKVGPGRVLPTPTEKDVFRLLGLPYREPAERDW

SEQ ID NO: 1027770 - protein, 575 aa, Homo sapiens; identical to SEQ ID NO: 1027751

SEQ ID NO: 1027771 - protein, 575 aa, Homo sapiens; identical to SEQ ID NO: 1027751

SEQ ID NO: 1027772 - protein, 575 aa, Homo sapiens; identical to SEQ ID NO: 1027751

SEQ ID NO: 1027773 - protein, 517 aa, Homo sapiens
KFWPFALLPPFVRSHWLCCSPDQRSNRPGSSHTSMDPRGILKAFPKRQKIHADASSKVLAKIPRREEGEEAEEWLSSLRAHVVRTGIGRARAELFEKQIVQHGGQLCPAQGPGVTHIVVDEGMDYERALRLLRLPQLPPGAQLVKSAWLSLCLQERRLVDVAGFSIFIPSRYLDHPQPSKAEQDASIPPGTHEALLQTALSPPPPPTRPVSPPQKAKEAPNTQAQPISDDEASDGEETQEACSIPGIGKRMAEKIIEILESGHLRKLDHISESVPVLELFSNIWGAGTKTAQMWYQQGFRSLEDIRSQASLTTQQAIGLKHYSDFLERMPREEATEIEQTVQKAAQAFNSGLLCVACGSYRRGKATCGDVDVLITHPDGRSHRGIFSRLLDSLRQEGFLTDDLVSQEENGQQQKYLGVCRLPGPGRRHRRLDIIVVPYSEFACALLYFTGSAHFNRSMRALAKTKGMSLSEHALSTAVVRNTHGCKVGPGRVLPTPTEKDVFRLLGLPYREPAERDW

SEQ ID NO: 1027774 - protein, 350 aa, Homo sapiens
KFWPFALLPPFVRSHWLCCSPDQRSNRPGSSHTSMDPRGILKAFPKRQKIHADASSKVLAKIPRREEGEEAEEACSIPGIGKRMAEKIIEILESGHLRKLDHISESVPVLELFSNIWGAGTKTAQMWYQQGFRSLEDIRSQASLTTQQAIGLKHYSDFLERMPREEATEIEQTVQKAAQAFNSGLLCVACGSYRRGKATCGDVDVLITHPDGRSHRGIFSRLLDSLRQEGFLTDDLVSQEENGQQQKYLGVCRLPGPGRRHRRLDIIVVPYSEFACALLYFTGSAHFNRSMRALAKTKGMSLSEHALSTAVVRNTHGCKVGPGRVLPTPTEKDVFRLLGLPYREPAERDW

SEQ ID NO: 1027775 - protein, 575 aa, Homo sapiens; identical to SEQ ID NO: 1027751

SEQ ID NO: 1027776 - protein, 248 aa, Homo sapiens
MEALCVCSLMPLHWSWILTASHLAAFFQGFRSLEDIRSQASLTTQQAIGLKHYSDFLERMPREEATEIEQTVQKAAQAFNSGLLCVACGSYRRGKATCGDVDVLITHPDGRSHRGIFSRLLDSLRQEGFLTDDLVSQEENGQQQKYLGVCRLPGPGRRHRRLDIIVVPYSEFACALLYFTGSAHFNRSMRALAKTKGMSLSEHALSTAVVRNTHGCKVGPGRVLPTPTEKDVFRLLGLPYREPAERDW

SEQ ID NO: 1027777 - protein, 575 aa, Homo sapiens; identical to SEQ ID NO: 1027751

SEQ ID NO: 1027778 - protein, 229 aa, Homo sapiens
SAGSSPALLGLVPVIFVSRGGTSLRHAYFINLLPNATKGPWTNFFGDLGGGDTPKFYLLRIFRGPLKVSGYGLGRKVGSAKNVTLNHFLEEPVFFRGVPRGPCGVGKGKDLLFPVVLLFIEESFARVVLSRGFSPLLCVPVPRYQAVGSSSTTYICVPQSSDIIPFVDPFVGSPTPDGRSVRDLTKALTDPRIGVGLLPSREERETRGNKKGAHLVPGSRMGCFNEINP

SEQ ID NO: 1027779 - protein, 137 aa, Homo sapiens
VFGVISGASRAGSRHLREPWSVGRPQFARSLSAAPQLSDTADTMGFGDLKSPAGLQVLNDYLADKSYIEGYVPSQADVAVFEAVSSPPPADLCHALRWYNHIKSYEKEQGQPARSEESFGQIWSCRCGRHYRKWSYR

SEQ ID NO: 1027780 - protein, 546 aa, Homo sapiens
  misc_feature (429)..(429): Xaa can be any naturally occurring amino acid
VFGVISGASRAGSRHLREPWSVGRPQFARSLSAAPQLSDTADTMGFGDLKSPAGLQVLNDYLADKSYIEGYVPSQADVAVFEAVSSPPPADLCHALRWYNHIKSYEKEQGQPARSEESFGQIWSCLLSAQHHSPGKLAAHSISPSMHACTISTSFAHLACMHGSATVAQPANCSAQVCKHTVMCQHIIAINTAHSPIQTPLARSCQAHSRIPIVSPQALLHTTMWDIASQATRHNWACKIYHPGKIACHMATDTLPTRRPTHGNLTTSLRSDIQFLKTTYSVTPKIWQTSTPRNILTQHHTLVHQIQHTLVCSSSSPHALAIPQQAHQVTTPKAHSLAPGDKAEQPRQLKSNMGHITWPQRHTYSDVPQECPTIGDNCIRATRRLLEQHETETTPTKQIATIHHCEHDNNCAQLTRTSSNTQKHMKQHXQHNTTDNQTKHTKTRPQHHEKRNTQTTNQHAHRDTKIYDEERERRQKASSEKKAQQHKDATTRRQDGTSKRNHNGRQTNEQRRQNTIDENTPTKSQDREKKGNDTEREKTKQNEQEQ

SEQ ID NO: 1027781 - protein, 177 aa, Homo sapiens
MRQTHGDTQRHVRQKPFKQTGLALVAHLTLVPVAIRNFKKLQTTRVPARTHDQGGHTLCLAGDDPCAARTQCTSDVGANHTDLTSRRNQGRHTRSPTHPYKEATAQNPGETTYATPRQEGHTASVNKRTRATPGRGNAKTRDTQTVRIQTSNDAINHERQTRVEIPETKPDNDEANS

SEQ ID NO: 1027782 - protein, 75 aa, Homo sapiens
SGCGRSGGGGGAIGRAVTAAAEVTEERGASSLPPPPDFNAQSPARQRFSLEYTLHIYGDSECEGRLLPGSAQHFR

SEQ ID NO: 1027783 - protein, 157 aa, Homo sapiens
VRLRAQRWWWRRDRPGCNRRLSGSGWSGSGGRARREVTPQGSGGSGGSGGSRRRSGGRSSSSKTDSWRRAAAAAAGPGRVSRAEAGGGVVAAAATVTAAAAAAEVTEERGASSLPPPPDFNAQSPARQRFSLEYTLHIYGDSECEGRLLPGSAQHFR

SEQ ID NO: 1027784 - protein, 458 aa, Homo sapiens
MATTAAPAGGARNGAGPEWGGFEENIQGGGSAVIDMENMDDTSGSSFEDMGELHQRLREEEVDADAADAAAAEEEDGEFLGMKGFKGQLSRQVADQMWQAGKKTSLQGLQLVRQHRTSSDPYFDVEPASGAKQAPGVHDPYQDGQLSPRKIAGELYGPLMLVFTLVAILLHGMKTSDTIIREGTLMGTAIGTCFGYWLGVSSFIYFLAYLCNAQITMLQMLALLGYGLFGHCIVLFITYNIHLHALFYLFWLLVGGLSTLRMVAVLVSRTVGPTEQAAPSVAPWLPYYMLFLLYLHFAYHKVVEGILDTLEGPNIPPIQRVPRDIPAMLPAARFPTTVLNATAKAVAVTLSVTADPTEILGQSSFPQLQRGGRLLKDSPDDMFRRWGLQLPLSCSCVSTSLMPVGTSERHKAKNSWPGLQGSAANAENGSAPLRTPPHLPLPSSLSLPHCLAKYRLGN

SEQ ID NO: 1027785 - protein, 471 aa, Homo sapiens
MATTAAPAGGARNGAGPEWGGFEENIQGGGSAVIDMENMDDTSGSSFEDMGELHQRLREEEVDADAADAAAAEEEDGEFLGMKGFKGQLSRQVASESLGPRRALGRKQQTNKKGPSKGGLQLVRQHRTSSDPYFDVEPASGAKQAPGVHDPYQDGQLSPRKIAGELYGPLMLVFTLVAILLHGMKTSDTIIREGTLMGTAIGTCFGYWLGVSSFIYFLAYLCNAQITMLQMLALLGYGLFGHCIVLFITYNIHLHALFYLFWLLVGGLSTLRMVAVLVSRTVGPTQAKLAPLWHAPWLPYYMLFLLYLHFAYHKVVEGILDTLEGPNIPPIQRVPRDIPAMLPAARFPTTVLNATAKAVAVTLQSQLTPTEILGQSSFPQLQRGGRLLKDSPDDMFRRWGLQLPLSCSCVSTSLMPVGTSERHKAKNSWPGLQGSAANAENGSAPLRTPPHLPLPSSLSLPHCLAKYRLGN

SEQ ID NO: 1027786 - protein, 455 aa, Homo sapiens
RRSLALSPRLECSGAISAHYKLRLPGSRHSPALASGVPGTTGAHHHAWLSFCIFSRDGSPQGTWQLQRRRRAAPEMELARNGEGSKKTSDQMWQAGKKTSLQGLQLVRQHRTSSDPYFDVEPASGAKQAPGVHDPYQDGQLSPRKIAGELYGPLMLVFTLVAILLHGMKTSDTIIREGTLMGTAIGTCFGYWLGVSSFIYFLAYLCNAQITMLQMLALLGYGLFGHCIVLFITYNIHLHALFYLFWLLVGGLSTLRMVAVLVSRTVGPTQAKLAPLWHAPWLPYYMLFLLYLHFAYHKVVEGILDTLEGPNIPPIQRVPRDIPAMLPAARFPTTVLNATAKAVAVTLQSQLTPTEILGQSSFPQLQRGGRLLKDSPDDMFRRWGLQLPLSCSCVSTSLMPVGTSERHKAKNSWPGLQGSAANAENGSAPLRTPPHLPLPSSLSLPHCLAKYRLGN

SEQ ID NO: 1027787 - protein, 538 aa, Homo sapiens
MATTAAPAGGARNGAGPEWGGFEENIQGGGSAVIDMENMDDTSGSSFEDMGELHQRLREEEVDADAADAAAAEEEDGEFLGMKGFKGQLSRQVADQMWQAGKKTSLQGLQLVRQHRTSSDPYFDVEPASGAKQAPGVHDPYQDGQLSPRKIAGELYGPLMLVFTLVAILLHGMKTSDTIIREGTLMGTAIGTCFGYWLGVSSFIYFLAYLCNAQITMLQMLALLGYGLFGHCIVLFITYNIHLHALFYLFWLLVGGLSTLRMVAVLVSRTVGPTSCPLRARGYRGFQRREPSRDMATTAAPAGGARNGAGPEWGGFEENIQGGGSAVIDMENMDDTSGSSFEDMGELHQRLREEEVDADAADAAAAEEEDGEAPWLPYYMLFLLYLHFAYHKVVEGILDTLEGPNIPPIQRVPRDIPAMLPAARFPTTVLNATAKAVAVTLQSSFPQLQRGGRLLKDSPDDMFRRWGLQLPLSCSCVSTSLMPVGTSERHKAKNSWPGLQGSAANAENGSAPLRTPPHLPLPSSLSLPHCLAKYRLGN

SEQ ID NO: 1027788 - protein, 461 aa, Homo sapiens
MATTAAPAGGARNGAGPEWGGFEENIQGGGSAVIDMENMDDTSGSSFEDMGELHQRLREEEVDADAADAAAAEEEDGEFLGMKGFKGQLSRQVADQMWQAGKKTSLQGLQLVRQHRTSSDPYFDVEPASGAKQAPGVHDPYQDGQLSPRKIAGELYGPLMLVFTLVAILLHGMKTSDTIIREGTLMGTAIGTCFGYWLGVSSFIYFLAYLCNAQITMLQMLALLGYGLFGHCIVLFITYNIHLHALFYLFWLLVGGLSTLRMVAVLVSRTVGPTQAKLAPLWHAPWLPYYMLFLLYLHFAYHKVVEGILDTLDGPQHPAHPEGPQRHPCHAPCCSVSHHRPQRHSQSCCGDPVSRQLTPTEILGQSSFPQLQRGGRLLKDSPDDMFRRWGLQLPLSCSCVSTSLMPVGTSERHKAKNSWPGLQGSAANAENGSAPLRTPPHLPLPSSLSLPHCLAKYRLGN

SEQ ID NO: 1027789 - protein, 120 aa, Homo sapiens
  misc_feature (3)..(3): Xaa can be any naturally occurring amino acid
HFXRHRKKVARKFWWKNVKMIVLICVIVFIIILFIGLFATGAFFEVTGNLSHLPFFSGTTLHKCVPKGSPFLSSSTENAAGSSYPSSRGPVATLYAPKGPLVPRKEKKKKNGLWLHFLGP

SEQ ID NO: 1027790 - protein, 337 aa, Homo sapiens
  misc_feature (4)..(4): Xaa can be any naturally occurring amino acid
EREXQKLIPAKVNEAWVVIQSVPRGSALCAMDGIVPDIAVGTKRGSDELFSTCVTNGPFIMSSNSASAANGNDSKKFKGDSRSAGVPSRVIHIRKLPIDVTEGEVISLGLPFGKVTNLLMLKGKNQAFIEMNTEEAANTMVNYYTSVTPGAARPAPSTSSSPNHKGAEDRQALPTRRGPRRRLQGGEPRSSPGNLALGCLGGGAWTQGWPMAGQSPVLRIIVENLFYPVTLDVLHQIGSKFGTVLKIITFTKERTSARPCVQVCGPRELPRRPRLSRGRAEHLTTPGARCASTFQGSPGSESSTTMTGAWNTKPRPGLGEASPGDAHGRDWVRKPQT

SEQ ID NO: 1027791 - protein, 83 aa, Homo sapiens
  misc_feature (4)..(4): Xaa can be any naturally occurring amino acid
EREXQKLIPAKVNEAWVVIQSVPRGSALCAMDGIVPDIAVGTKRGSDELFSTCVTNGPFIMSSNSASVFVLFLPPRVLFRGLS

SEQ ID NO: 1027792 - protein, 277 aa, Homo sapiens
MSSNSASAANGNDSKKFKGDSRSAGVPSRVIHIRKLPIDVTEGEVISLGLPFGKVTNLLMLKGKNQAFIEMNTEEAANTMVNYYTSVTPGAARPAPSTSSSPNHKGAEDRQALPTRRGPRRRLQGGEPRSSPGNLALGCLGGGAWTQGWPMAGQSPVLRIIVENLFYPVTLDVLHQIGSKFGTVLKIITFTKERTSARPCVQVCGPRELPRRPRLSRGRAEHLTTPGARCASTFQGSPGSESSTTMTGAWNTKPRPGLGEASPGDAHGRDWVRKPQT

SEQ ID NO: 1027793 - protein, 264 aa, Homo sapiens
  misc_feature (6)..(6): Xaa can be any naturally occurring amino acid
  misc_feature (21)..(21): Xaa can be any naturally occurring amino acid
  misc_feature (38)..(38): Xaa can be any naturally occurring amino acid
  misc_feature (42)..(42): Xaa can be any naturally occurring amino acid
  misc_feature (44)..(44): Xaa can be any naturally occurring amino acid
  misc_feature (64)..(64): Xaa can be any naturally occurring amino acid
  misc_feature (74)..(74): Xaa can be any naturally occurring amino acid
  misc_feature (79)..(79): Xaa can be any naturally occurring amino acid
  misc_feature (84)..(84): Xaa can be any naturally occurring amino acid
  misc_feature (89)..(89): Xaa can be any naturally occurring amino acid
  misc_feature (91)..(91): Xaa can be any naturally occurring amino acid
  misc_feature (104)..(104): Xaa can be any naturally occurring amino acid
KHTLMXKAIRGHLENNPVLEXLLPHIRGNVGFVFTKEXLTEXRXMLLANKVPAAARAGAIAPCXVTVPAQNTGXGKEKXYFLQXLGITXKXSRGTIEILSDVQXIKTGEKVGASEATLMNNAKTSPPSPLGWSSSRCSTMADIYNPEVLDITEETLHSRFLEGVRKCCQCLSADWLPQTVASVPHILSSTGTNESWPCLWRRITPFPLAEKVKAFLADPSAFVAAAPVAAATTAAPAAAAAPAKVEAKEESEESDEDMGFGLFD

SEQ ID NO: 1027794 - protein, 124 aa, Homo sapiens
MAGPATRAGDVGWAAFPIVTNMKLLEETGLLLTICSLEGAWVRRQAREPCVKSRVFKNFQTGTDYGRDLLAREQLTPLIKRVEPELVNFWSYFGELGPQLATQGRVQTMAFQPKLAFRPPIGQS

SEQ ID NO: 1027795 - protein, 124 aa, Homo sapiens
MAGPATRAGDVGWAAFPIVTNMKLLEETGLLLTICSLEGAWVRRQAREPCVMEKVRSPKLKAEAKFYFERSREQLTPLIKRVEPELVNFWSYFGELGPQLATQGRVQTMAFQPKLAFRPPIGQS

SEQ ID NO: 1027796 - protein, 140 aa, Homo sapiens
MECPSCQHVSKEETPKFCSQCGERLPPAAPIADSENNNSTMASASEGEMECGQELKEEGGPCLFPGSDSWQENPEEPCSKASWTVQEGATSEVLVDAAVDLISDEWEAANAIPSKRRKQDAAPLEAASVPSADCEQSSPL

SEQ ID NO: 1027797 - protein, 144 aa, Homo sapiens
GVFASLLELCVGDSPACLKGVVFQQGATSEVLVDAAVDLISDEWEAANAIPSKRRKQDAAPLEAASVPSADCEQVVRVNSLGRMLPCLVQCWTGREANSDFRALESLPVGGRLPRMGVYGSPLGCDRATRNQAGVLVTLKPQSK

SEQ ID NO: 1027798 - protein, 124 aa, Homo sapiens
MECPSCQHVSKEETPKFCSQCGERLPPAAPIADSENNNSTMASASEGEMECGQELKEEGGPCLFPGSDSWQGATSEVLVDAAVDLISDEWEAANAIPSKRRKQDAAPLEAASVPSADCEQSSPL

SEQ ID NO: 1027799 - protein, 114 aa, Homo sapiens
MECPSCQHVSKEETPKFCSQCGERLPPAAPIADSENNNSTMASASEGEMECGQELKEEGGPCLFPGSDSWQENPEEPCSKASWTVQEVSALPRLPSAPVTLRQENLTAHTARGR

SEQ ID NO: 1027800 - protein, 149 aa, Homo sapiens
MVARKSLGKLLVWVLLASKLGMWEGLCETTHGGSPKQQHPASQHWPACSDQLCRAAAAVGRGCGRSSQHWRPSGLNPVTVTMGPVFDARSRKRQAALADVSTALSQLHSPCGQPRHTSFPELSLTQIVRLLCRMQPKFPATICDAYRLI

SEQ ID NO: 1027801 - protein, 162 aa, Homo sapiens
MEVGQYGKNASRAGDRGVLLEPFIHQVGGHSSMMRYDDHTVCKPLISREQRFYESLPPEMKEFTPEYKGVVSVCFEGDSDGYINLVAYPYVESETVEQDDTTEREQPRRKHSRRSLHRSGSGSDHKEEKASLSLETSESSQEAKSPKVDAAQATQKVPFQDC

SEQ ID NO: 1027802 - protein, 162 aa, Homo sapiens; identical to SEQ ID NO: 1027801

SEQ ID NO: 1027803 - protein, 218 aa, Homo sapiens
MWKVRLWNRMTQQNGSNLGANTPAGACTGQAVAVTTRRRKPACPLRPLRATGGKRVRRLMLHRPLRRSLSRIAKCATCGLEFPETDSCHKPPWETCGVTKAGQSEPACCIPKFQRDPENVFYQGFHPCLDETVSDTNVSSGYPPVALVWGPPLKNCAQRRGKAIVAEGTADTGLDQQRSAPGQRIPGKIADGTGMAAFQGRTAVEVRTQGVLPGHCHR

SEQ ID NO: 1027804 - protein, 459 aa, Homo sapiens
LSITDNSSSSDIVESSTSYIKISNSSHSEYSSFSHAQTERSNISSYDGEYAQPSTESPVLHTSNLPSYTPTINMPNTSVVLDTDAEFVSDSSSSSSSSSSSCSSGPPLPLPSVSQSHHLFSSILPSTRASVHLLKSTSDASTPWSSSPSPLPVSLTTSTSAPLSVSQTTLPQSSSTPVLPRARETPVTSFQTSTMTSFMTMLHSSQTADLKSQSTPHQEKVITESKSPSLVSLPTESTKAVTTNSPLPPSLTESSTEQTLPATSTNLAQMSPTFTTTILKTSQPLMTTPGTLSSTASLVTGPIAVQTTAGKQLSLTHPEILVPQISTEGGISTERNRVIVDATTGLIPLTSVPTSAKEMTTKLGVTGRVTSPASGSLGTFSFSPKQQLFPRVKTWLPNLPPLLFRAAHSHQQQCPLQPQSTAVLCTLVFTMANASQTTPAVATTAGARLPGKGMIAVWM

SEQ ID NO: 1027805 - protein, 181 aa, Homo sapiens
MDIPSSARIIPMTPPSSQSPTLLPRTGPLWNLHKPDFWSSPTSSLSLLLGAPSFLSSQGSSRSLLATKHKKQMMAGWQEEPHTQAECQVLQPPLSHSYPKQQNISRVRKVPIVNHLHHIHVAIRPSTCISGTNVDTFILSMHGTFTKINLTYFVPANLNIFESNQITQHVSDHITVLEVND

SEQ ID NO: 1027806 - protein, 160 aa, Homo sapiens
MQTILANTVKPVSTDFWSSPTSSLSLLLGAPSFLSSQGSSRSLLATKHKKQMMAGWQEEPHTQAECQVLQPPLSHSYPKQQNISRVRKVPIVNHLHHIHVAIRPSTCISGTNVDTFILSMHGTFTKINLTYFVPANLNIFESNQITQHVSDHITVLEVND

SEQ ID NO: 1027807 - protein, 83 aa, Homo sapiens
DPDHQDSDAPRHLMALDEDGTVSFPWGPVSCVALGIERMAWHFTHCMPPQIHLSPLFTASKSVALPFCPPRGLPSLVSSEVTQ

SEQ ID NO: 1027808 - protein, 83 aa, Homo sapiens; identical to SEQ ID NO: 1027807

SEQ ID NO: 1027809 - protein, 375 aa, Homo sapiens
EAEEAPGARPQLQDAWRGPREPGPAGRGDGDSGRSQREGQGEGETQEAAAAARRQEQTLRDATMEVQRGQFQGRPVSVWDVLFSSYLSEAHRDELLAQHAAGALGLPDLVAVLTRVIEETEERLSKVSFRGLRRQVSASELHTSGILGPETLRDLAQGTKTLQEVTEMDSVKRYLEGTSCIAGVLVPAKDQPGRQEKMSIYQAMWKGVLRPGTALVLLEAQAATGFVIDPVRNLRLSVEEAVAAGVVGGEIQEKLLSAERAVTGYTDPYTGQQISLFQAMQKDLIVREHGIRLLEAQIATGGVIDPVHSHRVPVDVAYRRGYFDEEMNRVLADPSDDTKGFFDPNTHENLTYLQLLQRATLDPETGLLFLSLSLQ

SEQ ID NO: 1027810 - protein, 125 aa, Homo sapiens
MNLFATWEVDGSSPSCVPRLCSLTLKKLVVFKELEKELISVVIAVKMQGSKRILRSHEIVLPPSGQVETDLALTFSLQYPHFLKREGNKLQIMLQRRKRYKNRTILGHLWFCRSPSARPASSHCT

SEQ ID NO: 1027811 - protein, 995 aa, Homo sapiens
MNLFATWEVDGSSPSCVPRLCSLTLKKLVVFKELEKELISVVIAVKMQGSKRILRSHEIVLPPSGQVETDLALTFSLQYPHFLKREGNKLQIMLQRRKRYKNRTILGYKTLAAGSISMAEVMQHPSEGGQVLSLCSSIKEAPVKAAEIWIASLSSQPIDHEDSTMQAGPKAKSTDNYSEEEYESFSSEQEASDDAVQGQDLDEDDFDVGKPKKQRRSIVRTTSMTRQQNFKQKVVALLRRFKVSDEVLDSEQDPAEHIPEAEEDLDLLYDTLDMEHPSDSGPDMEDDDSVLSTPKPKLRPYFEGLSHSSSQTEIGSIHSARSHKEPPSPADVPEKTRSLGGRQPSDSVSDTVALGVPGPREHPGQPEDSPEAEASTLDVFTERLPPSGRITKTESLVIPSTRSEGKQAGRRGRSTSLKERQAARPQNERANSLDNERCPDARSQLQIPRKTVYDQLNHILISDDQLPENIILVNTSDWQGQFLSDVLQRHTLPVVCTCSPADVQAAFSTIVSRIQRYCNCNSQPPTPVKIAVAGAQHYLSAILRLFVEQLSHKTPDWLGYMRFLVIPLGSHPVARYLGSVDYRYNNFFQDLAWRDLFNKLEAQSAVQDTPDIVSRITQYIAGANCAHQLPIAEAMLTYKQKSPDEESSQKFIPFVGVVKVGIVEPSSATSGNPVPPWGLVSGPWVGCRSTVIRVLQTRSTFQGLRAATSQSCCGASVLRGVHPPRTAVTKPHIKAGRGCLPKTEENPRPSRLSQATGDSHPAHPQELPGLATSWSGGPGGTRAEQQVGSACPVTLPKGDSDDAAPSGSGTLSSTPPSASPAAKEASPTPPSSPSVSGGLSSPSQGVGAELMGLQVDYWTAAQPADRKRDAEKKDLPVTKNTLKCTFRSLQVSRLPSSGEAAATPTMSMTVVTKEKNKKVMFLPKKAKDKDVESKSQCIEGISRLICTARQQQNMLRVLIDGVECSDVKFFQLAAQWSSHVKHFPICIFGHSKATF

SEQ ID NO: 1027812 - protein, 986 aa, Homo sapiens
MNLFATWEVDGSSPSCVPRLCSLTLKKLVVFKELEKELISVVIAVKMQGSKRILRSHEIVLPPSGQVETDLALTFSLQYPHFLKREGNKLQIMLQRRKRYKNRTILGYKTLAAGSISMAEVMQHPSEGGQVLSLCSSIKEAPVKAAEIWIASLSSQPIDHEDSTMQAGPKAKSTDNYSEEEYESFSSEQEASDDAVQGQDLDEDDFDVGKPKKQRRSIVRTTSMTRQQNFKQKVVALLRRFKVSDEVLDSEQDPAEHIPEAEEDLDLLYDTLDMEHPSDSGPDMEDDDSVLSTPKPKLRPYFEGLSHSSSQTEIGSIHSARSHKEPPSPADVPEKTRSLGGRQPSDSVSDTVALGVPGPREHPGQPEDSPEAEASTLDVFTERLPPSGRITKTESLVIPSTRSEGKQAGRRGRSTSLKERQAARPQNERANSLDNERCPDARSQLQIPRKTVYDQLNHILISDDQLPENIILVNTSDWQGQFLSDVLQRHTLPVVCTCSPADVQAAFSTIVSRIQRYCNCNSQPPTPVKIAVAGAQHYLSAILRLFVEQLSHKTPDWLGYMRFLVIPLGSHPVARYLGSVDYRYNNFFQDLAWRDLFNKLEAQSAVQDTPDIVSRITQYIAGANCAHQLPIAEAMLTYKQKSPDEESSQKFIPFVGVVKVGIVEPSSATSGNPVPPWGLVSGPWVGCRSTVIRVLQTRSTFQGLRAATSQSCCGASVLRGVHPPRTAVTKPHIKAGRGCLPKTEENPRPSRLSQATGDSHPAHPQELPGLATSWSGGPGGTRAEQQVGSACPVTLPKGDSDDAAPSGSGTLSSTPPSASPAAKEASPTPPSSPSQGVGAELMGLQVDYWTAAQPADRKRDAEKKDLPVTKNTLKCTFRSLQVSRLPSSGEAAATPTMSMTVVTKEKNKKVMFLPKKAKDKDVESKSQCIEGISRLICTARQQQNMLRVLIDGVECSDVKFFQLAAQWSSHVKHFPICIFGHSKATF

SEQ ID NO: 1027813 - protein, 657 aa, Homo sapiens
MNLFATWEVDGSSPSCVPRLCSLTLKKLVVFKELEKELISVVIAVKMQGSKRILRSHEIVLPPSGQVETDLALTFSLQYPHFLKREGNKLQIMLQRRKRYKNRTILGYKTLAAGSISMAEVMQHPSEGGQVLSLCSSIKEAPVKAAEIWIASLSSQPIDHEDSTMQAGPKAKSTDNYSEEEYESFSSEQEASDDAVQGQDLDEDDFDVGKPKKQRRSIVRTTSMTRQQNFKQKVVALLRRFKVSDEVLDSEQDPAEHIPEAEEDLDLLYDTLDMEHPSDSGPDMEDDDSVLSTPKPKLRPYFEGLSHSSSQTEIGSIHSARSHKEPPSPADVPEKTRSLGGRQPTGSGYMRFLVIPLGSHPVARYLGSVDYRYNNFFQDLAWRDLFNKLEAQSAVQDTPDIVSRITQYIAGANCAHQLPIAEAMLTYKQKSPDEESSQKFIPFVGVVKVGIVEPSSATSGDSDDAAPSGSGTLSSTPPSASPAAKEASPTPPSSPSVSGGLSSPSQGVGAELMGLQVDYWTAAQPADRKRDAEKKDLPVTKNTLKCTFRSLQVSRLPSSGEAAATPTMSMTVVTKEKNKKVMFLPKKAKDKDVESKSQCIEGISRLICTARQQQNMLRVLIDGVECSDVKFFQLAAQWSSHVKHFPICIFGHSKATF

SEQ ID NO: 1027814 - protein, 868 aa, Homo sapiens
MNLFATWEVDGSSPSCVPRLCSLTLKKLVVFKELEKELISVVIAVKMQGSKRILRSHEIVLPPSGQVETDLALTFSLQYPHFLKREGNKLQIMLQRRKRYKNRTILGYKTLAAGSISMAEVMQHPSEGGQVLSLCSSIKEAPVKAAEIWIASLSSQPIDHEDSTMQAGPKAKSTDNYSEEEYESFSSEQEASDDAVQGQDLDEDDFDVGKPKKQRRSIVRTTSMTRQQNFKQKVVALLRRFKVSDEVLDSEQDPAEHIPEAEEDLDLLYDTLDMEHPSDSGPDMEDDDSVLSTPKPKLRPYFEGLSHSSSQTEIGSIHSARSHKEPPSPADVPEKTRSLGGRQPSDSVSDTVALGVPGPREHPGQPEDSPEAEASTLDVFTERLPPSGRITKTESLVIPSTRSEGKQAGRRGRSTSLKERQAARPQNERANSLDNERCPDARSQLQIPRKTVYDQLNHILISDDQLPENIILVNTSDWQGQFLSDVLQRHTLPVVCTCSPADVQAAFSTIVSRIQRYCNCNSQPPTPVKIAVAGAQHYLSAILRLFVEQLSHKTPDWLGYMRFLVIPLGSHPVARYLGSVDYRYNNFFQDLAWRDLFNKLEAQSAVQDTPDIVSRITQYIAGANCAHQLPIAEAMLTYKQKSPDEESSQKFIPFVGVVKVGIVEPSSATSGDSDDAAPSGSGTLSSTPPSASPAAKEASPTPPSSPSVSGGLSSPSQGVGAELMGLQVDYWTAAQPADRKRDAEKKDLPVTKNTLKCTFRSLQVSRLPSSGEAAATPTMSMTVVTKEKNKKVMFLPKKAKDKDVESKSQCIEGISRLICTARQQQNMLRVLIDGVECSDVKFFQLAAQWSSHVKHFPICIFGHSKATF

SEQ ID NO: 1027815 - protein, 888 aa, Homo sapiens
MNLFATWEVDGSSPSCVPRLCSLTLKKLVVFKELEKELISVVIAVKMQGSKRILRSHEIVLPPSGQVETDLALTFSLQYPHFLKREGNKLQIMLQRRKRYKNRTILGYKTLAAGSISMAEVMQHPSEGGQVLSLCSSIKEAPVKAAEIWIASLSSQPIDHEDSTMQAGPKAKSTDNYSEEEYESFSSEQEASDDAVQGQDLDEDDFDVGKPKKQRRSIVRTTSMTRQQNFKQKVVALLRRFKVSDEVLDSEQDPAEHIPEAEEDLDLLYDTLDMEHPSDSGPDMEDDDSVLSTPKPKLRPYFEGLSHSSSQTEIGSIHSARSHKEPPSPADVPEKTRSLGGRQPSDSVSDTVALGVPGPREHPGQPEDSPEAEASTLDVFTERLPPSGRITKTESLVIPSTRSEGKQAGRRGRSTSLKERQAARPQNERANSLDNERCPDARSQLQIPRKTVYDQLNHILISDDQLPENIILVNTSDWQGQFLSDVLQRHTLPVVCTCSPADVQAAFSTIVSRIQRYCNCNSQPPTPVKIAVAGAQHYLSAILRLFVEQLSHKTPDWLGYMRFLVIPLGSHPVARYLGSVDYRYNNFFQDLAWRDLFNKLEAQSAVQDTPDIVSRITQYIAGANCAHQLPIAEAMLTYKQKSPDEESSQKFIPFVGVVKVGIVEPSSATSGNPVPPWGLVSGPWVGCRSTVIRVLQTRSTFQGLRAATSQSCCGASVLRGVHPPRTAVTKPHIKAGRGCLPKTEENPRPSRLSQATGDSHPAHPQELPGLATSWSGGPGGTRAEQQVGSACPVTPPQRRLGRRGPLGLWHALLHPAVRISCGQGGLTHPALLPVGERRPVLPQVKVPHGSARFTYPPHHMLPDSVILPYVTSTSQGTWPVSHEGGGAL

SEQ ID NO: 1027816 - protein, 675 aa, Homo sapiens
MNLFATWEVDGSSPSCVPRLCSLTLKKLVVFKELEKELISVVIAVKMQGSKRILRSHEIVLPPSGQVETDLALTFSLQYPHFLKREGNKLQIMLQRRKRYKNRTILGYKTLAAGSISMAEVMQHPSEGGQVLSLCSSIKEAPVKAAEIWIASLSSQPIDHEDSTMQAGPKAKSTDNYSEEEYESFSSEQEASDDAVQGQDLDEDDFDVGKPKKQRRSIVRTTSMTRQQNFKQKVVALLRRFKVSDEVLDSEQDPAEHIPEAEEDLDLLYDTLDMEHPSDSGPDMEDDDSVLSTPKPKLRPYFEGLSHSSSQTEIGSIHSARSHKEPPSPADVPEKTRSLGGRQPSDSVSDTVALGVPGPREHPGQPEDSPEAEASTLDVFTERLPPSGRITKTESLVIPSTRSEGKQAGRRGRSTSLKERQAARPQNERANSLDNERCPDARSQLQIPRKTVYDQLNHILISDDQLPENIILVNTSDWQGQFLSDVLQRHTLPVVCTCSPADVQAAFSTIVSRIQRYCNCNSQPPTPVKIAVAGAQHYLSAILRLFVEQLSHKTPDWLGYMRFLVIPLGSHPVARYLGSVDYRYNNFFQDLAWRDLFNKLEAQSAVQDTPDIVSRITQYIAGANCAHQLPIAEAMLTYKQKSPDEESSQKFIPFVGVVKVGIVEPSSATSAVLPA

SEQ ID NO: 1027817 - protein, 868 aa, Homo sapiens; identical to SEQ ID NO: 1027814

SEQ ID NO: 1027818 - protein, 859 aa, Homo sapiens
MNLFATWEVDGSSPSCVPRLCSLTLKKLVVFKELEKELISVVIAVKMQGSKRILRSHEIVLPPSGQVETDLALTFSLQYPHFLKREGNKLQIMLQRRKRYKNRTILGYKTLAAGSISMAEVMQHPSEGGQVLSLCSSIKEAPVKAAEIWIASLSSQPIDHEDSTMQAGPKAKSTDNYSEEEYESFSSEQEASDDAVQGQDLDEDDFDVGKPKKQRRSIVRTTSMTRQQNFKQKVVALLRRFKVSDEVLDSEQDPAEHIPEAEEDLDLLYDTLDMEHPSDSGPDMEDDDSVLSTPKPKLRPYFEGLSHSSSQTEIGSIHSARSHKEPPSPADVPEKTRSLGGRQPSDSVSDTVALGVPGPREHPGQPEDSPEAEASTLDVFTERLPPSGRITKTESLVIPSTRSEGKQAGRRGRSTSLKERQAARPQNERANSLDNERCPDARSQLQIPRKTVYDQLNHILISDDQLPENIILVNTSDWQGQFLSDVLQRHTLPVVCTCSPADVQAAFSTIVSRIQRYCNCNSQPPTPVKIAVAGAQHYLSAILRLFVEQLSHKTPDWLGYMRFLVIPLGSHPVARYLGSVDYRYNNFFQDLAWRDLFNKLEAQSAVQDTPDIVSRITQYIAGANCAHQLPIAEAMLTYKQKSPDEESSQKFIPFVGVVKVGIVEPSSATSGDSDDAAPSGSGTLSSTPPSASPAAKEASPTPPSSPSQGVGAELMGLQVDYWTAAQPADRKRDAEKKDLPVTKNTLKCTFRSLQVSRLPSSGEAAATPTMSMTVVTKEKNKKVMFLPKKAKDKDVESKSQCIEGISRLICTARQQQNMLRVLIDGVECSDVKFFQLAAQWSSHVKHFPICIFGHSKATF

SEQ ID NO: 1027819 - protein, 860 aa, Homo sapiens
MNLFATWEVDGSSPSCVPRLCSLTLKKLVVFKELEKELISVVIAVKMQGSKRILRSHEIVLPPSGQVETDLALTFSLQYPHFLKREGNKLQIMLQRRKRYKNRTILGYKTLAAGSISMAEVMQHPSEGGQVLSLCSSIKEAPVKAAEIWIASLSSQPIDHEDSTMQAGPKAKSTDNYSEEEYESFSSEQEASDDAVQGQDLDEDDFDVGKPKKQRRSIVRTTSMTRQQNFKQKVVALLRRFKVSDEVLDSEQDPAEHIPEAEEDLDLLYDTLDMEHPSDSGPDMEDDDSVLSTPKPKLRPYFEGLSHSSSQTEIGSIHSARSHKEPPSPADVPEKTRSLGGRQPSDSVSDTVALGVPGPREHPGQPEDSPEAEASTLDVFTERLPPSGRITKTESLVIPSTRSEGKQAGRRGRSTSLKERQAARPQNERANSLDNERCPDARSQLQIPRKTVYDQLNHILISDDQLPENIILVNTSDWQGQFLSDVLQRHTLPVVCTCSPADVQAAFSTIVSRIQRYCNCNSQPPTPVKIAVAGAQHYLSAILRLFVEQLSHKTPDWLGYMRFLVIPLGSHPVARYLGSVDYRYNNFFQDLAWRDLFNKLEAQSAVQDTPDIVSRITQYIAGANCAHQLPIAEAMLTYKQKSPDEESSQKFIPFVGVVKVGIVEPSSATSGDSDDAAPSGSGTLSSTPPSASPAAKEASPTPPSSPSVSGGLSSPSQGVGAELMGLQVDYWTAAQPADRKRDAEKKDLPVTKNTLKCTFRSLQVSRLPSQGVGAELMGLQVDYWTAAQPADRKRDVESKSQCIEGISRLICTARQQQNMLRVLIDGVECSDVKFFQLAAQWSSHVKHFPICIFGHSKATF

SEQ ID NO: 1027820 - protein, 868 aa, Homo sapiens; identical to SEQ ID NO: 1027814

SEQ ID NO: 1027821 - protein, 445 aa, Homo sapiens
AGLRALLRTRTSFVPCPLDWNLLERTPGRTNPAPASTAAMSSNSFPYNEQSGGGEATELGQEATSTISPSGAFGLFSSDLKKNEDLKQMLESNKDSAKLDAMKRIVGMIAKGKNASELFPAVVKNVASKNIEIKKLVYVYLVRYAEEQQDLALLSISTFQRALKDPNQLIRASALRVLSSIRVPIIVPIMMLAIKEASADLSPYVRKNAAHAIQKLYSLDPEQKEMLIEVIEKLLKDKSTLVAGSVVMAFEEVCPDRIDLIHKNYRKLCNLLVDVEEWGQVVIIHMLTRYARTQFVSPWKEGDELEDNGKNFYESDDDQKEKTDKKKKPYTMDPDHRLLIRNTKPLLQSRNAAVVMAVAQLYWHISPKSEAGIISKSLVRLLRSNREVQYIVLQNIATMSIQRKGMFEPYLKSFYVRSTDPTMIKTLKLEILTNLANEANISTLL

SEQ ID NO: 1027822 - protein, 160 aa, Homo sapiens
MLTRYARTQFVSPWKEGDELEDNGKNFYESDDDQKEKTDKKKKPYTMDPDHRLLIRNTKPLLQSRNAAVVMAVAQLYWHISPKSEAGIISKSLVRLLRSNREVQYIVLQNIATMSIQRKGMFEPYLKSFYVRSTDPTMIKTLKLEILTNLANEANISTLL

SEQ ID NO: 1027823 - protein, 253 aa, Homo sapiens
MGEFNEKKTTCGTVCLKYLLFTYNCCFWLAGLAVMAVGIWTLALKSDYISLLASGTYLATAYILVVAGTVVMVTGVLGCCATFKERRNLLRLYFILLLIIFLLEIIAGILAYAYYQQLNTELKENLKDTMTKRYHQPGHEAVTSAVDQLQQEFHCCGSNNSQDWRDSEWIRSQEAGGRVVPDSCCKTVVALCGQRDHASNIYKVEGGCITKLETFIQEHLRVIGAVGIGIACVQVFGMIFTCCLYRSLKLEHY

SEQ ID NO: 1027824 - protein, 105 aa, Homo sapiens
MAVGIWTLALKSDYISLLASGTYLATAYILVVAGTVVMVTGVLGCCATFKERRNLLRLYFILLLIIFLLEIIAGILAYAYYQQAEHGAQGEPEGHHDQALPPAGP

SEQ ID NO: 1027825 - protein, 253 aa, Homo sapiens; identical to SEQ ID NO: 1027823

SEQ ID NO: 1027826 - protein, 253 aa, Homo sapiens; identical to SEQ ID NO: 1027823

SEQ ID NO: 1027827 - protein, 253 aa, Homo sapiens; identical to SEQ ID NO: 1027823

SEQ ID NO: 1027828 - protein, 139 aa, Homo sapiens
MGEFNEKKTTCGTVCLKYLLFTYNCCFWLAGLAVMAVGIWTLALKSDYISLLASGTYLATAYILVVAGTVVMVTGVLGCCATFKERRNLLRLYFILLLIIFLLEIIAGILAYAYYQQAEHGAQGEPEGHHDQALPPAGP

SEQ ID NO: 1027829 - protein, 139 aa, Homo sapiens; identical to SEQ ID NO: 1027828

SEQ ID NO: 1027830 - protein, 179 aa, Homo sapiens
MGEFNEKKTTCGTVCLKYLLFTYNCCFWLAGLAVMAVGIWTLALKSDYISLLASGTYLATAYILVVAGTVVMVTGVLGCCATFKERRNLLRLVRRAQGHGVGVVQMGPRRLSLQALNLCLAVLTWGGVTVLPHLPSPVGPHVPAGPAEGRHQLRKKASGRVAAPQPPPGAWGAGVGTLL

SEQ ID NO: 1027831 - protein, 218 aa, Homo sapiens
MGEFNEKKTTCGTVCLKYLLFTYNCCFWLAGTSSCSSSSFCWRSSLVSSPTPTTSRLNTELKENLKDTMTKRYHQPGHEAVTSAVDQLQQEFHCCGSNNSQDWRDSEWIRSQEAGGRGGPRQLLQDGGGSLWTARPCLQHLQGGGRLHHQVGDLHPGAPEGHWGCGDRHCLCAGLWHDLHVLPVQESQAGALLTLPWALLLLHPTTELRPLSTRGWAP

SEQ ID NO: 1027832 - protein, 264 aa, Homo sapiens
MVPELTNVPLGLEMGSRSLQGHMGSGRCPGIQKLSLPLPHFIVTLVTVLAPPNLPSCRGLTSALPCGSELGPGPPHRPSWGSASPTLEGLRLRLKFPAPQPQLNTELKENLKDTMTKRYHQPGHEAVTSAVDQLQQEFHCCGSNNSQDWRDSEWIRSQEAGGRGGPRQLLQDGGGSLWTARPCLQHLQGGGRLHHQVGDLHPGAPEGHWGCGDRHCLCAGLWHDLHVLPVQESQAGALLTLPWALLLLHPTTELRPLSTRGWAP

SEQ ID NO: 1027833 - protein, 139 aa, Homo sapiens; identical to SEQ ID NO: 1027828

SEQ ID NO: 1027834 - protein, 139 aa, Homo sapiens; identical to SEQ ID NO: 1027828

SEQ ID NO: 1027835 - protein, 139 aa, Homo sapiens; identical to SEQ ID NO: 1027828

SEQ ID NO: 1027836 - protein, 139 aa, Homo sapiens; identical to SEQ ID NO: 1027828

SEQ ID NO: 1027837 - protein, 126 aa, Homo sapiens
MWHRLPQVPAVYLQLLLLAGCCSRSSTAVAATTHRTGETVSGSAHRRPVAVVVPDSCCKTVVALCGQRDHASNIYKVEGGCITKLETFIQEHLRVIGAVGIGIACVQVFGMIFTCCLYRSLKLEHY

SEQ ID NO: 1027838 - protein, 113 aa, Homo sapiens
KPTTSPCTNRLGRGSVLNRPRGGGSLWTARPCLQHLQGGGRLHHQVGDLHPGAPEGHWGCGDRHCLCAGLWHDLHVLPVQESQAGALLTLPWALLLLHPTTELRPLSTRGWAP

SEQ ID NO: 1027839 - protein, 139 aa, Homo sapiens; identical to SEQ ID NO: 1027828

SEQ ID NO: 1027840 - protein, 274 aa, Homo sapiens
RGFRPAERPPPREGLEAGAGLGPGAGAVPLVGSGPRILSAGSRRPRSCCRRRQGPDSDAWYSLESWGASVHLSCRGVVSSPAGECWPGGAEQAGRRKSRPGCAVWKRGPGAQLLSAPHALPGFPMLTAAHCCSPRMGEFNEKKTTCGTVCLKYLLFTYNCCFWLAGLAVMAVGIWTLALKSDYISLLASGTYLATAYILVVAGTVVMVTGVLGCCATFKERRNLLRLYFILLLIIFLLEIIAGILAYAYYQQAEHGAQGEPEGHHDQALPPAGP

SEQ ID NO: 1027841 - protein, 179 aa, Homo sapiens; identical to SEQ ID NO: 1027830

SEQ ID NO: 1027842 - protein, 264 aa, Homo sapiens; identical to SEQ ID NO: 1027832

SEQ ID NO: 1027843 - protein, 139 aa, Homo sapiens; identical to SEQ ID NO: 1027828

SEQ ID NO: 1027844 - protein, 139 aa, Homo sapiens; identical to SEQ ID NO: 1027828

SEQ ID NO: 1027845 - protein, 139 aa, Homo sapiens; identical to SEQ ID NO: 1027828

SEQ ID NO: 1027846 - protein, 139 aa, Homo sapiens; identical to SEQ ID NO: 1027828

SEQ ID NO: 1027847 - protein, 253 aa, Homo sapiens; identical to SEQ ID NO: 1027823

SEQ ID NO: 1027848 - protein, 253 aa, Homo sapiens; identical to SEQ ID NO: 1027823

SEQ ID NO: 1027849 - protein, 247 aa, Homo sapiens
CSIKPCQEGGVFPRARGATSVPTRVRGLSSKRPVRGALVVLGRRDPGPRKARSARLRPAGGKFFSSEWDERLEGSELKSCRMRSVCLLGQPASPAAEEAAGGSPGRPRTWAQPGAATSAAGCAHEQPGSPEGRAPRRSSLGSRSRAMCSAQATRNTIRMSTRNRRTSIIFMAARAGPGLERVLPARPSSCSWARARRRLAGQGPSVPGGYQLRGCPRARAACRAPAAGALGPRAISGPSPLGLSGAA

SEQ ID NO: 1027850 - protein, 71 aa, Homo sapiens
  misc_feature (12)..(12): Xaa can be any naturally occurring amino acid
  misc_feature (23)..(23): Xaa can be any naturally occurring amino acid
  misc_feature (32)..(32): Xaa can be any naturally occurring amino acid
IQLLQMNFAKIXKCNLTLQMKIXEQEKEIAEXKKQLNLLSQDKGVRDDGKDGGVEMKVDLTFKVVNWNVNF

SEQ ID NO: 1027851 - protein, 169 aa, Homo sapiens
MATAEPSGRALRLSTPGPRPSGARDRAPGAAGPPSGQIGNRALRLGERTPAAVEKRGPYMVTRAPSIQAKLRSVKFNKGYTALSQSPDENLVSLDSDSDGELGSRYSSGYSSAEQVNQDVSRQLLQDGYHLDEIPDDEDLDLIPPKPMASSTCSCCWCCLGDSSSCTLQ

SEQ ID NO: 1027852 - protein, 198 aa, Homo sapiens
MATAEPSGRALRLSTPGPRPSGARDRAPGAAGPPSGQIGNRALRLGERTPAAVEKRGPYMVTRAPSIQAKLQKHRDLAKAVLRRKGMLGASPNRPDSSGKRSVKFNKGYTALSQSPDENLVSLDSDSDGELGSRYSSGYSSAEQVNQDVSRQLLQDGYHLDEIPDDEDLDLIPPKPMASSTCSCCWCCLGDSSSCTLQ

SEQ ID NO: 1027853 - protein, 119 aa, Homo sapiens
GRVPRAGSGAPLGLGPGGKGLAAACSRPSKSVRKERPPSLRETRRSGEDPADPGPLTSREAPGPGQGRSAEKRHAGGLAEPPRLFREKVSAGATSSVPAALEKALIPRTEAGCSGLRPS

SEQ ID NO: 1027854 - protein, 119 aa, Homo sapiens
MATAEPSGRALRLSTPGPRPSGARDRAPGAAGPPSGQIGNRALRLGERTPAAVEKRGPYMVTRAPSIQAKLRSVKFNKGYTALSQSPDENLVSLDSDRPFMYIPGPFSSEQYPFPGWLG

SEQ ID NO: 1027855 - protein, 95 aa, Homo sapiens
VESQSSLRGEGSRARCVDKAAHHPLPLEPMLYYASPLFCYYPIFFSFDRDYVWAPSGNCQSTDFQTYWELDIYLNASGFSENRSWGSVTVKSGQY

SEQ ID NO: 1027856 - protein, 198 aa, Homo sapiens; identical to SEQ ID NO: 1027852

SEQ ID NO: 1027857 - protein, 198 aa, Homo sapiens; identical to SEQ ID NO: 1027852

SEQ ID NO: 1027858 - protein, 198 aa, Homo sapiens; identical to SEQ ID NO: 1027852

SEQ ID NO: 1027859 - protein, 198 aa, Homo sapiens; identical to SEQ ID NO: 1027852

SEQ ID NO: 1027860 - protein, 198 aa, Homo sapiens; identical to SEQ ID NO: 1027852

SEQ ID NO: 1027861 - protein, 113 aa, Homo sapiens
MATAEPSGRALRLSTPGPRPSGARDRAPGAAGPPSGQIGNRALRLGERTPAAVEKRGPYMVTRAPSIQAKLQKHRDLAKAVLRRKGMLGASPNRPDSSGKRSQQAPPPLCQQL

SEQ ID NO: 1027862 - protein, 127 aa, Homo sapiens
MATAEPSGRALRLSTPGPRPSGARDRAPGAAGPPSGQIGNRALRLGERTPAAVEKRGPYMVTRAPSIQAKLQKHRDLAKAVLRRKGMLGASPNRPDSSGKRSVKFNKGYTALSQSPDENLVSLDSDR

SEQ ID NO: 1027863 - protein, 198 aa, Homo sapiens; identical to SEQ ID NO: 1027852

SEQ ID NO: 1027864 - protein, 169 aa, Homo sapiens; identical to SEQ ID NO: 1027851

SEQ ID NO: 1027865 - protein, 198 aa, Homo sapiens; identical to SEQ ID NO: 1027852

SEQ ID NO: 1027866 - protein, 198 aa, Homo sapiens; identical to SEQ ID NO: 1027852

SEQ ID NO: 1027867 - protein, 198 aa, Homo sapiens; identical to SEQ ID NO: 1027852

SEQ ID NO: 1027868 - protein, 370 aa, Homo sapiens
MSHPSPQAKPSNPSNPRVFFDVDIGGERVGRIVLELFADIVPKTAENFRALCTGEKGIGHTTGKPLHFKGCPFHRIIKKFMIQGGDFSNQNGTGGESIYGEKFEDENFHYKHDREGLLSMANAGRNTNGSQFFITTVPTPHLDGKHVVFGQVIKGIGVARILENVEVKGEKPAKLCVIAECGELKEGDDGGIFPKDGSGDSHPDFPEDADIDLKDVDKILLITEDLKNIGNTFFKSQNWEMAIKKYAEVLRYVDSSKAVIETADRAKLQPIALSCVLNIGACKLKMSNWQGAIDSCLEALELDPSNTKALYRRAQGWQGLKEYDQALADLKKAQGIAPEDKAIQAELLKVKQKIKAQKDKEKAVYAKMFA

SEQ ID NO: 1027869 - protein, 113 aa, Homo sapiens
MSHPSPQAKPSNPSNPRVFFDVDIGGERVGRIVLELFADIVPKTAENFRALCTGEKGIGHTTGKPLHFKGCPFHRIIKKFMIQGGDFSNQNGTGGESIYGEKFEDENFHYKVK

SEQ ID NO: 1027870 - protein, 370 aa, Homo sapiens; identical to SEQ ID NO: 1027868

SEQ ID NO: 1027871 - protein, 370 aa, Homo sapiens; identical to SEQ ID NO: 1027868

SEQ ID NO: 1027872 - protein, 336 aa, Homo sapiens
VLTMGCDGGTIPKRHESGEVGRRRLRLSTKMLNYWPNGTIVLLSPGNIKTTNSCHVNLAALYNKDAVIEFLLDKSAEKALGKAASHIKSIKNVTELKLSDNPAWEGDKGNTKGDKHDDLQRARFICPVVGLEMNGRHRFCFLRCCGCVFSERALKEIKAEVCHTCGAAFQEDDVIVLNGTKEDVDVLKTRMEERRLRAKLEKKTKKPKAAESVSKPDVSAERKLEKKTKKPKAAESVSKPDVSEEAPGPSKVKTGKPEEASLDSREKKTNLAPKSTAMNEKLFWKSWEASDVDATKRSIADSEESEAYKSLFTTHSSAKRSKEESAHWVTHTSYRF

SEQ ID NO: 1027873 - protein, 313 aa, Homo sapiens
VLTMGCDGGTIPKRHESGEVGRRRLRLSTKMLNYWPNGTIVLLSPGNIKTHQIVAMCNLAALYNKDAVIEFLLDKSAEKALGKAASHIKSIKNVTELKLSDNPAWEGDKGNTKGDKHDDLQRARFICPVVGLEMNGRHRFCFLRCCGCVFSERALKEIKAEVCHTCGAAFQEDDVIVLNGTKEDVDVLKTRMEERRLRAKLDKKTKKPKAAESVSKPDVSEEAPGPSKVKTGKPEEASLDSREKKTNLAPKSTAMNEKLFWKSWEASDVDATKRSIADSEESEAYKSLFTTHSSAKRSKEESAHWVTHTSYRF

SEQ ID NO: 1027874 - protein, 192 aa, Homo sapiens
CPHAASFYSELFTLYLLLHEREDSFYSQGIANLSLFPDTQLLEFLDVQKHLWPLKDLTLTSNQRYSLVRDKCFLSATECLQKIMTTVDPREKLEVLERTYGEIEGTVSRVLGREYKLPMDDLLPLLIYVVSRARIQHLGAEIHLIRDMMDPNHTGGLYDFLLTALESCYEHIQKEDMRLHRLPGHWHSRELW

SEQ ID NO: 1027875 - protein, 290 aa, Homo sapiens
CPHAASFYSELFTLYLLLHEREDSFYSQGIANLSLFPDTQLLEFLDVQKHLWPLKDLTLTSNQRYSLVRDKCFLSATECLQKIMTTVDPREKLEVLERTYGEIEGTVSRVLGREYKLPMDDLLPLLIYVVSRARGGSQELGVQAGAGSHPQPRYLLIPLNPRFMDAASLCTDGEAKAQKRRVPARCWGARGRVRTTPQVSSHPGQRSFPSCLSATGLFSLSPSSLGGAVFSRIQHLGAEIHLIRDMMDPNHTGGLYDFLLTALESCYEHIQKEDMRLHRLPGHWHSRELW

SEQ ID NO: 1027876 - protein, 162 aa, Homo sapiens
SYLWRRGLRPALGRGDVRAGGPWPHPATPSTMQRYSLVRDKCFLSATECLQKIMTTVDPREKLEVLERTYGEIEGTVSRVLGREYKLPMDDLLPLLIYVVSRARIQHLGAEIHLIRDMMDPNHTGGLYDFLLTALESCYEHIQKEDMRLHRLPGHWHSRELW

SEQ ID NO: 1027877 - protein, 82 aa, Homo sapiens
VHYSPFLPSLRNVDDAGVEHWGLDEPLLKHWEFDAPSPLPQTTENVVCALGLTVGLVGIIIGTIFIIKGVRKSNAAERRGPL

SEQ ID NO: 1027878 - protein, 82 aa, Homo sapiens; identical to SEQ ID NO: 1027877

SEQ ID NO: 1027879 - protein, 85 aa, Homo sapiens
  misc_feature (5)..(5): Xaa can be any naturally occurring amino acid
  misc_feature (20)..(20): Xaa can be any naturally occurring amino acid
  misc_feature (25)..(25): Xaa can be any naturally occurring amino acid
  misc_feature (29)..(30): Xaa can be any naturally occurring amino acid
  misc_feature (33)..(33): Xaa can be any naturally occurring amino acid
  misc_feature (35)..(35): Xaa can be any naturally occurring amino acid
  misc_feature (44)..(44): Xaa can be any naturally occurring amino acid
  misc_feature (46)..(46): Xaa can be any naturally occurring amino acid
QKENXVVLLPPGALKLLVSXVVPSXYLWXXSFXPXKGKMPTKRXMXEETQGASVRHMEVMVFLREKITEETSALMTLQSWQYYNP

SEQ ID NO: 1027880 - protein, 82 aa, Homo sapiens; identical to SEQ ID NO: 1027877

SEQ ID NO: 1027881 - protein, 82 aa, Homo sapiens; identical to SEQ ID NO: 1027877

SEQ ID NO: 1027882 - protein, 85 aa, Homo sapiens; identical to SEQ ID NO: 1027879
  misc_feature (5)..(5): Xaa can be any naturally occurring amino acid
  misc_feature (20)..(20): Xaa can be any naturally occurring amino acid
  misc_feature (25)..(25): Xaa can be any naturally occurring amino acid
  misc_feature (29)..(30): Xaa can be any naturally occurring amino acid
  misc_feature (33)..(33): Xaa can be any naturally occurring amino acid
  misc_feature (35)..(35): Xaa can be any naturally occurring amino acid
  misc_feature (44)..(44): Xaa can be any naturally occurring amino acid
  misc_feature (46)..(46): Xaa can be any naturally occurring amino acid

SEQ ID NO: 1027883 - protein, 183 aa, Homo sapiens
GWWGGESSPFLVLRDSHPSSEGAGCPARDGPIIPSPGTHRPHVSLGTALASLNFWPPCAFRKVLSDDMKKLKARMHQAIERFYDKMPNAESGRGQVMSSLAELEDDFKEGYLETVAAYYEEQHPELTPLLEKERDGLRCRGYRSPVPDLEDPAPRSLGRAVVNQVTEMVPALLLVSALMLVLS

SEQ ID NO: 1027884 - protein, 139 aa, Homo sapiens
MSAGLGSLNFWPPCAFRKVLSDDMKKLKARMHQAIERFYDKMQNAESGRGQVMSSLAELEDDFKEGYLETVAAYYEEQHPELTPLLEKERDGLRCRGYRSPVPDLEDPAPRSLGRAVVNQVTEMVPALLLVSALMLVLS

SEQ ID NO: 1027885 - protein, 129 aa, Homo sapiens
  misc_feature (97)..(97): Xaa can be any naturally occurring amino acid
  misc_feature (128)..(128): Xaa can be any naturally occurring amino acid
MSFQNNVLRTIGEVAIKTIFPLQTGVGTLANAILFFHNIFPILTEHQMRPTHKILTHMAVANSLVLLSTGIPHTMVSFVLWKPLSSLECKLVFTGLXVLTWCSARVDLPRCWNYRREPPLLAYASILXS

SEQ ID NO: 1027886 - protein, 117 aa, Homo sapiens
MTALMESTEYFRFSPGPLESGCTHGICFDPGDVRGSEACHHEAEELGAIEMGHSLLHLLEQLTAPIWRLLLYSRGRMRACGAQGTGEPWRMCSMGRKRAFSGVHFHSLGLFLTYSDT

SEQ ID NO: 1027887 - protein, 125 aa, Homo sapiens
MEDILFPRSGLHSYWGPLKCTMGVASPAYFAENPRTFDLLSPEEYLILCQNLLSSPVKTIPVLFDLSQMGKTWCRIREQCIVVNPWLESWSTEHHRSFIHAGWPRLNRIKTSLADFSAVIMGSSV

SEQ ID NO: 1027888 - protein, 59 aa, Homo sapiens
MPQTLSVLVLAGAHEHANGLIPTPFQGQLRTSHVRHKYWTSPNDISYSPTQFSDQSVRM

SEQ ID NO: 1027889 - protein, 697 aa, Homo sapiens [sequence omitted]

SEQ ID NO: 1027890 - protein, 678 aa, Homo sapiens
MDDPDCDSTWEEDEEDAEDAEDEDCEDGEAAGARDADAGDEDEESEEPRAALAQLVPVQNDRVQKRGEPRGDMCRYRHNYPDLVERDCNGDTPNLSFYRNEIRFLPNGCFIEDILQNWTDNYDLLEDNHSYIQWLFPLREPGVNWHAKPLTLREVEVFKSSQEIQERLVRAYELMLGFYGIRLEDRGTGTVGRAQNYQKRFQNLNWRSHNNLRITRILKSPCELSLEHFQAPLVRFFLEETLVRRELPGVRQSALDYFMFAVRCRHQRRQLVHFAWEHFRPRCKFVWGPQDKLRRFKPSSLPHPLEGSRKVEEEGSPGDPDHEASTQGRTCEPEHSKGGGRVDEGPQPRSVEPQDAGPLERSQGDEAGGHGEDRPEPLSPKESKKRKLELSRREQPPTGPGPQSASEVEKIALNLEGCALSQGSLRTGTQEVGGQDPGEAVQPCRQPLGAKVADKVRKRRKVDEGTGDSAAVASGGAQTLALAGSPAPSGHPKAGHSENGVEEDTEGRTGPKEGTPGSPSETPGPSPAGPAGDEPAESPSETPGPRPAGPAGDEPAESPSETPGPRPAGPAGDEPAKIPSETPGPSPAGPTRDEPAESPSETPGPRPAGPAGDEPAESPSETPGPRPAGPAGDEPAESPSETPGPSPAGPTRDEPAKAGEAAELQDAEVESSAKSGKP

SEQ ID NO: 1027891 - protein, 109 aa, Homo sapiens
  misc_feature (81)..(81): Xaa can be any naturally occurring amino acid
  misc_feature (85)..(85): Xaa can be any naturally occurring amino acid
MDPLRAQQLAADSEVEMMADMYNRMTSACHRKCVPPHYKEAELSKGESVCLDRCVSKYLDIHERIGKKLQNWLCRMKSLLXRCPXTLGPDEGPFNIPPGGLSPPPSHFN

SEQ ID NO: 1027892 - protein, 218 aa, Homo sapiens
LIHAVLHLEQVLTTGGGWQDQVGGLMPGIKVGRSRAQLPLKVEVEEVTVPEGFVQKLNDHLLLVYTGKTRLARNLLQDVLRSWYARLPAVVQNAHSLVRQTEECAEGFRQGSLPLLGQCLTSYWEQKKLMAPGCEPLTVRRMMDVLAPHVHGQSLAGAGGGGFLYLLTKEPQQKEALEAVLAKTEGLGNYSIHLVEVDTQGLSLKLLGTEASTCCPFP

SEQ ID NO: 1027893 - protein, 163 aa, Homo sapiens
  misc_feature (6)..(7): Xaa can be any naturally occurring amino acid
  misc_feature (16)..(16): Xaa can be any naturally occurring amino acid
  misc_feature (18)..(18): Xaa can be any naturally occurring amino acid
  misc_feature (22)..(22): Xaa can be any naturally occurring amino acid
  misc_feature (34)..(34): Xaa can be any naturally occurring amino acid
  misc_feature (41)..(41): Xaa can be any naturally occurring amino acid
  misc_feature (55)..(55): Xaa can be any naturally occurring amino acid
  misc_feature (80)..(80): Xaa can be any naturally occurring amino acid
MPSPEXXVSVQEEGLXLXSGLXDGPLPCCPGFGXEAIPELXVLGLPHPVLSTAHXRVLAPSLLAAVGAASLTLVTARSAXTPLQEVTHVSSLALTAAGPQASEFWMLPCGSNRHRLPFRRWRGRFPQASELCAGAVAMGRCSTLPPPRVFLGNTLECLSEGPA

SEQ ID NO: 1027894 - protein, 101 aa, Homo sapiens
KVVTFCDYAYNTFRSPRCMSSAEEGPKRRGGGGKENQFFLQATDKNSLLGMEGANSIFSGFLLFSRYGGLTCGLLHIHPGSPCQQRSLYPQHHPLPSQCTQ

SEQ ID NO: 1027895 - protein, 137 aa, Homo sapiens
PVRDPKGFLQQHILKGLGAVGQDAGHSADETIGVVHLVLRRLLQEQHQLSSRSEERGKGWAGITQHNGSASRLAVLWATPHTASLSSVCAVAGKNERTHREKTVSREGDAWGWKKEALCLPRGWKELLCSLHSPLPG

SEQ ID NO: 1027896 - protein, 172 aa, Homo sapiens
RTSACALGGAGRAGAGCERTASAGRVRGAVGRRLFSGCLADEASQKMSKQQPTQFINPETPGYVGFANLPNQVHRKSVKKGFEFTLMVVGESGLGKSTLINSLFLTDLYPERVIPGAAEKIERTVQIEASTVEIEERGVKLRLTVVDTPGYGDAINCRDWDASPGHGTGIGT

SEQ ID NO: 1027897 - protein, 140 aa, Homo sapiens
  misc_feature (3)..(4): Xaa can be any naturally occurring amino acid
PIXXWPGGRRLFSGCLADEASQKMSKQQPTQFINPETPGYVGFANLPNQVHRKSVKKGFEFTLMVVGESGLGKSTLINSLFLTDLYPERVIPGAAEKIERTVQIEASTVEIEERGVKLRLTVVDTPGYGDAINCRDWSRS

SEQ ID NO: 1027898 - protein, 268 aa, Homo sapiens
SGHPPARWAGRGGLGRAVSGPRALGGSAARSVGACSRAVWRSECLAGVPRTSCGPALPRSCGGRAARPILSGGGRLALGCRRGGVGEGRPSPGSSALIVGSPVPGGPSAGDSGSDTGRPGRGSGDSGDPLLTLREFLCTVVGAGPRGVECGRGREVWCLEGGYRFRPDKHLELVWPSCLSNGAISSLRRGGLASPQTSKPIGWMPWISEGRATRPCLRVPSARRGDEGLHQRGTDRQQGVGYRVGGRRVGPGMRSKPVASVVSVESQL

SEQ ID NO: 1027899 - protein, 111 aa, Homo sapiens
REGPPDHRDGGGGGLDQFRAAARRPPPSRTRRPSSVLPPSSWRTGGEAKAPPPRDRSALPPPPALPRPPLSSSVGTCLLLTNGLPPTPVTHRKAKILITCSTLISIRKPSS

SEQ ID NO: 1027900 - protein, 247 aa, Homo sapiens
RTSACALGGAGRAGAGCERTASAGRVRGAVGRRLFSGCLADEASQKMSKQQPTQFINPETPGYVGFANLPNQVHRKSVKKGFEFTLMVVGESGLGKSTLINSLFLTDLYPERVIPGAAEKIERTVQIEASTVEIEERGVKLRLTVVDTPGYGDAINCRDCFKTIISYIDEQFERYLHDESGLNRRHIIDNRVHCCFYFISPFGHGLKPLDVAFMKAIHNKVNIVPVIAKADTLTLKERERLKNKDSG

SEQ ID NO: 1027901 - protein, 201 aa, Homo sapiens
MSKQQPTQFINPETPGYVGFANLPNQVHRKSVKKGFEFTLMVVGESGLGKSTLINSLFLTDLYPERVIPGAAEKIERTVQIEASTVEIEERGVKLRLTVVDTPGYGDAINCRDCFKTIISYIDEQFERYLHDESGLNRRHIIDNRVHCCFYFISPFGHGLKPLDVAFMKAIHNKVNIVPVIAKADTLTLKERERLKNKDSG

SEQ ID NO: 1027902 - protein, 201 aa, Homo sapiens; identical to SEQ ID NO: 1027901

SEQ ID NO: 1027903 - protein, 665 aa, Homo sapiens
MNLEKLSKPELLTLFSILEGELEARDLVIEALKAQHRDTFIEERYGKYNISDPLMALQRDFETLKEKNDGEKQPVCTNPLSILKVVMKQCKNMQERMLSQLAAAESRHRKVILDLEEERQRHAQDTAEGDDVTYMLEKERERLTQQLEFEKSQVKKFEKEQKKLSSQLEEERSRHKQLSSMLVLECKKATNKAAEEGQKAGELSLKLEKEKSRVSKLEEELAAERKRGLQTEAQVEKQLSEFDIEREQLRAKLNREENRTKTLKEEMESLKKIVKDLEASHQHSSPNEQLKKPVTVSKGTATEPLMLMSVFCQTESFPAERTHGSNIAKMTNTGLPGPATPAYSYAKTNGHCDPEIQTTRELTAGNNVENQVPPREKSVALAQEKPVENGGCPVGIETPVPMPSPLSSSGSSLSPSSTASSSLTSSPCSSPVLTKRLLGSSASSPGYQSSYQVGINQRFHAARHKFQSQADQDQQASGLQSPPSRDLSPTLIDNSAAKQLARNTVTQVLSRFTSQQGPIKPVSPNSSPFGTDYRNLANTANPRGDTSQFTYSRESVQSPEPPCLQESSPQPSPELREETLQPIPPKKPGLTAFSICYHSIDQNSFPGSLFDHMQKTLPGSCSSNTVVANGKDVDVTFAYQQLVPRRESPRFDSSIRFRPKAQSDF

SEQ ID NO: 1027904 - protein, 161 aa, Homo sapiens
MVVGESGLGKSTLINSLFLTDLYPERVIPGAAEKIERTVQIEASTVEIEERGVKLRLTVVDTPGYGDAINCRDCFKTIISYIDEQFERYLHDESGLNRRHIIDNRVHCCFYFISPFGHGLKPLDVAFMKAIHNKVNIVPVIAKADTLTLKERERLKNKDSG

SEQ ID NO: 1027905 - protein, 111 aa, Homo sapiens; identical to SEQ ID NO: 1027899

SEQ ID NO: 1027906 - protein, 201 aa, Homo sapiens; identical to SEQ ID NO: 1027901

SEQ ID NO: 1027907 - protein, 224 aa, Homo sapiens
  misc_feature (3)..(4): Xaa can be any naturally occurring amino acid
PIXXWPGGRRLFSGCLADEASQKMSKQQPTQFINPETPGYVGFANLPNQVHRKSVKKGFEFTLMVVGESGLGKSTLINSLFLTDLYPERVIPGAAEKIERTVQIEASTVEIEERGVKLRLTVVDTPGYGDAINCRDCFKTIISYIDEQFERYLHDESGLNRRHIIDNRVHCCFYFISPFGHGLKPLDVAFMKAIHNKVNIVPVIAKADTLTLKERERLKNKDSG

SEQ ID NO: 1027908 - protein, 185 aa, Homo sapiens
RTSACALGGAGRAGAGCERTASAGRVRGAVGRRLFSGCLADEASQKMSKQQPTQFINPETPGYVGFANLPNQVHRKSVKKGFEFTLMVVGESGLGKSTLINSLFLTDLYPERVIPGAAEKIERTVQIEASTVEIEERGVKLRLTVVDTPGYGDAINCRDWYAPPCPGICICLLNILHKFIDSVNE

SEQ ID NO: 1027909 - protein, 126 aa, Homo sapiens
RTSACALGGAGRAGAGCERTASAGRVRGAVGRRLFSGCLADEASQKMSKQQPTQFINPETPGYVGFANLPNQVHRKSVKKGFEFTLMVVGESGLGKSTLINSLFLTDLYPERVIPGAAGKNILMLL

SEQ ID NO: 1027910 - protein, 197 aa, Homo sapiens
MPWISEGRATRPCLRVPSARRGDEDEASQKMSTKLHKRCLESGLGKSTLINSLFLTDLYPERVIPGAAEKIERTVQIEASTVEIEERGVKLRLTVVDTPGYGDAINCRDCFKTIISYIDEQFERYLHDESGLNRRHIIDNRVHCCFYFISPFGHGLKPLDVAFMKAIHNKVNIVPVIAKADTLTLKERERLKNKDSG

SEQ ID NO: 1027911 - protein, 193 aa, Homo sapiens
SGHPPARWAGRGGLGRAVSGPRALGGSAARSVGACSRAVWRSECLAGVPRTSCGPALPRSCGGRAARPILSGGGRLALGCRRGGVGEGRPSPGSSALIVGSPVPGGPSAGDSGSDTGRPGRGSGDSGDPLLTLREFLCTVVGAGPRGVECGRGREVWCLEGGYRFRPDKHLELVWPSCLSRQTLRACVAILSF

SEQ ID NO: 1027912 - protein, 665 aa, Homo sapiens; identical to SEQ ID NO: 1027903

SEQ ID NO: 1027913 - protein, 665 aa, Homo sapiens; identical to SEQ ID NO: 1027903

SEQ ID NO: 1027914 - protein, 266 aa, Homo sapiens
SCLRSAQAGVGPGWPRGQGLSFGHWRARFGPLVVACAGSPVRAITGRVWSFGLCIISPGGLESCRSGGKGPVRSCAWQAIPRFGPVTPIDGRGHWSLPWTSVQVSNQFSCMSPQGRFFAVFTFIQNGFISLYFLSAQGLHGTPEVNEEALMDRNLCFRPGSSGFLGTFPGKQHFCRKWREGILVGWRSLSSSECVVVATLICWRNQPTFGCCRPNFSLGPNRPRNSCFDLTPTHNPGKPQQNSVSSQKVRPEAASVSLPAFAVPLL

SEQ ID NO: 1027915 - protein, 201 aa, Homo sapiens; identical to SEQ ID NO: 1027901

SEQ ID NO: 1027916 - protein, 201 aa, Homo sapiens; identical to SEQ ID NO: 1027901

SEQ ID NO: 1027917 - protein, 161 aa, Homo sapiens; identical to SEQ ID NO: 1027904

SEQ ID NO: 1027918 - protein, 201 aa, Homo sapiens; identical to SEQ ID NO: 1027901

SEQ ID NO: 1027919 - protein, 223 aa, Homo sapiens
MPWISEGRATRPCLRVPSARRGDEEQQPTQFINPETPGYVGFANLPNQVHRKSVKKGFEFTLMVVGESGLGKSTLINSLFLTDLYPERVIPGAAEKIERTVQIEASTVEIEERGVKLRLTVVDTPGYGDAINCRDCFKTIISYIDEQFERYLHDESGLNRRHIIDNRVHCCFYFISPFGHGLKPLDVAFMKAIHNKVNIVPVIAKADTLTLKERERLKNKDSG

SEQ ID NO: 1027920 - protein, 665 aa, Homo sapiens; identical to SEQ ID NO: 1027903

SEQ ID NO: 1027921 - protein, 206 aa, Homo sapiens
RTSACALGGAGRAGAGCERTASAGRVRGAVGRRLFSGCLAETKLHKRCLESGLGKSTLINSLFLTDLYPERVIPGAAEKIERTVQIEASTVEIEERGVKLRLTVVDTPGYGDAINCRDCFKTIISYIDEQFERYLHDESGLNRRHIIDNRVHCCFYFISPFGHGLKPLDVAFMKAIHNKVNIVPVIAKADTLTLKERERLKNKDSG

SEQ ID NO: 1027922 - protein, 665 aa, Homo sapiens; identical to SEQ ID NO: 1027903

SEQ ID NO: 1027923 - protein, 31 aa, Homo sapiens
MLCCVCCVRVCCVRVCVLCVHVCAVSVCVYM

SEQ ID NO: 1027924 - protein, 100 aa, Homo sapiens
CVLAVGGGGGASRRFEIRRVREAGRILRRVGVGAGCSAAIVRVGVCARLEGSARGFLFLLLRGCSSGLRPDPAPMASEELQKDLEEVKVLLEKATRKKST

SEQ ID NO: 1027925 - protein, 176 aa, Homo sapiens
  misc_feature (12)..(12): Xaa can be any naturally occurring amino acid
  misc_feature (28)..(28): Xaa can be any naturally occurring amino acid
  misc_feature (54)..(54): Xaa can be any naturally occurring amino acid
  misc_feature (57)..(57): Xaa can be any naturally occurring amino acid
  misc_feature (62)..(62): Xaa can be any naturally occurring amino acid
  misc_feature (71)..(71): Xaa can be any naturally occurring amino acid
  misc_feature (88)..(88): Xaa can be any naturally occurring amino acid
  misc_feature (120)..(120): Xaa can be any naturally occurring amino acid
LTPRLLSVRFRXGGAPQALTLRLPVTIXKFFQPTEMAAQDFFQRWKQLSLPQRXAQXFFNAXLPLDADVTXAKLLGFGSALLDNVAPXPENFVGAGFIQTKALQVGFKISAGAQCPGPVXPAAPAPQQGALLPSPVCAAGTAVLSPGLCPGGCGRHWAAPWTEAVLVDGGPPLVTE

SEQ ID NO: 1027926 - protein, 66 aa, Homo sapiens
MKNDASVHRSFIHLPKTESNPDTLSTGQMGKQTAAHRFHKTALSRRQDWATDAGGSGDKPEMSYAE

SEQ ID NO: 1027927 - protein, 79 aa, Homo sapiens
ELRTQSVKILKGEAPPAFFNFSNQEWQVNPLLAAIRIPHQAGIQAGASTPTNATAASDANTGDRGQTNNAASASASNST

SEQ ID NO: 1027928 - protein, 109 aa, Homo sapiens
MPTESKNGTDRDEKPGDRREGNRRSERNTEGTGKKQVERNGEHRRKQGHEKKTKGSTKQERETETRATKKQSDRRTERTEENKKHTTDTERRPKEEERKKRRRRKDNAE

SEQ ID NO: 1027929 - protein, 194 aa, Homo sapiens
MPASLLAGVKGAGISEVSWAESPEWEEVAGRGSEEENRGPGGLCFFPDTGAVEETSAADARGATRPRQSWDLGLSCCASIVGALETGGPPEAPVASEDKVWEGREGLQSEMALSSTCSALLMRWNAASFSRCRSSAVTRYPSSKGGGSIKGSPRLRGSRGILRLRGLEAWDLGEPPLGASVCPGAVSAAFSHRV

SEQ ID NO: 1027930 - protein, 274 aa, Homo sapiens
MLELELALRLRQDLVREVWDLWLYLTSDLWARAAAVAEAKKCEGPPSTALSSDPDVGFNVEGGGAAAAAAGAEVPGLVLLMPASLLAAVKVAGISEVTWAESREWEEVAGRGSEEENRGPGGLCFFPDTGAVEETSAADARGATRPRQSWDLGLSCCASIVGALETGGPPEAPVASEDKVWEGREGLQSEMALSSTCSALLMRWNAASFSRCRSSAVTRYPSSKGGGSIKGSPRLRGSRGILRLRGLEAWDLGEPPLGASVCPGAVSAAFSHRV

SEQ ID NO: 1027931 - protein, 117 aa, Homo sapiens
  misc_feature (44)..(44): Xaa can be any naturally occurring amino acid
  misc_feature (49)..(49): Xaa can be any naturally occurring amino acid
LERGSDFIDRFVMDEPFDEHLQVEKSWMYVAKGYARESHFRGLXQNVHXVFENSVEDILSKKGCQQGQGGPGPCARPVRKENKETFDHQCREKGVLRPTLIPAPTVTPTTTLTVPVT

SEQ ID NO: 1027932 - protein, 330 aa, Homo sapiens
  misc_feature (47)..(47): Xaa can be any naturally occurring amino acid
  misc_feature (49)..(49): Xaa can be any naturally occurring amino acid
  misc_feature (69)..(69): Xaa can be any naturally occurring amino acid
SEKNKMESWNWVLVFGCILVRMSEDNMIDMVTYMLDCYKIVETLIQXLXWFFSDEEDKGERTLVGDKEXQAVPNIEYLLPNIWQDSAPWRPGVSGPVGDLKDSTTCSSAKSKGSWAPKKEPYAREMLAISFISAVNRKRKKRREARGLGSSTDDDSEQEAHKPGAGATAPGTQERPLGPLPGAVAPEAPGRLSPPAAPEERPAADTRSIVSGYSTLSTMDRSVCSGASGRRAGAGDEADDERSELSHVETDTEGAAGAGPGGRLTRRPSFSSHHLMPCDTLARRRLARGRPDGEGAGRGGPRAPEPPGSASSSSQESLRPPAAALASRPS

SEQ ID NO: 1027933 - protein, 183 aa, Homo sapiens
MEPEEGTPLWRLQKLPAELGPQLLHKIIDGICGRAYPVYQDYHTVWESEEWMHVLEDIAKFFKAIVGKNLPDEEIFQQLNQLNSLHQETIMKCVKSRKDEIKQALSREIVAISSAQLQDFDWQVKLALSSDKIAALRMPLLSLHLDVKENGEVKPYSIEMSREELQNLIQSLEAANKVVLQLK

SEQ ID NO: 1027934 - protein, 123 aa, Homo sapiens
MEPEEGTPLWRLQKLPAELGPQLLHKIIDGICGRAYPVYQDYHTVWESEEWMHVLEDIAKFFKAIVGKNLPDEEKYLSEDMKILGCILEKLDCFSLHIMLLMHFELIFVYGVEVKFTIFYINI

SEQ ID NO: 1027935 - protein, 183 aa, Homo sapiens; identical to SEQ ID NO: 1027933

SEQ ID NO: 1027936 - protein, 183 aa, Homo sapiens; identical to SEQ ID NO: 1027933

SEQ ID NO: 1027937 - protein, 183 aa, Homo sapiens; identical to SEQ ID NO: 1027933

SEQ ID NO: 1027938 - protein, 183 aa, Homo sapiens; identical to SEQ ID NO: 1027933

SEQ ID NO: 1027939 - protein, 183 aa, Homo sapiens; identical to SEQ ID NO: 1027933

SEQ ID NO: 1027940 - protein, 183 aa, Homo sapiens; identical to SEQ ID NO: 1027933

SEQ ID NO: 1027941 - protein, 306 aa, Homo sapiens
GGAEPATAQTSCQPRLLVRSGSGHGLTKFQLPCVPLDSLHAAVLDDGGWTPMIWATEYKHVDLVKLLLSKGSDINIRDNEENICLHWAAFSGCVDIAEILLAAKCDLHAVNIHGDSPLHIAARENRYDCVVLFLSRDSDVTLKNKEGETPLQCASLNSQVWSALQMSKALQDSAPDRPSPVERIVSRDIARGYERIPIPCVNAVDSEPCPSNYKYVSQNCVTSPMNIDRNITHLQYCVCIDDCSSSNCMCGQLSMRCWYDKMRAASCAWAHVVSACWSGSAKTVQASCDPSAVVAASGKELEVSWV

SEQ ID NO: 1027942 - protein, 584 aa, Homo sapiens
GGAEPATAQTSCQPRLLVRSGSGHGLTKFQLPCVPLDSLHAAVLDDGGWTPMIWATEYKHVDLVKLLLSKGSDINIRDNEENICLHWAAFSGCVDIAEILLAAKCDLHAVNIHGDSPLHIAARENRYDCVVLFLSRDSDVTLKNKEGETPLQCASLNSQVWSALQMSKALQDSAPDRPSPVERIVSRDIARGYERIPIPCVNAVDSEPCPSNYKYVSQNCVTSPMNIDRNITHLQYCVCIDDCSSSNCMCGQLSMRCWYDKDGRLLPEFNMAEPPLIFECNHACSCWRNCRNRVVQNGLRARLQLYRTRDMGWGVRSLQDIPPGTFVCEYVGELISDSEADVREEDSYLFDLDNKDGEVYCIDARFYGNVSRFINHHCEPNLVPVRVFMAHQDLRFPRIAFFSTRLIEAGEQLGFDYGERFWDIKGKLFSCRCGSPKCRHSSAAWPSVRPARPRRPRRTACPTPAPRLPRPPMRRRRQRGAREPGTAASPIRGRGGEIPHATERVLRGCAAGFLEGSEVRLQPLRAGVDASQPPSQTCGLTAGPVPRLERTLWSARQRRWESALASPSEFLMLICRCEVSRFFL

SEQ ID NO: 1027943 - protein, 535 aa, Homo sapiens
GGAEPATAQTSCQPRLLVRSGSGHGLTKFQLPCVPLDSLHAAVLDDGGWTPMIWATEYKHVDLVKLLLSKGSDINIRDNEENICLHWAAFSGCVDIAEILLAASASLNSQVWSALQMSKALQDSAPDRPSPVERIVSRDIARGYERIPIPCVNAVDSEPCPSNYKYVSQNCVTSPMNIDRNITHLQYCVCIDDCSSSNCMCGQLSMRCWYDKDGRLLPEFNMAEPPLIFECNHACSCWRNCRNRVVQNGLRARLQLYRTRDMGWGVRSLQDIPPGTFVCEYVGELISDSEADVREEDSYLFDLDNKDGEVYCIDARFYGNVSRFINHHCEPNLVPVRVFMAHQDLRFPRIAFFSTRLIEAGEQLGFDYGERFWDIKGKLFSCRCGSPKCRHSSAAWPSVRPARPRRPRRTACPTPAPRLPRPPMRRRRQRGAREPGTAASPIRGRGGEIPHATERVLRGCAAGFLEGSEVRLQPLRAGVDASQPPSQTCGLTAGPVPRLERTLWSARQRRWESALASPSEFLMLICRCEVSRFFL

SEQ ID NO: 1027944 - protein, 638 aa, Homo sapiens
AESLAEGERPAASTLESQAVWDLAGANIDTCSEDQRTPLMEAAENNHLEAVKYLIKAGALVDPKDAEGSTCLHLAAKKGHYEVVQYLLSNGQMDVNCQDDGGWTPMIWATEYKHVDLVKLLLSKGSDINIRDNEENICLHWAAFSGCVDIAEILLAAKCDLHAVNIHGDSPLHIAARENRYDCVVLFLSRDSDVTLKNKEGETPLQCASLNSQVWSALQMSKALQDSAPDRPSPVERIVSRDIARGYERIPIPCVNAVDSEPCPSNYKYVSQNCVTSPMNIDRNITHLQYCVCIDDCSSSNCMCGQLSMRCWYDKDGRLLPEFNMAEPPLIFECNHACSCWRNCRNRVVQNGLRARLQLYRTRDMGWGVRSLQDIPPGTFVCEYVGELISDSEADVREEDSYLFDLDNKDGEVYCIDARFYGNVSRFINHHCEPNLVPVRVFMAHQDLRFPRIAFFSTRLIEAGEQLGFDYGERFWDIKGKLFSCRCGSPKCRHSSAAWPSVRPARPRRPRRTACPTPAPRLPRPPMRRRRQRGAREPGTAASPIRGRGGEIPHATERVLRGCAAGFLEGSEVRLQPLRAGVDASQPPSQTCGLTAGPVPRLERTLWSARQRRWESALASPSEFLMLICRCEVSRFFL

SEQ ID NO: 1027945 - protein, 809 aa, Homo sapiens
AESLAEGERPAASTLESQAVWDLAGANIDTCSEDQRTPLMEAAENNHLEAVKYLIKAGALVDPKDAEGSTCLHLAAKKGHYEVVQYLLSNGQMDVNCQDDGGWTPMIWATEYKHVDLVKLLLSKGSDINIRDNEENICLHWAAFSGCVDIAEILLAAKCDLHAVNIHGDSPLHIAARENRYDCVVLFLSRDSDVTLKNKEGETPLQCASLNSQVWSALQMSKALQDSAPDRPSPVERIVSRDIARGYERIPIPCVNAVDSEPCPSNYKYVSQNCVTSPMNIDRNITHLQYCVCIDDCSSSNCMCGQLSMRCWYDKDGRLLPEFNMAEPPLIFECNHACSCWRNCRNRVVQNGLRARLQLYRTRDMGWGVRSLQDIPPGTFVCEYVGELISDSEADVREEDSYLFDLDNKDGEVYCIDARFYGNVSRFINHHCEPNLVPVRVFMAHQDLRFPRIAFFSTRLIEAGEQLGFDYGERFWDIKGKLFSCRCGSPKCRHSSAAWPMLSCAMLRAHVRAHVDVTRPLPQNSQGSQPGLPAQTTPILMTAGPGQAVWAASGRSPSGTAGQRDPHSTLRPGTAWDCDGNNSPATSQTTGQRGVPLSAGSHAGLPWRLIPLGHARVLGHAVDSCQAKAPTWPVCPSPQLGTWPHSPNDTNPFHPKEPFGGGPSTTGSRGAKRCRPTTEPMAKRQPTEPSSGGSQDRPDPPTEQAIGANGSPRPPTGARYQPNPSSCTASHPWKVARLDHLTGTHDHSARNYPLSSSTRHYRPVFPPSLAQPPFHLDMGSHTPLVQSANPQPVVRALLSSSTVIIHLHV

SEQ ID NO: 1027946 - protein, 156 aa, Homo sapiens
AESLAEGERPAASTLESQAVWDLAGANIDTCSEDQRTPLMEAAENNHLEAVKYLIKAGALVDPKDAEGSTCLHLAAKKGHYEVVQYLLSNGQMDVNCQDDGGWTPMIWATEYKHVDLVKLLLSKGSDINIRDNDDGTMKRGALSRQKEEKREAEEP

SEQ ID NO: 1027947 - protein, 638 aa, Homo sapiens; identical to SEQ ID NO: 1027944

SEQ ID NO: 1027948 - protein, 638 aa, Homo sapiens; identical to SEQ ID NO: 1027944

SEQ ID NO: 1027949 - protein, 638 aa, Homo sapiens; identical to SEQ ID NO: 1027944

SEQ ID NO: 1027950 - protein, 249 aa, Homo sapiens
ISAAVVVGGCVSCTLCVCVCVCVCVCVRVTLLVPASVRSRFLCVHTMPLLCSSQENQHVSYIHDAAVLRRGRDERASVSLDVLVSSIMCDYQKSNFVLSAYCKIHTKCRHSSAAWPRDGPTDRAQEGPGGLALGTETMFRRVATPLVHTPSGPAVAAPREATGSSRRLTELDRETRRRDSARNRKGPSGLRRRLPGGVGGEAAAPAGGCGCLPATFPDLRPHRGPSAQAGAHTLVRAPETLGVRTGITF

SEQ ID NO: 1027951 - protein, 158 aa, Homo sapiens
AESLAEGERPAASTLESQAVWDLAGANIDTCSEDQRTPLMEAAENNHLEAVKYLIKAGALVDPKDAEGSTCLHLAAKKGHYEVVQYLLSNGQMDVNCQDDGGWTPMIWATEYKHVDLVKLLLSKGSDINIRDNEGSRGQKWEVQPQINPLNLIIRKKI

SEQ ID NO: 1027952 - protein, 331 aa, Homo sapiens
PAVLLWTVVFIWFWSGRDCVTDFDTPPILEAGAALCALPDELPLVKAGPGPSSRKPLTLHLLLIKTFVCAPLLVPELHSARGGVAYRFLVHQTPKQRPKSSQDGEVYCIDARFYGNVSRFINHHCEPNLVPVRVFMAHQDLRFPRIAFFSTRLIEAGEQLGFDYGERFWDIKGKLFSCRCGSPKCRHSSAAWPSVRPARPRRPRRTACPTPAPRLPRPPMRRRRQRGAREPGTAASPIRGRGGEIPHATERVLRGCAAGFLEGSEVRLQPLRAGVDASQPPSQTCGLTAGPVPRLERTLWSARQRRWESALASPSEFLMLICRCEVSRFFL

SEQ ID NO: 1027953 - protein, 291 aa, Homo sapiens
RRPASSTEGTGSREQSRSRSSRQQQQPSPFAERSRAGHGVVDAAEWARRRRTKSPSSSSSSRLAVMVESIGNCPFSQRLFMILWLKGVVFSVTTVDLKRKPADLQNLAPGTHPPFITFNSEVKTDVNKIEEFLEEVLCPPKYLKLSPKHPESNTAGMDIFAKFSAYIKNSRPEANEALERGLLKTLQKLDEYLNSPLPDEIDENSMEDIKFSTRKFLDGNEMTLADCNLLPKLHIVKVVAKKYRNFDIPKEMTGIWRYLTNAYSRDEFTNTCPSDKEVEIAYSDVAKRLTK

SEQ ID NO: 1027954 - protein, 291 aa, Homo sapiens; identical to SEQ ID NO: 1027953

SEQ ID NO: 1027955 - protein, 291 aa, Homo sapiens; identical to SEQ ID NO: 1027953

SEQ ID NO: 1027956 - protein, 291 aa, Homo sapiens; identical to SEQ ID NO: 1027953

SEQ ID NO: 1027957 - protein, 291 aa, Homo sapiens; identical to SEQ ID NO: 1027953

SEQ ID NO: 1027958 - protein, 291 aa, Homo sapiens; identical to SEQ ID NO: 1027953

SEQ ID NO: 1027959 - protein, 291 aa, Homo sapiens; identical to SEQ ID NO: 1027953

SEQ ID NO: 1027960 - protein, 396 aa, Homo sapiens
PGQVEAGAATWPAPRGAAGEEVSVCEPAAAPGLAPGRAGGDLAAPGEPGGRERTGIQTASPAREPVRSALEKKEMGVGVEKVVATPPSGEPRPLQCLARPRAPHILSFTHSLAQCRRHHPAQSHRSTHTHHTETGTGLSPCEQIVTTPGAQRHGHKEETRVGPRGKREAVCGCSGEHVEVTWSQCQGKLMENRALDPGTRDSYGATSHLPNKGALAKVKNNFKDLMSKLTEGQYVLCRWTDGLYYLGKIKRVSSSKQSCLVTFEDNSKYWVLWKDIQHAGVPGEEPKCNICLGKTSGPLNEILICGKCGLGYHQQCHIPIAGSADQPLLTPWFCRRCIFALAVRVSLPSSPVPASPASSSGADQRLPSQSLSSKQKGHTWALETDSASATVLGQDL

SEQ ID NO: 1027961 - protein, 258 aa, Homo sapiens
GPRRDPDPGPTGGHSAGQPRAERSRLRHRCAWWPDSKWDRRTRSLACQGKLMENRALDPGTRDSYGATSHLPNKGALAKVKNNFKDLMSKLTEGQYVLCRWTDGLYYLGKIKRVSSSKQSCLVTFEDNSKYWVLWKDIQHAGVPGEEPKCNICLGKTSGPLNEILICGKCGLGYHQQCHIPIAGSADQPLLTPWFCRRCIFALAVRVSLPSSPVPASPASSSGADQRLPSQSLSSKQKGHTWALETDSASATVLGQDL

SEQ ID NO: 1027962 - protein, 258 aa, Homo sapiens; identical to SEQ ID NO: 1027961

SEQ ID NO: 1027963 - protein, 514 aa, Homo sapiens
MASPGKPGADEAQEEEGELEGGSAGPRAAILEQAEELFLLCDKEAKGFITKHDLQGLQSDLPLTPEQLEAVFESLDQAHTGFLTAREFCLGLGMFVGVASAQGANPCRTPEETFESGGLDVQGTAGSLDEEEEEEERFHTVLEQLGVAPVLGEQRAVRTLWARLQRERPELLGSFEDVLIRASACLEEAARERDGLEQALRRRESEHEREVRALYEETEQLREQSRRPPSQNFARGERRSRLELELQIREQDLERAGLRQREVSTRPLPCPHGHPCTLPLCLSVPGLSGAWGTRSTPGKRGRSSPVSILSTLQLEQQLHAQAAEHLEAQAQNSQLWRAHEALRTQLEGAQEQIRRLESEARGRQEQTQQVPWDGAGRAPVRVPGAGPTGAQVWATFIPISSPRPAPWEGGSSRGSGGSPRSLPAAGSPPPIHRDVVAVSRNMQKEKVSLLRQLELLRELNTRLRDDRDACEARRAGSSCRKALTTARLPGPTCCCCCCWARPPRRGSGHLPSAR

SEQ ID NO: 1027964 - protein, 514 aa, Homo sapiens; identical to SEQ ID NO: 1027963

SEQ ID NO: 1027965 - protein, 514 aa, Homo sapiens; identical to SEQ ID NO: 1027963

SEQ ID NO: 1027966 - protein, 399 aa, Homo sapiens
MASPGKPGADEAQEEEGELEGGSAGPRAAILEQAEELFLLCDKEAKGFITKHDLQGLQSDLPLTPEQLEAVFESLDQAHTGFLTAREFCLGLGMFVGVASAQGANPCRTPEETFESGGLDVQGTAGSLDEEEEEEERFHTVLEQLGVAPVLGEQRAVRTLWARLQRERPELLGSFEDVLIRASACLEEAARERDGLEQALRRRESEHEREVRALYEETEQLREQSRRPPSQNFARGERRSRLELELQIREQDLERAGLRQRELEQQLHAQAAEHLEAQAQNSQLWRAHEALRTQLEGAQEQIRRLESEARGRQEQTQRDVVAVSRNMQKEKVSLLRQLELLRELNTRLRDDRDACEARRAGSSCRKALTTARLPGPTCCCCCCWARPPRRGSGHLPSAR

SEQ ID NO: 1027967 - protein, 213 aa, Homo sapiens [sequence omitted]

SEQ ID NO: 1027968 - protein, 514 aa, Homo sapiens; identical to SEQ ID NO: 1027963

SEQ ID NO: 1027969 - protein, 514 aa, Homo sapiens; identical to SEQ ID NO: 1027963

SEQ ID NO: 1027970 - protein, 514 aa, Homo sapiens; identical to SEQ ID NO: 1027963

SEQ ID NO: 1027971 - protein, 343 aa, Homo sapiens
MASPGKPGADEAQEEEGELEGGSAGPRAAILEQAEELFLLCDKEAKGFITKHDLQGLQSDLPLTPEQLEAVFESLDQAHTGFLTAREFCLGLGMFVGVASAQGANPCRTPEETFESGGLDVQGTAGSLDEEEEEEERFHTVLEQLGVAPVLGEQRAVRTLWARLQRERPELLGSFEDVLIRASACLEEAARERDGLEQALRRRESEHEREVRALYEETEQLREQSRRPPSQNFARGERRSRLELELQIREQDLERAGLRQRGDVVAVSRNMQKEKVSLLRQLELLRELNTRLRDDRDACEARRAGSSCRKALTTARLPGPTCCCCCCWARPPRRGSGHLPSAR

SEQ ID NO: 1027972 - protein, 390 aa, Homo sapiens
MASPGKPGADEAQEEEGELEGGSAGPRAAILEQAEELFLLCDKEAKGFITKHDLQGLQSDLPLTPEQLEAVFESLDQAHTGFLTAREFCLGLGMFVGVASAQGANPCRTPEETFESGGLDVQGTAGSLDEEEEEEERFHTVLEQLGVAPVLGEQRAVRTLWARLQRERPELLGSFEDVLIRASACLEEAARERDGLEQALRRRESEHEREVRALYEETEQLREQSRRPPSQNFARGERRSRLELELQIREQDLERAGLRQRELEQQLHAQAAEHLEAQAQNSQLWRAHEALRTQLEGAQEQIRRLESEARGRQEQTQRDVVAVSRNMQKEKVSLLRQLELLRELNTRLRDDRDACLGPPAAAAVAGLGPPDAALATFPVPGDQPRVTHGP

SEQ ID NO: 1027973 - protein, 670 aa, Homo sapiens
ADCARHRDVGGWRSRAGLKLERRWRRRREAGAGAEAAAGSARPLGRQAAAARGSSPEAGAAAMAESIIIRVQSPDGVKRITATKRETAATFLKKVAKEFGFQNNGFSVYINRNKTGEITASSNKSLNLLKIKHGDLLFLFPSSLAGPSSEMETSVPPGFKVFGAPNVVEDEIDQYLSKQDGKIYRSRDPQLCRHGPLGKCVHCVPLEPFDEDYLNHLEPPVKHMSFHAYIRKLTGGADKGKFVALENISCKIKSGCEGHLPWPNGICTKCQPSAITLNRQKYRHVDNIMFENHTVADRFLDFWRKTGNQHFGYLYGRYTEHKDIPLGIRAEVAAIYEPPQIGTQNSLELLEDPKAEVVDEIAAKLGLRKVGWIFTDLVSEDTRKGTVRYSRNKDTYFLSSEECITAGDFQNKHPNMCRLSPDGHFGSKFVTAVATGGPDNQVHFEGYQVSNQCMALVRDECLLPCKDAPELGYAKESSSEQYVPDVFYKDVDKFGNEITQLARPLPVEYLIIDITTTFPKDPVYTFSISQNPFPIENRDVLGETQDFHSLATYLSQNTSSVFLDTISDFHLLLFLVTNEVMPLQDSISLLLEAVRTRNEELAQTWKRSEQWATIEQLCSTVGGQLPGLHEYGAVGGSTHTATAAMWACQHCTFMNQPGTGHCEMCSLPRT

SEQ ID NO: 1027974 - protein, 2323 aa, Homo sapiens
ADCARHRDVGGWRSRAGLKLERRWRRRREAGAGAEAAAGSARPLGRQAAAARGSSPEAGAAAMAESIIIRVQSPDGVKRITATKRETAATFLKKVAKEFGFQNNGFSVYINRNKTGEITASSNKSLNLLKIKHGDLLFLFPSSLAGPSSEMETSVPPGFKVFGAPNVVEDEIDQYLSKQDGKIYRSRDPQLCRHGPLGKCVHCVPLEPFDEDYLNHLEPPVKHMSFHAYIRKLTGGADKGKFVALENISCKIKSGCEGHLPWPNGICTKCQPSAITLNRQKYRHVDNIMFENHTVADRFLDFWRKTGNQHFGYLYGRYTEHKDIPLGIRAEVAAIYEPPQIGTQNSLELLEDPKAEVVDEIAAKLGLRKVGWIFTDLVSEDTRKGTVRYSRNKDTYFLSSEECITAGDFQNKHPNMCRLSPDGHFGSKFVTAVATGGPDNQVHFEGYQVSNQCMALVRDECLLPCKDAPELGYAKESSSEQYVPDVFYKDVDKFGNEITQLARPLPVEYLIIDITTTFPKDPVYTFSISQNPFPIENRDVLGETQDFHSLATYLSQNTSSVFLDTISDFHLLLFLVTNEVMPLQDSISLLLEAVRTRNEELAQTWKRSEQWATIEQLCSEYPHPLPRHPVAGAGEQPTLHSSPLPVVPWIPAPSCILAGAIGNATSRDSASLPGTWQAPVMEQTCCPGRYVLGTQPCKFYKPVHQRYYISRHPRSTLNIIVLRESETLWKRRKRGTFWSPGEFPFSAKSCKEEKPAASMLLLVDTTERTAGIACLPDPQSPGPERFPTRENLLSALLQGLLTHRGASLQPECPESLQLRAPECPGATALDKCKNPSVNTAFKRHIKHLYTISCFFFFFLRRSLALVTQAGVWWRDLASLQPPPPGFKRFSCLSLLSSWDYRLCHHAWIIFVFLVEPGFHHVSQAGLELLTLGSACLCLPECWDYRCEPPRPAEVFFSHNSLFFIFIFVETGSHSIAEAGVQLHNRNSLQPQTPGSSDLSASACWVTGTTGLQHHTQLILGALLLLFICLFFKNNFNLFEIHRVHVQVCHLGILPDAEVGGMIDHITQVLHIVPNSFSARPALCVCVCVCVCVCVCVCFELEPHPVSQAGVQWRNLSSLQTLPPGLKRFPSLASRVAGITDVYHHTWRCHLYVREYPCLAPTYEMKTCSIWFAVPALVCLEIMAFNCIHVAAKDMISFLFMAAKFFNIFVSMRSHCVAQTGLKLWPQAFLAPQPHKVLRLYLGATAPSPLMQFSMTPVFFFFFLFCFPFRDRVSLCCLGWSAVELIIAHYSLQFLSSSDPPASAFGVPRSINMSHYTQLMFLVGVFFFSLRDRVGRARWLAHTCNPSTLEAEAGGSQCQGIEAILANMVNPISVKTTKISWAWWRAPVVPAAQEAEAGESLDPGSVGCSELRSCHCTPAWATERDSVSKKKKRCGLAMLPRLVSNSKAQVIFLPWFPKCWDYSCEPLHLTFFFFPPPFFFETGSRSVTQAEVQWHLRSVSPWPPQAQAILPPQPPEQLGLQACATIPGRFFKFVVEMGSHYVAQAGLELLGPSDPPASVLRLQWSATMSSQLFNNEAVLTGVSSDWYLTVVLICISDDYVMSGIFSWVFCLFVLRQSLVLLPRLECSSVISARCSLRLPGSSHCPASASYVAGIAGGCHHTQLIFLVLVETGFLHVGQAGLELLTSSDPPTSASQSAGIIGVSHRARPSWVVLFCFETESHPVTQAAVQSHDLHLLLTSTSWVQVMLLPQPPEWLGLQACTHAWLIFIFLVEMGFHHVGQAGLELLTSGDPPASVSQSAGITDVYTQDTKISSGWVIGLMVKGKTMKQAGHDVIIAIILTLWRPKLEDTVAQKCETSPHSIVKPRLYKKTILKKKELAGHGEWSTPVIPASGEAEMGGSHESGARGHSEPGLYHSSLNDRAIPCLKKIKTVKQLKVESLQGLGVRKDSFRQDAGPWGRTQKNTGIKIGKLINEIYLNKTLVLITGHCLKHEKAPMGDAVLAVHTHNMTSICNLKITLPVVNQTESRRRSWAEGETFHKRKCRSGMVARACNPSTLGGRGGGSFEVRSSRQPGQHGENPSLLKIKEISQVWWHVPVVLAAWEAEVGESLEPGRQRLQRAEIAPLHSSLGNNKKKEMQEQSLSLVIREMQIKTEKPLHIHQCGSNEKNATMSSVSEDVKQLGLSYLASGRQNRATLARTVSQGLRKFSTQFITLWAGRFFLGRFFVVVVCLFVCFEISAYCNLGSLQPPPPGFTPFSFLSLPSGWDYRCAPPPPGTVGGQLPGLHEYGAVGGSTHTATAAMWACQHCTFMNQPGTGHCEMCSLPRT

SEQ ID NO: 1027975 - protein, 2298 aa, Homo sapiens
  misc_feature (2143)..(2143): Xaa can be any naturally occurring amino acid
  misc_feature (2146)..(2147): Xaa can be any naturally occurring amino acid
  misc_feature (2149)..(2149): Xaa can be any naturally occurring amino acid
  misc_feature (2152)..(2152): Xaa can be any naturally occurring amino acid
  misc_feature (2154)..(2156): Xaa can be any naturally occurring amino acid
  misc_feature (2161)..(2161): Xaa can be any naturally occurring amino acid
ADCARHRDVGGWRSRAGLKLERRWRRRREAGAGAEAAAGSARPLGRQAAAARGSSPEAGAAAMAESIIIRVQSPDGVKRITATKRETAATFLKKVAKEFGFQNNGFSVYINRNKTGEITASSNKSLNLLKIKHGDLLFLFPSSLAGPSSEMETSVPPGFKVFGAPNVVEDEIDQYLSKQDGKIYRSRDPQLCRHGPLGKCVHCVPLEPFDEDYLNHLEPPVKHMSFHAYIRKLTGGADKGKFVALENISCKIKSGCEGHLPWPNGICTKCQPSAITLNRQKYRHVDNIMFENHTVADRFLDFWRKTGNQHFGYLYGRYTEHKDIPLGIRAEVAAIYEPPQIGTQNSLELLEDPKAEVVDEIAAKLGLRKVGWIFTDLVSEDTRKGTVRYSRNKDTYFLSSEECITAGDFQNKHPNMCRLSPDGHFGSKFVTAVATGGPDNQVHFEGYQVSNQCMALVRDECLLPCKDAPELGYAKESSSEQYVPDVFYKDVDKFGNEITQLARPLPVEYLIIDITTTFPKDPVYTFSISQNPFPIENRDVLGETQDFHSLATYLSQNTSSVFLDTISDFHLLLFLVTNEVMPLQDSISLLLEAVRTRNEELAQTWKRSEQWATIEQLCSEYPHPLPRHPVAGAGEQPTLHSSPLPVVPWIPAPSCILAGAIGNATSRDSASLPGTWQAPVMEQTCCPGRYVLGTQPCKFYKPVHQRYYISRHPRSTLNIIVLRESETLWKRRKRGTFWSPGEFPFSAKSCKEEKPAASMLLLVDTTERTAGIACLPDPQSPGPERFPTRENLLSALLQGLLTHRGASLQPECPESLQLRAPECPGATALDKCKNPSVNTAFKRHIKHLYTISCFFFFFLRRSLALVTQAGVWWRDLASLQPPPPGFKRFSCLSLLSSWDYRLCHHAWIIFVFLVEPGFHHVSQAGLELLTLGSACLCLPECWDYRCEPPRPAEVFFSHNSLFFIFIFVETGSHSIAEAGVQLHNRNSLQPQTPGSSDLSASACWVTGTTGLQHHTQLILGALLLLFICLFFKNNFNLFEIHRVHVQVCHLGILPDAEVGGMIDHITQVLHIVPNSFSARPALCVCVCVCVCVCVCVCFELEPHPVSQAGVQWRNLSSLQTLPPGLKRFPSLASRVAGITDVYHHTWRCHLYVREYPCLAPTYEMKTCSIWFAVPALVCLEIMAFNCIHVAAKDMISFLFMAAKFFNIFVSMRSHCVAQTGLKLWPQAFLAPQPHKVLRLYLGATAPSPLMQFSMTPVFFFFFLFCFPFRDRVSLCCLGWSAVELIIAHYSLQFLSSSDPPASAFGVPRSINMSHYTQLMFLVGVFFFSLRDRVGRARWLAHTCNPSTLEAEAGGSQCQGIEAILANMVNPISVKTTKISWAWWRAPVVPAAQEAEAGESLDPGSVGCSELRSCHCTPAWATERDSVSKKKKRCGLAMLPRLVSNSKAQVIFLPWFPKCWDYSCEPLHLTFFFFPPPFFFETGSRSVTQAEVQWHLRSVSPWPPQAQAILPPQPPEQLGLQACATIPGRFFKFVVEMGSHYVAQAGLELLGPSDPPASVLRLQWSATMSSQLFNNEAVLTGVSSDWYLTVVLICISDDYVMSGIFSWVFCLFVLRQSLVLLPRLECSSVISARCSLRLPGSSHCPASASYVAGIAGGCHHTQLIFLVLVETGFLHVGQAGLELLTSSDPPTSASQSAGIIGVSHRARPSWVVLFCFETESHPVTQAAVQSHDLHLLLTSTSWVQVMLLPQPPEWLGLQACTHAWLIFIFLVEMGFHHVGQAGLELLTSGDPPASVSQSAGITDVYTQDTKISSGWVIGLMVKGKTMKQAGHDVIIAIILTLWRPKLEDTVAQKCETSPHSIVKPRLYKKTILKKKELAGHGEWSTPVIPASGEAEMGGSHESGARGHSEPGLYHSSLNDRAIPCLKKIKTVKQLKVESLQGLGVRKDSFRQDAGPWGRTQKNTGIKIGKLINEIYLNKTLVLITGHCLKHEKAPMGDAVLAVHTHNMTSICNLKITLPVVNQTESRRRSWAEGETFHKRKCRSGMVARACNPSTLGGRGGGSFEVRSSRQPGQHGENPSLLKIKEISQVWWHVPVVLAAWEAEVGESLEPGRQRLQRAEIAPLHSSLGDRARLYLRKKKKKKKXKKXXNXKSXGXXXLFYKXKDPLQQKGTSKHRLPVTPCGAGGIFLRALSTSKCACGGSAVWAGPALGGMLGAGSSQLPAPAPMPTLWQSLVGQKDECSFLFHPAGTVGGQLPGLHEYGAVGGSTHTATAAMWACQHCTFMNQPGTGHCEMCSLPRT

SEQ ID NO: 1027976 - protein, 673 aa, Homo sapiens
ADCARHRDVGGWRSRAGLKLERRWRRRREAGAGAEAAAGSARPLGRQAAAARGSSPEAGAAAMAESIIIRVQSPDGVKRITATKRETAATFLKKVAKEFGFQNNGFSVYINRNKTGEITASSNKSLNLLKIKHGDLLFLFPSSLAGPSSEMETSVPPGFKVFGAPNVVEDEIDQYLSKQDGKIYRSRDPQLCRHGPLGKCVHCVPLEPFDEDYLNHLEPPVKHMSFHAYIRKLTGGADKGKFVALENISCKIKSGCEGHLPWPNGICTKCQPSAITLNRQKYRHVDNIMFENHTVADRFLDFWRKTGNQHFGYLYGRYTEHKDIPLGIRAEVAAIYEPPQIGTQNSLELLEDPKAEVVDEIAAKLGLRKVGWIFTDLVSEDTRKGTVRYSRNKDTYFLSSEECITAGDFQNKHPNMCRLSPDGHFGSKFVTAVATGGPDNQVHFEGYQVSNQCMALVRDECLLPCKDAPELGYAKESSSEQYVPDVFYKDVDKFGNEITQLARPLPVEYLIIDITTTFPKDPVYTFSISQNPFPIENRDVLGETQDFHSLATYLSQNTSSVFLDTISDFHLLLFLVTNEVMPLQDSISLLLEAVRTRNEELAQTWKRSEQWATIEQLCTSRVAGITDVYHHTWRCHLYAQLAGSSQVSMSTAPSGAPHTRPLQPCGPVSTARS

SEQ ID NO: 1027977 - protein, 2298 aa, Homo sapiens; identical to SEQ ID NO: 1027975
  misc_feature (2143)..(2143): Xaa can be any naturally occurring amino acid
  misc_feature (2146)..(2147): Xaa can be any naturally occurring amino acid
  misc_feature (2149)..(2149): Xaa can be any naturally occurring amino acid
  misc_feature (2152)..(2152): Xaa can be any naturally occurring amino acid
  misc_feature (2154)..(2156): Xaa can be any naturally occurring amino acid
  misc_feature (2161)..(2161): Xaa can be any naturally occurring amino acid

SEQ ID NO: 1027978 - protein, 2033 aa, Homo sapiens
MFENHTVADRFLDFWRKTGNQHFGYLYGRYTEHKDIPLGIRAEVAAIYEPPQIGTQNSLELLEDPKAEVVDEIAAKLGLRKVGWIFTDLVSEDTRKGTVRYSRNKDTYFLSSEECITAGDFQNKHPNMCRLSPDGHFGSKFVTAVATGGPDNQVHFEGYQVSNQCMALVRDECLLPCKDAPELGYAKESSSEQYVPDVFYKDVDKFGNEITQLARPLPVEYLIIDITTTFPKDPVYTFSISQNPFPIENRDVLGETQDFHSLATYLSQNTSSVFLDTISDFHLLLFLVTNEVMPLQDSISLLLEAVRTRNEELAQTWKRSEQWATIEQLCSEYPHPLPRHPVAGAGEQPTLHSSPLPVVPWIPAPSCILAGAIGNATSRDSASLPGTWQAPVMEQTCCPGRTSYVHSPVNFINLYIRDTNLQASRSTLNIIVLRESETLWKRRKRGTFWSPGEFPFSAKSCKEEKPAASMLLLVDTTERTAGIACLPDPQSPGPERFPTRENLLSALLQGLLTHRGASCSPSALSPAAESTRVPGSYGPGQMLDPSVNTAFKRHIKHLYTISCFFFFFLRRSLALVTQAGVWWRDLASLQPPPPGFKRFSCLSLLSSWDYRLCHHAWIIFVFLVEPGFHHVSQAGLELLTLGSACLCLPECWDYRCEPPRPAEVFFSHNSLFFIFIFVETGSHSIAEAGVQLHNRNSLQPQTPGSSDLSASACWVTGTTGLQHHTQLILGALLLLFICLFFKNNFNLFEIHRVHVQVCHLGILPDAEVGGMIDHITQVLHIVPNSFSARPALCVCVCVCVCVCVCVCFELEPHPVSQAGVQWRNLSSLQTLPPGLKRFPSLASRVAGITDVYHHTWRCHLYVREYPCLAPTYEMKTCSIWFAVPALVCLEIMAFNCIHVAAKDMISFLFMAAKFFNIFVSMRSHCVAQTGLKLWPQAFLAPQPHKVLRLYLGATAPSPLMQFSMTPVFFFFFLFCFPFRDRVSLCCLGWSAVELIIAHYSLQFLSSSDPPASAFGVPRSINMSHYTQLMFLVGVFFFSLRDRVGRARWLAHTCNPSTLEAEAGGSQCQGIEAILANMVNPISVKTTKISWAWWRAPVVPAAQEAEAGESLDPGSVGCSELRSCHCTPAWATERDSVSKKKKRCGLAMLPRLVSNSKAQVIFLPWFPKCWDYSCEPLHLTFFFFPPPFFFETGSRSVTQAEVQWHLRSVSPWPPQAQTILPPQPPEQLGLQACATIPGRFFKFVVEMGSHYVAQAGLELLGPSDPPASVLRLQWSATMSSQLFNNEAVLTGVSSDWYLTVVLICISDDYVMSGIFSWVFCLFVLRQSLVLLPRLECSSVISARCSLRLPGSSHCPASASYVAGIAGGCHHTQLIFLVLVETGFLHVGQAGLELLTSSDPPTSASQSAGIIGVSHRARPSWVVLFCFETESHPVTQAAVQSHDLHLLLTSTSWVQVMLLPQPPEWLGLQACTHAWLIFIFLVEMGFHHVGQAGLELLTSGDPPASVSQSAGITDVYTQDTKISSGWVIGLMVKGKTMKQAGHDVIIAIILTLWRPKLEDTVAQKCETSPHSIVKPRLYKKTILKKKELAGHGEWSTPVIPASGEAEMGGSHESGARGHSEPGLYHSSLNDRAIPCLKKIKTVKQLLIESLQGLGVRKDSFRQDAGPWGRTQKNTGIKIGKLINEIYLNKTLVLITGHCYKHEKAPMGDAVLAVHTHNMTSICNLKITLPVVNQTESRRRSWAEGETFHKRKCRSGMVARACNPSTLGGRGGGSFEVRSSRQPGQHGENPSLLKIKEISQVWWHVPVVLAAWEAEVGESLEPGRQRLQRAEIAPLHSSLGNNKKKEMQEQSLSLVIREMQIKTEKPLHIHQCGSNEKNATMSSVSEDVKQLGLSYLASGRQNRATLARTVSQGLRKFSTQFITLWAGRFIPRRFFVVVVCLFVCFEISAYCNLGSLQPPPPGFTPFSFLSLPSGWDYRCAPPPPGTVGGQLPGLHEYGAVGGSTHTATAAMWACQHCTFMNQPGTGHCEMCSLPRT

SEQ ID NO: 1027979 - protein, 664 aa, Homo sapiens
ADCARHRDVGGWRSRAGLKLERRWRRRREAGAGAEAAAGSARPLGRQAAAARGSSPEAGAAAMAESIIIRVQSPDGVKRITATKRETAATFLKKVAKEFGFQNNGFSVYINRNKTGEITASSNKSLNLLKIKHGDLLFLFPSSLAGPSSEMETSVPPGFKVFGAPNVVEDEIDQYLSKQDGKIYRSRDPQLCRHGPLGKCVHCVPLEPFDEDYLNHLEPPVKHMSFHAYIRKLTGGADKGKFVALENISCKIKSGCEGHLPWPNGICTKCQPSAITLNRQKYRHVDNIMFENHTVADRFLDFWRKTGNQHFGYLYGRYTEHKDIPLGIRAEVAAIYEPPQIGTQNSLELLEDPKAEVVDEIAAKLGLRKVGWIFTDLVSEDTRKGTVRYSRNKDTYFLSSEECITAGDFQNKHPNMCRLSPDGHFGSKFVTAVATGGPDNQVHFEGYQVSNQCMALVRDECLLPCKDAPELGYAKESSSEQYVPDVFYKDVDKFGNEITQLARPLPVEYLIIDITTTFPKDPVYTFSISQNPFPIENRDVLGETQDFHSLATYLSQNTSSVFLDTISDFHLLLFLVTNEVMPLQDSISLLLEAVRTRNEELAQTWKRSEQWATIEQLCNSQGTCAGLSPGITDVYTQDTKISSGWVIGLMVKGKTMKQAGHDVS

SEQ ID NO: 1027980 - protein, 678 aa, Homo sapiens
ADCARHRDVGGWRSRAGLKLERRWRRRREAGAGAEAAAGSARPLGRQAAAARGSSPEAGAAAMAESIIIRVQSPDGVKRITATKRETAATFLKKVAKEFGFQNNGFSVYINRNKTGEITASSNKSLNLLKIKHGDLLFLFPSSLAGPSSEMETSVPPGFKVFGAPNVVEDEIDQYLSKQDGKIYRSRDPQLCRHGPLGKCVHCVPLEPFDEDYLNHLEPPVKHMSFHAYIRKLTGGADKGKFVALENISCKIKSGCEGHLPWPNGICTKCQPSAITLNRQKYRHVDNIMFENHTVADRFLDFWRKTGNQHFGYLYGRYTEHKDIPLGIRAEVAAIYEPPQIGTQNSLELLEDPKAEVVDEIAAKLGLRKVGWIFTDLVSEDTRKGTVRYSRNKDTYFLSSEECITAGDFQNKHPNMCRLSPDGHFGSKFVTAVATGGPDNQVHFEGYQVSNQCMALVRDECLLPCKDAPELGYAKESSSEQYVPDVFYKDVDKFGNEITQLARPLPVEYLIIDITTTFPKDPVYTFSISQNPFPIENRDVLGETQDFHSLATYLSQNTSSVFLDTISDFHLLLFLVTNEVMPLQDSISLLLEAVRTRNEELAQTWKRSEQWATIEQLCSTVGGQLPGLHEYGAVGGSTHTATAAMWACQHCTFMNQPGTGHCEQWWPRAPSPPQGGTP

SEQ ID NO: 1027981 - protein, 497 aa, Homo sapiens
ADCARHRDVGGWRSRAGLKLERRWRRRREAGAGAEAAAGSARPLGRQAAAARGSSPEAGAAAMAESIIIRVQSPDGVKRITATKRETAATFLKKVAKEFGFQNNGFSVYINRNKTGEITASSNKSLNLLKIKHGDLLFLFPSSLAGPSSEMETSVPPGFKVFGAPNVVEDEIDQYLSKQDGKIYRSRDPQLCRHGPLGKCVHCVPLEPFDEDYLNHLEPPVKHMSFHAYIRKLTGGADKGKFVALENISCKIKSGCEGHLPWPNGICTKCQPSAITLNRQKYRHVDNIMFENHTVADRFLDFWRKTGNQHFGYLYGRYTEHKDIPLGIRAEVAAIYEPPQIGTQNSLELLEDPKAEVVDEIAAKLGLRKVGWIFTDLVSEDTRKGTVRYSRNKDTYFLSSEECITAGDFQNKHPNMCRLSPDGHFGSKFVTAVATGGPDNQVHFEGYQVSNQCMALVRDECLLPCKDAPELGYAKESSSEQYVPDVFYKSSSVFHFG

SEQ ID NO: 1027982 - protein, 2298 aa, Homo sapiens; identical to SEQ ID NO: 1027975
  misc_feature (2143)..(2143): Xaa can be any naturally occurring amino acid
  misc_feature (2146)..(2147): Xaa can be any naturally occurring amino acid
  misc_feature (2149)..(2149): Xaa can be any naturally occurring amino acid
  misc_feature (2152)..(2152): Xaa can be any naturally occurring amino acid
  misc_feature (2154)..(2156): Xaa can be any naturally occurring amino acid
  misc_feature (2161)..(2161): Xaa can be any naturally occurring amino acid

SEQ ID NO: 1027983 - protein, 2298 aa, Homo sapiens; identical to SEQ ID NO: 1027975
  misc_feature (2143)..(2143): Xaa can be any naturally occurring amino acid
  misc_feature (2146)..(2147): Xaa can be any naturally occurring amino acid
  misc_feature (2149)..(2149): Xaa can be any naturally occurring amino acid
  misc_feature (2152)..(2152): Xaa can be any naturally occurring amino acid
  misc_feature (2154)..(2156): Xaa can be any naturally occurring amino acid
  misc_feature (2161)..(2161): Xaa can be any naturally occurring amino acid

SEQ ID NO: 1027984 - protein, 496 aa, Homo sapiens
ADCARHRDVGGWRSRAGLKLERRWRRRREAGAGAEAAAGSARPLGRQAAAARGSSPEAGAAAMAESIIIRVQSPDGVKRITATKRETAATFLKKVAKEFGFQNNGFSVYINRNKTGEITASSNKSLNLLKIKHGDLLFLFPSSLAGPSSEMETSVPPGFKVFGAPNVVEDEIDQYLSKQDGKIYRSRDPQLCRHGPLGKCVHCVPLEPFDEDYLNHLEPPVKHMSFHAYIRKLTGGADKGKFVALENISCKIKSGCEGHLPWPNGICTKCQPSAITLNRQKYRHVDNIMFENHTVADRFLDFWRKTGNQHFGYLYGRYTEHKDIPLGIRAEVAAIYEPPQIGTQNSLELLEDPKAEVVDEIAAKLGLRKVGWIFTDLVSEDTRKGTVRYSRNKDTYFLSSEECITAGDFQNKHPNMCRLSPDGHFGSKFVTAVATGGPDNQVHFEGYQVSNQCMALVRDECLLPCKDAPELGYAKESSSEQYVPDVFYKNQNALMV

SEQ ID NO: 1027985 - protein, 461 aa, Homo sapiens
ADCARHRDVGGWRSRAGLKLERRWRRRREAGAGAEAAAGSARPLGRQAAAARGSSPEAGAAAMAESIIIRVQSPDGVKRITATKRETAATFLKKVAKEFGFQNNGFSVYINRNKTGEITASSNKSLNLLKIKHGDLLFLFPSSLAGPSSEMETSVPPGFKVFGAPNVVEDEIDQYLSKQDGKIYRSRDPQLCRHGPLGKCVHCVPLEPFDEDYLNHLEPPVKHMSFHAYIRKLTGGADKGKFVALENISCKIKSGCEGHLPWPNGICTKCQPSAITLNRQKYRHVDNIMFENHTVADRFLDFWRKTGNQHFGYLYGRYTEHKDIPLGIRAEVAAIYEPPQIGTQNSLELLEDPKAEVVDEIAAKLGLRKVGWIFTDLVSEDTRKGTVRYSRNKDTYFLSSEECITAGDFQNKHPNMCRLSPDGHFGSKFVTAVAKHCFENQTNSCCGSGMFDGGLSKESTA

SEQ ID NO: 1027986 - protein, 284 aa, Homo sapiens
ADCARHRDVGGWRSRAGLKLERRWRRRREAGAGAEAAAGSARPLGRQAAAARGSSPEAGAAAMAESIIIRVQSPDGVKRITATKRETAATFLKKVAKEFGFQNNGFSVYINRNKTGEITASSNKSLNLLKIKHGDLLFLFPSSLAGPSSEMETSVPPGFKVFGAPNVVEDEIDQYLSKQDGKIYRSRDPQLCRHGPLGKCVHCVPLEPFDEDYLNHLEPPVKHMSFHAYIRKLTGGADKGKFVALENISCKIKSGCEGHLPWPNGICTKCQPSAITQTRLMMIL

SEQ ID NO: 1027987 - protein, 132 aa, Homo sapiens
ADCARHRDVGGWRSRAGLKLERRWRRRREAGAGAEAAAGSARPLGRQAAAARGSSPEAGAAAMAESIIIRVQSPDGVKRITATKRETAATFLKKVAKEFGFQNNGFSVYINRNKTGEITASSNKSLNLLKIK

SEQ ID NO: 1027988 - protein, 99 aa, Homo sapiens
MPFGRLFLKVSLLAGGPDNQVHFEGYQVSNQCMALVRDECLLPCKDAPELGYAKESSSEQYVPDVFYKVKSMVRKRTLYMEKWCDLSWTFLIWVYQRIL

SEQ ID NO: 1027989 - protein, 693 aa, Homo sapiens
ADCARHRDVGGWRSRAGLKLERRWRRRREAGAGAEAAAGSARPLGRQAAAARGSSPEAGAAAMAESIIIRVQSPDGVKRITATKRETAATFLKKVGVHWQSHSSLQALTSRAKRSSHVAKEFGFQNNGFSVYINRNKTGEITASSNKSLNLLKIKHGDLLFLFPSSLAGPSSEMETSVPPGFKVFGAPNVVEDEIDQYLSKQDGKIYRSRDPQLCRHGPLGKCVHCVPLEPFDEDYLNHLEPPVKHMSFHAYIRKLTGGADKGKFVALENISCKIKSGCEGHLPWPNGICTKCQPSAITLNRQKYRHVDNIMFENHTVADRFLDFWRKTGNQHFGYLYGRYTEHKDIPLGIRAEVAAIYEPPQIGTQNSLELLEDPKAEVVDEIAAKLGLRKVGWIFTDLVSEDTRKGTVRYSRNKDTYFLSSEECITAGDFQNKHPNMCRLSPDGHFGSKFVTAVATGGPDNQVHFEGYQVSNQCMALVRDECLLPCKDAPELGYAKESSSEQYVPDVFYKDVDKFGNEITQLARPLPVEYLIIDITTTFPKDPVYTFSISQNPFPIENRDVLGETQDFHSLATYLSQNTSSVFLDTISDFHLLLFLVTNEVMPLQDSISLLLEAVRTRNEELAQTWKRSEQWATIEQLCSTVGGQLPGLHEYGAVGGSTHTATAAMWACQHCTFMNQPGTGHCEMCSLPRT

SEQ ID NO: 1027990 - protein, 2232 aa, Homo sapiens
  misc_feature (2076)..(2076): Xaa can be any naturally occurring amino acid
  misc_feature (2079)..(2080): Xaa can be any naturally occurring amino acid
  misc_feature (2082)..(2082): Xaa can be any naturally occurring amino acid
  misc_feature (2085)..(2085): Xaa can be any naturally occurring amino acid
  misc_feature (2087)..(2089): Xaa can be any naturally occurring amino acid
  misc_feature (2094)..(2094): Xaa can be any naturally occurring amino acid
ADCARHRDVGGWRSRAGLKLERRWRRRREAGAGAEAAAGSARPLGRQAAAARGSSPEAGAAAMAESIIIRVQSPDGVKRITATKRETAATFLKKVAKEFGFQNNGFSVYINRNKTGEITASSNKSLNLLKIKHGDLLFLFPSSLAGPSSEMETSVPPGFKVFGAPNVVEDEIDQYLSKQDGKIYRSRDPQLCRHGPLGKCVHCVPLEPFDEDYLNHLEPPVKHMSFHAYIRKLTGGADKGKFVALENISCKIKSGCEGHLPWPNGICTKCQPSAITLNRQKYRHVDNIMFENHTVADRFLDFWRKTGNQHFGYLYGRYTEHKDIPLGIRAEVAAIYEPPQIGTQNSLELLEDPKAEVVDEIAAKLGLRKVGWIFTDLVSEDTRKGTVRYSRNKDTYFLSSEECITAGDFQNKHPNMCRLSPDGHFGSKFVTAVATGGPDNQVHFEGYQVSNQCMALVRDECLLPCKDAPELGYAKESSSEQYVPDVFYKDVDKFGNEITQLARPLPVEYLIIDITTTFPKDPVYTFSISQNPFPIENRDVLGETQDFHSLATYLSQNTSSVFLDTISDFHLLLFLVTNEVMPLQDSISLLLEAVRTRNEELAQTWKRSEQWATIEQLCSEYPHPLPRHPVAGAGEQPTLHSSPLPVVPWIPAPSCILAGAIGNATSRDSASLPGTWQAPVMEQTCCPGRYVLGTQPCKFYKPVHQRYYISRHPRSTLNIIVLRESETLWKRRKRGTFWSPGEFPFSAKSCKEEKPAASMLLLVDTTERTAGIACLPDPQSPGPERFPTRENLLSALLQGLLTHRGASLQPECPESLQLRAPECPGATALDKCKNPSVNTAFKRHIKHLYTISCFFFFFLRRSLALVTQAGVWWRDLASLQPPPPGFKRFSCLSLLSSWDYRLCHHAWIIFVFLVEPGFHHVSQAGLELLTLGSACLCLPECWDYRCEPPRPAEVFFSHNSLFFIFIFVETGSHSIAEAGVQLHNRNSLQPQTPGSSDLSASACWVTGTTGLQHHTQLILGALLLLFICLFFKNNFNLFEIHRVHVQVCHLGILPDAEVGGMIDHITQVLHIVPNSFSARPALCVCVCVCVCVCVCVCFELEPHPVSQAGVQWRNLSSLQTLPPGLKRFPSLASRVAGITDVYHHTWRCHLYVREYPCLAPTYEMKTCSIWFAVPALVCLEIMAFNCIHVAAKDMISFLFMAAKFFNIFVSMRSHCVAQTGLKLWPQAFLAPQPHKVLRLYLGATAPSPLMQFSMTPVFFFFFLFCFPFRDRVSLCCLGWSAVELIIAHYSLQFLSSSDPPASAFGVPRSINMSHYTQLMFLVGVFFFSLRDRVGRARWLAHTCNPSTLEAEAGGSQCQGIEAILANMVNPISVKTTKISWAWWRAPVVPAAQEAEAGESLDPGSVGCSELRSCHCTPAWATERDSVSKKKKRCGLAMLPRLVSNSKAQVIFLPWFPKCWDYSCEPLHLTFFFFPPPFFFETGSRSVTQAEVQWHLRSVSPWPPQAQAILPPQPPEQLGLQACATIPGRFFKFVVEMGSHYVAQAGLELLGPSDPPASVLRLQWSATMSSQLFNNEAVLTGVSSDWYLTVVLICISDDYVMSGIFSWVFCLFVLRQSLVLLPRLECSSVISARCSLRLPGSSHCPASASYVAGIAGGCHHTQLIFLVLVETGFLHVGQAGLELLTSSDPPTSASQSAGIIGVSHRARPSWVVLFCFETESHPVTQAAVQSHDLHLLLTSTSWVQVMLLPQPPEWLGLQACTHAWLIFIFLVEMGFHHVGQAGLELLTSGDPPASVSQSAGITDVYTQDTKISSGWVIGLMVKGKTMKQAGHDVIIAIILTLWRPKLEDTVAQKCETSPHSIVKPRLYKKTILKKKELAGHGEWSTPVIPASGEAEMGGSHESGARGHSEPGLYHSSLNDRAIPCLKKIKTVKQLKVESLQGLGVRKDSFRQDAGPWGRTQKNTGIKIGKLINEIYLNKTLVLITGHCLKHEKAPMGDAVLAVHTHNMVKPKFYQRIDKISQVWWHVPVVLAAWEAEVGESLEPGRQRLQRAEIAPLHSSLGDRARLYLRKKKKKKKXKKXXNXKSXGXXXLFYKXKDPLQQKGTSKQQAPCYSLWCRRHFSEGIKHFKVCLWWECCVGRTSTGWDVGGGELSAACPCPHAHTLAVSGGPEDDECSFLFHPAGTVGGQLPGLHEYGAVGGSTHTATAAMWACQHCTFMNQPGTGHCEMCSLPRT

SEQ ID NO: 1027991 - protein, 2298 aa, Homo sapiens; identical to SEQ ID NO: 1027975
  misc_feature (2143)..(2143): Xaa can be any naturally occurring amino acid
  misc_feature (2146)..(2147): Xaa can be any naturally occurring amino acid
  misc_feature (2149)..(2149): Xaa can be any naturally occurring amino acid
  misc_feature (2152)..(2152): Xaa can be any naturally occurring amino acid
  misc_feature (2154)..(2156): Xaa can be any naturally occurring amino acid
  misc_feature (2161)..(2161): Xaa can be any naturally occurring amino acid

SEQ ID NO: 1027992 - protein, 1838 aa, Homo sapiens
  misc_feature (1683)..(1683): Xaa can be any naturally occurring amino acid
  misc_feature (1686)..(1687): Xaa can be any naturally occurring amino acid
  misc_feature (1689)..(1689): Xaa can be any naturally occurring amino acid
  misc_feature (1692)..(1692): Xaa can be any naturally occurring amino acid
  misc_feature (1694)..(1696): Xaa can be any naturally occurring amino acid
  misc_feature (1701)..(1701): Xaa can be any naturally occurring amino acid
ADCARHRDVGGWRSRAGLKLERRWRRRREAGAGAEAAAGSARPLGRQAAAARGSSPEAGAAAMAESIIIRVQSPDGVKRITATKRETAATFLKKVAKEFGFQNNGFSVYINRNKTGEITASSNKSLNLLKIKHGDLLFLFPSSLAGPSSEMETSVPPGFKVFGAPNVVEDEIDQYLSKQDGKIYRSRDPQLCRHGPLGKCVHCVPLEPFDEDYLNHLEPPVKHMSFHAYIRKLTGGADKGKFVALENISCKIKSGCEGHLPWPNGICTKCQPSAITLNRQKYRHVDNIMFENHTVADRFLDFWRKTGNQHFGYLYGRYTEHKDIPLGIRAEVAAIYEPPQIGTQNSLELLEDPKAEVVDEIAAKLGLRKVGWIFTDLVSEDTRKGTVRYSRNKDTYFLSSEECITAGDFQNKHPNMCRLSPDGHFGSKFVTAVATGGPDNQVHFEGYQVSNQCMALVRDECLLPCKDAPELGYAKESSSEQYVPDVFYKDVDKFGNEITQLARPLPVEYLIIDITTTFPKDPVYTFSISQNPFPIENRDVLGETQDFHSLATYLSQNTSSVFLDTISDFHLLLFLVTNEVMPLQDSISLLLEAVRTRNEELAQTWKRSEQWATIEQLCSEYPHPLPRHPVAGAGEQPTLHSSPLPVVPWIPAPSCILAGAIGNATSRDSASLPGTWQAPVMEQTCCPGRYVLGTQPCKFYKPVHQRYYISRHPRSTLNIIVLRESETLWKRRKRGTFWSPGEFPFSAKSCKEEKPAASMLLLVDTTERTAGIACLPDPQSPGPERFPTRENLLSALLQGLLTHRGASLQPECPESLQLRAPECPGATALDKCKNPSVNTAFKRHIKHLYTISCFFFFFLRRSLALVTQAGVWWRDLASLQPPPPGFKRFSCLSLLSSWDYRLCHHAWIIFVFLVEPGFHHVSQAGLELLTLGSACLCLPECWDYRCEPPRPAEVFFSHNSLFFIFIFVETGSHSIAEAGVQLHNRNSLQPQTPGSSDLSASACWVTGTTGLQHHTQLILGALLLLFICLFFKNNFNLFEIHRVHVQVCHLGILPDAEVGGMIDHITQVLHIVPNSFSARPALCVCVCVCVCVCVCVCFELEPHPVSQAGVQWRNLSSLQTLPPGLKRFPSLASRVAGITDVYHHTWRCHLYVREYPCLAPTYEMKTCSIWFAVPALVCLEIMAFNCIHVAAKDMISFLFMAAKFFNIFVSMRSHCVAQTGLKLWPQAFLAPQPHKVLRLYLGATAPSPLMQFSMTPVFFFFFLFCFPFRDRVSLCCLGWSAVELIIAHYSLQFLSSSDPPASAFGVPRSINMSHYTQLMFLVGVFFFSLKIGLAGPGGGITDVYTQDTKISSGWVIGLMVKGKTMKQAGHDVIIAIILTLWRPKLEDTVAQKCETSPHSIVKPRLYKKTILKKKELAGHGEWSTPVIPASGEAEMGGSHESGARGHSEPGLYHSSLNDRAIPCLKKIKTVKQLKVESLQGLGVRKDSFRQDAGPWGRTQKNTGIKIGKLINEIYLNKTLVLITGHCLKHEKAPMGDAVLAVHTHNMTSICNLKITLPVVNQTESRRRSWAEGETFHKRKCRSGMVARACNPSTLGGRGGGSFEVRSSRQPGQHGENPSLLKIKEISQVWWHVPVVLAAWEAEVGESLEPGRQRLQRAEIAPLHSSLGDRARLYLRKKKKKKKXKKXXNXKSXGXXXLFYKXKDPLQQKGTSKHRLPVTPCGAGGIFLRALSTSKCACGGSAVWAGPALGGMLGAGSSQLPAPAPMPTLWQSLVGQKDECSFLFHPAGTVGGQLPGLHEYGAVGGSTHTATAAMWACQHCTFMNQPGTGHCEMCSLPRT

SEQ ID NO: 1027993 - protein, 2298 aa, Homo sapiens; identical to SEQ ID NO: 1027975
  misc_feature (2143)..(2143): Xaa can be any naturally occurring amino acid
  misc_feature (2146)..(2147): Xaa can be any naturally occurring amino acid
  misc_feature (2149)..(2149): Xaa can be any naturally occurring amino acid
  misc_feature (2152)..(2152): Xaa can be any naturally occurring amino acid
  misc_feature (2154)..(2156): Xaa can be any naturally occurring amino acid
  misc_feature (2161)..(2161): Xaa can be any naturally occurring amino acid

SEQ ID NO: 1027994 - protein, 2298 aa, Homo sapiens; identical to SEQ ID NO: 1027975
  misc_feature (2143)..(2143): Xaa can be any naturally occurring amino acid
  misc_feature (2146)..(2147): Xaa can be any naturally occurring amino acid
  misc_feature (2149)..(2149): Xaa can be any naturally occurring amino acid
  misc_feature (2152)..(2152): Xaa can be any naturally occurring amino acid
  misc_feature (2154)..(2156): Xaa can be any naturally occurring amino acid
  misc_feature (2161)..(2161): Xaa can be any naturally occurring amino acid

SEQ ID NO: 1027995 - protein, 113 aa, Homo sapiens
GRVGPDAWAQHVPPWRAGATAGILQAECSLQTGNAERLLTPNPVDKSPAVLERPLASTWHLELGRTGRGGCCHHPAFSLFSVLFVWPPCPHVFLAGSSWLPPCLTAWWQAPCL

SEQ ID NO: 1027996 - protein, 691 aa, Homo sapiens
ADCARHRDVGGWRSRAGLKLERRWRRRREAGAGAEAAAGSARPLGRQAAAARGSSPEAGAAAMAESIIIRVQSPDGVKRITATKRETAATFLKKVAKEFGFQNNGFSVYINRNKTGEITASSNKSLNLLKIKHGDLLFLFPSSLAGPSSEMETSVPPGFKVFGAPNVVEDEIDQYLSKQDGKIYRSRDPQLCRHGPLGKCVHCVPLEPFDEDYLNHLEPPVKHMSFHAYIRKLTGGADKGKFVALENISCKIKSGCEGHLPWPNGICTKCQPSAITLNRQKYRHVDNIMFENHTVADRFLDFWRKTGNQHFGYLYGRYTEHKDIPLGIRAEVAAIYEPPQIGTQNSLELLEDPKAEVVDEIAAKLGLRKVGWIFTDLVSEDTRKGTVRYSRNKDTYFLSSEECITAGDFQNKHPNMCRLSPDGHFGSKFVTAVATGGPDNQVHFEGYQVSNQCMALVRDECLLPCKDAPELGYAKESSSEQYVPDVFYKDVDKFGNEITQLARPLPVEYLIIDITTTFPKDPVYTFSISQNPFPIENRDVLGETQDFHSLATYLSQNTSSVFLDTISDFHLLLFLVTNEVMPLQDSISLLLEAVRTRNEELAQTWKRSEQWATIEQLCSEYPHPLPRHPVAGAGEQPTLHSSPLPVVPWIPAPSCILAGAIGNATSRDSASLPGTWQAPVMEQTCCPGRTS

SEQ ID NO: 1027997 - protein, 435 aa, Homo sapiens
ADCARHRDVGGWRSRAGLKLERRWRRRREAGAGAEAAAGSARPLGRQAAAARGSSPEAGAAAMAESIIIRVQSPDGVKRITATKRETAATFLKKVAKEFGFQNNGFSVYINRNKTGEITASSNKSLNLLKIKHGDLLFLFPSSLAGPSSEMETSVPPGFKVFGAPNVVEDEIDQYLSKQDGKIYRSRDPQLCRHGPLGKCVHCVPLEPFDEDYLNHLEPPVKHMSFHAYIRKLTGGADKGKFVALENISCKIKSGCEGHLPWPNGICTKCQPSAITLNRQKYRHVDNIMFENHTVADRFLDFWRKTGNQHFGYLYGRYTEHKDIPLGIRAEVAAIYEPPQIGTQNSLELLEDPKAEVVDEIAAKLGLRKVLRHPAAKQGAWPGSVGHPGQGELGEWPGCVGYWLSPAAQGQVQALYVLKLHICLLGTNNLYVPLT

SEQ ID NO: 1027998 - protein, 113 aa, Homo sapiens; identical to SEQ ID NO: 1027995

SEQ ID NO: 1027999 - protein, 191 aa, Homo sapiens
ADCARHRDVGGWRSRAGLKLERRWRRRREAGAGAEAAAGSARPLGRQAAAARGSSPEAGAAAMAESIIIRVQSPDGVKRITATKRETAATFLKKVAKEFGFQNNGFSVYINRNKTGEITASSNKSLNLLKIKHGDLLFLFPSSLAGPSSEMETSVPPGFKVFGAPNVVEDEIDQYLSKQDGKIYRSRDPQL

SEQ ID NO: 1028000 - protein, 277 aa, Homo sapiens
MPRLHDHFWSCSCAHSARRRGPPRASAAGLAAKVGEMINVSVSGPSLLAAHGAPDADPAPRGRSAAMSGPEPGSPYPNTWHHRLLQRSLVLFSVGVVLALVLNLLQIQRNVTLFPEEVIATIFSSAWWVPPCCGTAAAVVGLLYPCIDSHLGEPHKFKREWASVMRCIAVFVGINHASAKLDFANNVQLSLTLAALSLGLWWTFDRSRSGLGLGITIAFLATLITQFLVYNGVYQYTSPDFLYIRSWLPCIFFSGGVTVGNIGRQLAMGVPEKPHSD

SEQ ID NO: 1028001 - protein, 277 aa, Homo sapiens; identical to SEQ ID NO: 1028000

SEQ ID NO: 1028002 - protein, 277 aa, Homo sapiens; identical to SEQ ID NO: 1028000

SEQ ID NO: 1028003 - protein, 269 aa, Homo sapiens
MPRLHDHFWSCSCAHSARRRGPPRASAAGLAAKVGEMINVSVSGPSLLAAHGAPDADPAPRGRSAAMSGPEPGSPYPNTWHHRLLQRSLVLFSVGVVLALVLNLLQIQRNVTLFPEEVIATIFSSAWWVPPCCGTAAAVVGLLYPCIDSHLGEPHKFKREWASVMRCIAVFVGINHASAKLDFANNVQLSLTLAALSLGLWWTFDRSRSGLGLGITIAFLATLITQFLVYNGVYQYTSPDFLYIRSWLPCIFFSGGVTVGNIGRQLAMG

SEQ ID NO: 1028004 - protein, 277 aa, Homo sapiens; identical to SEQ ID NO: 1028000

SEQ ID NO: 1028005 - protein, 235 aa, Homo sapiens
MPRLHDHFWSCSCAHSARRRGPPRASAAGLAAKVGEMINVSVSGPSLLAAHGAPDADPAPRGRSAAMSGPEPGSPYPNTWHHRLLQRSLVLFSVGVVLALVLNLLQIQRNVTLFPEEVIATIFSSAWWVPPCCGTAAAVVGLLYPCIDSHLGEPHKFKREWASVMRCIAVFVGINHASAKLDFANNVQLSLTLAALSLGLWWTFDRSRSGLGLGITIAFLATLITQFLVYNGVYQ

SEQ ID NO: 1028006 - protein, 277 aa, Homo sapiens; identical to SEQ ID NO: 1028000

SEQ ID NO: 1028007 - protein, 277 aa, Homo sapiens; identical to SEQ ID NO: 1028000

SEQ ID NO: 1028008 - protein, 277 aa, Homo sapiens; identical to SEQ ID NO: 1028000

SEQ ID NO: 1028009 - protein, 277 aa, Homo sapiens; identical to SEQ ID NO: 1028000

SEQ ID NO: 1028010 - protein, 235 aa, Homo sapiens; identical to SEQ ID NO: 1028005

SEQ ID NO: 1028011 - protein, 109 aa, Homo sapiens [sequence omitted]

SEQ ID NO: 1028012 - protein, 235 aa, Homo sapiens; identical to SEQ ID NO: 1028005

SEQ ID NO: 1028013 - protein, 147 aa, Homo sapiens
MPRLHDHFWSCSCAHSARRRGPPRASAAGLAAKVGEMINVSVSGPSLLAAHGAPDADPAPRGRSAAMSGPEPGSPYPNTWHHRLLQRSLVLFSVGVVLALVLNLLQIQRNVTLFPEEVIATIFSSAWWVPPCCGTAAGEYPSWFFWK

SEQ ID NO: 1028014 - protein, 277 aa, Homo sapiens; identical to SEQ ID NO: 1028000

SEQ ID NO: 1028015 - protein, 277 aa, Homo sapiens; identical to SEQ ID NO: 1028000

SEQ ID NO: 1028016 - protein, 287 aa, Homo sapiens
MPRLHDHFWSCSCAHSARRRGPPRASAAGLAAKVGEMINVSVSGPSLLAAHGAPDADPAPRGRSAAMSGPEPGSPYPNTWHHRLLQRSLVLFSVGVVLALVLNLLQIQRNVTLFPEEVIATIFSSAWWVPPCCGTAAAVVGLLYPCIDSHLGEPHKFKREWASVMRCIAVFVGINHASAVSLIFCATSRKLDFANNVQLSLTLAALSLGLWWTFDRSRSGLGLGITIAFLATLITQFLVYNGVYQYTSPDFLYIRSWLPCIFFSGGVTVGNIGRQLAMGVPEKPHSD

SEQ ID NO: 1028017 - protein, 164 aa, Homo sapiens
MPRLHDHFWSCSCAHSARRRGPPRASAAGLAAKVGEMINVSVSGPSLLAAHGAPDADPAPRGRSAAMSGPEPGSPYPNTWHHRLLQRSLVLFSVGVVLALVLNLLQIQRNVTLFPEEVIATIFSSAWWVPPCCGTAAGIHPQISSIFVLGSLVYFSQEASRWGT

SEQ ID NO: 1028018 - protein, 164 aa, Homo sapiens; identical to SEQ ID NO: 1028017

SEQ ID NO: 1028019 - protein, 277 aa, Homo sapiens; identical to SEQ ID NO: 1028000

SEQ ID NO: 1028020 - protein, 277 aa, Homo sapiens; identical to SEQ ID NO: 1028000

SEQ ID NO: 1028021 - protein, 277 aa, Homo sapiens; identical to SEQ ID NO: 1028000

SEQ ID NO: 1028022 - protein, 277 aa, Homo sapiens; identical to SEQ ID NO: 1028000

SEQ ID NO: 1028023 - protein, 277 aa, Homo sapiens; identical to SEQ ID NO: 1028000

SEQ ID NO: 1028024 - protein, 78 aa, Homo sapiens
EEGSSWRLLAMHHNSPGGSVFECAGLSESVTFLYSLPSEPSGLSCAQSGSFAHGHDLVTSHGGCLEILLHGVVFFSKC

SEQ ID NO: 1028025 - protein, 106 aa, Homo sapiens
  misc_feature (5)..(5): Xaa can be any naturally occurring amino acid
  misc_feature (28)..(28): Xaa can be any naturally occurring amino acid
  misc_feature (32)..(32): Xaa can be any naturally occurring amino acid
  misc_feature (43)..(47): Xaa can be any naturally occurring amino acid
  misc_feature (51)..(54): Xaa can be any naturally occurring amino acid
  misc_feature (64)..(65): Xaa can be any naturally occurring amino acid
  misc_feature (68)..(68): Xaa can be any naturally occurring amino acid
  misc_feature (70)..(70): Xaa can be any naturally occurring amino acid
  misc_feature (74)..(74): Xaa can be any naturally occurring amino acid
  misc_feature (76)..(77): Xaa can be any naturally occurring amino acid
  misc_feature (80)..(80): Xaa can be any naturally occurring amino acid
  misc_feature (82)..(83): Xaa can be any naturally occurring amino acid
PAFVXVWRFFSWFGGFSRLPRGGRAAAXSFVXGLVCCFGSLGXXXXXFFFXXXXCGGIFFFAGXXVFXFXVFFXFXXWGXVXXLLSLSCAEGQRMAYGGPGWMGKG

SEQ ID NO: 1028026 - protein, 82 aa, Homo sapiens
  misc_feature (8)..(8): Xaa can be any naturally occurring amino acid
  misc_feature (23)..(23): Xaa can be any naturally occurring amino acid
SPFLLVGXLMAVNNCGLQAGSPXTPQCSNPGFTCWKYLSVQGQLFRGSSLLFRRVSSGSCFALEKPESSKKHGLNLATVGEA

SEQ ID NO: 1028027 - protein, 156 aa, Homo sapiens
MGGGACVCSHCSKVFPVATSVPLSPPWSPLCAPGLPAFGAHRILPAPLARAREGGWGHSKEAGLKPSPGLLPNILLPESPSKRFNHGQLPVPQTVFGGGGPGSPLLVPPSPLFLFFHLCLFLPQPRHTEAHLLPLRRRDSQHPCCLSVTHTLIYGV

SEQ ID NO: 1028028 - protein, 397 aa, Homo sapiens
IVPERLCESKEGGQGEETCSQIPDGILYKKSPGVKPCESSVCGEVGMGPSSLNRHIRDHTGREPNEYQEYGKKSYTRNQCGRALSYHRSFPVRERTHPGGKPYDCKECGETFISLVSIRRHMLTHRGGVPYKCKVCGKAFDYPSLFRIHERSHTGEKPYECKQCGKAFSCSSYIRIHERTHTGDKPYECKQCGKAFSCSKYIRIHERTHTGEKPYECKQCGKAFRCASSVRSHERTHTGEKLFECKECGKALTCLASVRRHMIKHTGNGPYKCKVCGKAFDFPSSFRIHERTHTGEKPYDCKQCGKAFSCSSSFRKHERIHTGEKPYKCTKCGKAFSRSSYFRIHERTHTGEKPYECKQCGKAFSRSTYFRVHEKIHTGEKPYENPNPNASVVPVLS

SEQ ID NO: 1028029 - protein, 397 aa, Homo sapiens; identical to SEQ ID NO: 1028028

SEQ ID NO: 1028030 - protein, 145 aa, Homo sapiens
MTVHNLYLFDRNGVCLHYSEWHRKKQAGIPKEEEYKLMYGMLFSIRSFVSKMSPLDMKDGFLAFQTSRYKLHYYETPTGIKVVMNTDLGVGPIRDVLHHIYSALYVELVVKNPLCPLGQTVQSELFRSRLDSYVRSLPFFSARAG

SEQ ID NO: 1028031 - protein, 189 aa, Homo sapiens
SNHASGSGESVGGVPTWLEGCGSGNPSPRSGGGPGARLTLPALQMTVHNLYLFDRNGVCLHYSEWHRKKQAGIPKEEEYKLMYGMLFSIRSFVSKMSPLDMKDGFLAFQTSRYKLHYYETPTGIKVVMNTDLGVGPIRDVLHHIYSALYVELVVKNPLCPLGQTVQSELFRSRLDSYVRSLPFFSARAG

SEQ ID NO: 1028032 - protein, 243 aa, Homo sapiens
KLTARYEAGVCVGGVPTWLEGCGSGNPSPRSGGGPGARLTLPALQMTVHNLYLFDRNGVCLHYSEWHRKKQAGIPKEEGDERAPVQPGRPLISKHLQSQPSPSSPKPSSFPSPQPISRIKPRANSGPFSLQEYKLMYGMLFSIRSFVSKMSPLDMKDGFLAFQTSRYKLHYYETPTGIKVVMNTDLGVGPIRDVLHHIYSALYVELVVKNPLCPLGQTVQSELFRSRLDSYVRSLPFFSARAG

SEQ ID NO: 1028033 - protein, 189 aa, Homo sapiens; identical to SEQ ID NO: 1028031

SEQ ID NO: 1028034 - protein, 190 aa, Homo sapiens
NLRLGTRLGVCVGGVPTWLEGCGSGNPSPRSGGGPGARLTLPALQMTVHNLYLFDRNGVCLHYSEWHRKKQAGIPKEEEYKLMYGMLFSIRSFVSKMSPLDMKDGFLAFQTSRYKLHYYETPTGIKVVMNTDLGVGPIRDVLHHIYSALYVELVVKNPLCPLGQTVQSELFRSRLDSYVRSLPFFSARAG

SEQ ID NO: 1028035 - protein, 182 aa, Homo sapiens
NLRLGTRLGVCVGGVPTWLEGCGSGNPSPRSGGGPGARLTLPALQMTVHNLYLFDRNGVCLHYSEWHRKKEYKLMYGMLFSIRSFVSKMSPLDMKDGFLAFQTSRYKLHYYETPTGIKVVMNTDLGVGPIRDVLHHIYSALYVELVVKNPLCPLGQTVQSELFRSRLDSYVRSLPFFSARAG

SEQ ID NO: 1028036 - protein, 110 aa, Homo sapiens
MECVCTTANGTARSKQGFPRRRKDGFLAFQTSRYKLHYYETPTGIKVVMNTDLGVGPIRDVLHHIYSALYVELVVKNPLCPLGQTVQSELFRSRLDSYVRSLPFFSARAG

SEQ ID NO: 1028037 - protein, 145 aa, Homo sapiens; identical to SEQ ID NO: 1028030

SEQ ID NO: 1028038 - protein, 189 aa, Homo sapiens; identical to SEQ ID NO: 1028031

SEQ ID NO: 1028039 - protein, 110 aa, Homo sapiens; identical to SEQ ID NO: 1028036

SEQ ID NO: 1028040 - protein, 127 aa, Homo sapiens
LNNNKISNIPDEYFKRFNALQYLRLSHNELADSGIPGNSFNVSSLVELDLSYNKLKNIPTVNENLENYYLEVNQLEKFDIKSFCKILGPLSYSKIKHLRLDGNRISETSLPPDMYECLRVANEVTLN

SEQ ID NO: 1028041 - protein, 118 aa, Homo sapiens
MAAIFYQQVEGGVIRAHELHMDPCMKRSGAQSRRAISISQREGRRHHTKCHAGPPRKPALRSLISSTSTEFFSYTLSGNKVEVAVKQIIARKAMEQRGAFSNPEALHLYWDIPELNGF

SEQ ID NO: 1028042 - protein, 92 aa, Homo sapiens
MPAADPHTPAQTKANDSHSATSRKPAAGRKNTNNTDEARRERDKGGREERAKSDEQEDKTIRGDRGGRQKTAGRDREDQNHVDKKERQQAEH

SEQ ID NO: 1028043 - protein, 92 aa, Homo sapiens; identical to SEQ ID NO: 1028042

SEQ ID NO: 1028044 - protein, 313 aa, Homo sapiens
MFCYVLPASCLNSLCGGKAGVGLGNAAFSRRGTRLSFCNAGEGLDASVTSHKAWLPDSPAGSDAFLPWALGLKQPGFLLVSGWCLSSCNLSSATYTPPWPTLSLKSFLRKKNNKPKKTNPTPAPTHNAHRQDTQRQQQSSARRRGGARHPHNAARVRGGTATACARGAARRREQAGPQRARRRNAKKRRRGRANAAPQPRRRRRDHTQLGGIERREKRPQARQRQTRTHPPRQKQTTATAPQAASPRQGGRTQITRTKRGASATREGEKNAPKATNRRTRRSGETEAGGRRQRDGTEKIQNHVDKKERQQAEH

SEQ ID NO: 1028045 - protein, 112 aa, Homo sapiens
  misc_feature (110)..(110): Xaa can be any naturally occurring amino acid
MSASQDSRSRDNGPDGMEPEGVIESNWNEIVDSFDDMNLSESLLRGIYAYGFEKPSAIQQRAILPCIKGYDVIAQAQSGTGKTATFAISILQQIELDPNKTDPWSLGSHXQS

SEQ ID NO: 1028046 - protein, 191 aa, Homo sapiens
MPSDVLEVTKKFMRDPIRILVKKEELTLEGIRQFYINVEREEWKLDTLCDLYETLTITQAVIFINTRRKVDWLTEKMHARDFTVSAMHGDMDQKERDVIMREFRSGSSRVLITTDLLARGIDVQQVSLVINYDLPTNRENYIHRIGRGGRFGRKGVAINMVTEEDKRTLRDIETFYNTSIEEMPLNVADLI

SEQ ID NO: 1028047 - protein, 191 aa, Homo sapiens; identical to SEQ ID NO: 1028046

SEQ ID NO: 1028048 - protein, 132 aa, Homo sapiens
MPSDVLEVTKKFMRDPIRILVKKEELTLEGIRQFYINVEREEWKLDTLCDLYETLTITQAVIFINTRRKVDWLTEKMHARDFTVSAMHGDMDQKERDVIMREFRSGSSRVLITTDLLGKLYPQNRSRWTVWP

SEQ ID NO: 1028049 - protein, 191 aa, Homo sapiens; identical to SEQ ID NO: 1028046

SEQ ID NO: 1028050 - protein, 376 aa, Homo sapiens
GSEAPPVAGTSGELEQPSSQVMVSVINTVDTSHEDMIHDAQMDYYGTRLATCSSDRSVKIFDVRNGGQILIADLRGHEGPVCASGLGLHPMYGQHPGNRCSYDRKVIIWREENGTWEKSHEHAGHDSSVNSVCWAPHDYGLILACGSSDGAISLLTYTGEGQWEVKKINNAHNHWLQCRQLGPCCCTWKPHRPPIGAETQLHQESVLQYMVLLVEQRSIPSMIGSEGAKERLEWQGMEQQARSAQVTGLRDVAWAPAIGLPIQHRSLMLLPGWSVCSFWDAVNDWLKRYVCPPKWWVTVFNDVVLACELVLSHANILGCLWWMTTKVTLWKGSQLMAQRVCISDVNKGQGSVSASVTGGAEKKQLTRPVGLVPTGS

SEQ ID NO: 1028051 - protein, 409 aa, Homo sapiens
  misc_feature (15)..(15): Xaa can be any naturally occurring amino acid
  misc_feature (20)..(20): Xaa can be any naturally occurring amino acid
  misc_feature (22)..(22): Xaa can be any naturally occurring amino acid
VLRRPSRVKARSRLXGFSAXLXPNPKLEPFSSLHRLEIWGALAVPCGPFRGESKVSVINTVDTSHEDMIHDAQMDYYGTRLATCSSDRSVKIFDVRNGGQILIADLRGHEGPVCASGLGLHPMYGQHPGNRCSYDRKVIIWREENGTWEKSHEHAGHDSSVNSVCWAPHDYGLILACGSSDGAISLLTYTGVRPMGSKEDQQRSQPLAANAVSWAPAVVPGSLIDHPSGQKPNYIKRFAISGCDKLIKLWKEEEARPVDRMAATTSIEISHQLIVGDSRNSAPLGPYLIGLDPNMNAIDELLPGWSVCSFGALRMIGSSNTLCPPKWWVTVFNGCGCWHVSLVLSHANILGCLWWMTTKVTLWKGSQLMGQRVCISDVNKGQGSESASVTEGAEKEQLTRPVGLVPTGS

SEQ ID NO: 1028052 - protein, 456 aa, Homo sapiens
NADFSTWGTSGSQGLSTQSSAYSSSYGYPPSSLGRAITDGQAGFGNDTLSKVPGISSIEQGMTGLKIGGDLTAAVTKTVGTALSSSGMTSIATNSVPPVSSAAPKPTSWAAIARKPAKPQPKLKPKGNVGIGGSAVPPPPIKHNMNIGTWDEKGSVVKAPPTQPVLPPQTIIQQPQPLIQPPPLVQSQLPQQQPQPPQPQQQQGPQPQAQPHQVQPQQQQLQNRWVAPRNRGAGFNQNNGAGSENFGLGVVPVSASPSSVEVHPVLEKLKAINNYNPKDFDWNLKNGRVFIIKSYSEDDIHRSIKYSIWCSTEHGNKRLDAAYRSLNGKGPLYLLFSVNGSGHFCGVAEMKSVVDYNAYAGVWSQDKWKGKFEVKWIFVKDVPNNQLRHIRLENNDNKPVTNSRDTQEVPLEKAKQVLKIIATFKHTTSIFDDFAHYEKRQEEEEAMRRERNRNKQ

SEQ ID NO: 1028053 - protein, 456 aa, Homo sapiens; identical to SEQ ID NO: 1028052

SEQ ID NO: 1028054 - protein, 97 aa, Homo sapiens
NGIKGNHGPMESNGDTIEYELNGIINGIEWNHRKCNQVESSNGIQGNHRMELNGIFEWIRLESSSNGLELNYRMDLNGIIIEWNPMESSNGIEWNHH

SEQ ID NO: 1028055 - protein, 41 aa, Homo sapiens
MDHPPYSSPRERGEPPRGVLLRGRIQSFLHLGVRGGDALET

SEQ ID NO: 1028056 - protein, 579 aa, Homo sapiens
MSAAIAALAASYGSGSGSESDSDSESSRCPLPAADSLMHLTKSPSSKPSLAVAVDSAPEVAVKEDLETGVHLDPAVKEVQYNPTYETMFAPEFGPENPFRTQQMAAPRNMLSGYAEPAHINDFMFEQQRRTFATYGYALDPSLDNHQVSAKYIGSVEEAEKNQGLTVFETGQKKTEKRKKFKENDASNIDGFLGPWAKYVDEKDVAKPSEEEQKELDEITAKRQKKGKQEEEKPGEEKTILHVKEMYDYQGRSYLHIPQDVGVNLRSTMPPEKCYLPKKQIHVWSGHTKGVSAVRLFPLSGHLLLSCSMDCKIKLWEVYGERRCLRTFIGHSKAVRDICFNTAGTQFLSAAYDRYLKLWDTETGQCISRFTNRKVPYCVKFNPDEDKQNLFVAGMSDKKIVQWDIRSGEIVQEYDRHLGAVNTIVFVDENRRFVSTSDDKSLRVWEWDIPVDFKYIAEPSMHSMPAVTLSPNGKWLACQSMDNQILIFGAQNRFRLNKKKIFKGHMVAGYACQVDFSPDMSYVISGDGNGKLNIWDWKTTKLYSRFKAHDKVCIGAVWHPHETSKVITCGWDGLIKLWD

SEQ ID NO: 1028057 - protein, 579 aa, Homo sapiens; identical to SEQ ID NO: 1028056

SEQ ID NO: 1028058 - protein, 579 aa, Homo sapiens; identical to SEQ ID NO: 1028056

SEQ ID NO: 1028059 - protein, 288 aa, Homo sapiens
MSAAIAALAASYGSGSGSESDSDSESSRCPLPAADSLMHLTKSPSSKPSLAVAVDSAPEVAVKEDLETGVHLDPAVKEVQYNPTYETMFAPEFGPENPFRTQQMAAPRNMLSGYAEPAHINDFMFEQQRRTFATYGYALDPSLDNHQVSAKYIGSVEEAEKNQGLTVFETGQKKTKKKKKKKKNGGFFGGGGKRGFEGAVVGFRAPFLAKGENREGPPRGGGIISKSQGTVDLRRQTTKHGKKERTTHSAQNRVDKHTTHTPSAKRTATKTLTQPTQTTPQDKKESAP

SEQ ID NO: 1028060 - protein, 579 aa, Homo sapiens; identical to SEQ ID NO: 1028056

SEQ ID NO: 1028061 - protein, 579 aa, Homo sapiens; identical to SEQ ID NO: 1028056

SEQ ID NO: 1028062 - protein, 579 aa, Homo sapiens; identical to SEQ ID NO: 1028056

SEQ ID NO: 1028063 - protein, 579 aa, Homo sapiens; identical to SEQ ID NO: 1028056

SEQ ID NO: 1028064 - protein, 470 aa, Homo sapiens
MLSGYAEPAHINDFMFEQQRRTFATYGYALDPSLDNHQVSAKYIGSVEEAEKNQGLTVFETGQKKTEKRKKFKENDASNIDGFLGPWAKYVDEKDVAKPSEEEQKELDEITAKRQKKGKQEEEKPGEEKTILHVKEMYDYQGRSYLHIPQDVGVNLRSTMPPEKCYLPKKQIHVWSGHTKGVSAVRLFPLSGHLLLSCSMDCKIKLWEVYGERRCLRTFIGHSKAVRDICFNTAGTQFLSAAYDRYLKLWDTETGQCISRFTNRKVPYCVKFNPDEDKQNLFVAGMSDKKIVQWDIRSGEIVQEYDRHLGAVNTIVFVDENRRFVSTSDDKSLRVWEWDIPVDFKYIAEPSMHSMPAVTLSPNGKWLACQSMDNQILIFGAQNRFRLNKKKIFKGHMVAGYACQVDFSPDMSYVISGDGNGKLNIWDWKTTKLYSRFKAHDKVCIGAVWHPHETSKVITCGWDGLIKLWD

SEQ ID NO: 1028065 - protein, 447 aa, Homo sapiens
MSAAIAALAASYGSGSGSESDSDSESSRCPLPAADSLMHLTKSPSSKPSLAVAVDSAPEVAVKEDLETGVHLDPAVKEVQYNPTYETMFAPEFGPENPFRTQQMAAPRNMLSGYAEPAHINDFMFEQQRRTFATYGYALDPSLDNHQVSAKYIGSVEEAEKNQGLTVFETGQKKTEKRKKFKENDASNIDGFLGPWAKYVDEKDVAKPSEEEQKELDEITAKRQKKGKQEEEKPGEEKTILHVKEMYDYQGRSYLHIPQDVGVNLRSTMPPEKCYLPKKQIHVWSGHTKGVSAVRLFPLSGHLLLSCSMDCKIKLWEVYGERRCLRTFIGHSKAVRDICFNTAGTQFLSAAYDRYLKLWDTETGQCISRFTNRKVPYCVKFNPDEDKQNLFVAGMSDKKIVQWDIRSGEIVQEYDRHLGAVNTIVFVDENRRFVSTSDDKSLRVWEW

SEQ ID NO: 1028066 - protein, 69 aa, Homo sapiens
MVPPVQVSPLIKLGRYSALFLGVAYGATRYNYLKPRAEEERRIAAEEKKKQDELKRIARELAEDDSILK

SEQ ID NO: 1028067 - protein, 69 aa, Homo sapiens; identical to SEQ ID NO: 1028066

SEQ ID NO: 1028068 - protein, 37 aa, Homo sapiens
MCNLKLICTTGYLTGATDTESVLFLLKYSMELTLNLN

SEQ ID NO: 1028069 - protein, 69 aa, Homo sapiens; identical to SEQ ID NO: 1028066

SEQ ID NO: 1028070 - protein, 69 aa, Homo sapiens; identical to SEQ ID NO: 1028066

SEQ ID NO: 1028071 - protein, 81 aa, Homo sapiens
SSAFASKALLACAASCSVCRLCFRCGGQGQDGATGAGLSAHQDYLKPRAEEERRIAAEEKKKQDELKRIARELAEDDSILK

SEQ ID NO: 1028072 - protein, 85 aa, Homo sapiens
APPLPPRLCWLVRHPAPSAGCASGAEVRDKMVPPVQVSPLIKLGRYSALFLGVAYGATRYNYLKPRAEEERRIAAEEKKKISDCV

SEQ ID NO: 1028073 - protein, 69 aa, Homo sapiens; identical to SEQ ID NO: 1028066

SEQ ID NO: 1028074 - protein, 69 aa, Homo sapiens; identical to SEQ ID NO: 1028066

SEQ ID NO: 1028075 - protein, 323 aa, Homo sapiens
MADKQISLPAKLINGGIAGLIGVTCVFPIDLAKTRLQNQQNGQRVYTSMSDCLIKTVRSEGYFGMYRGAAVNLTLVTPEKAIKLAANDFFRHQLSKDGQKLTLLKEMLAGCGAGTCQVIVTTPMEMLKIQLQDAGRIAAQRKILAAQGQLSAQGGAQPSVEAPAAPRPTATQLTRDLLRSRGIAGLYKGLGATLLRDVPFSVVYFPLFANLNQLGRPASEEKSPFYVSFLAGCVAGSAAAVAVNPCDVVKTRLQSLQRGVNEDTYSGILDCARKILRHEGPSAFLKGAYCRALVIAPLFGIAQVVYFLGIAESLLGLLQDPQA

SEQ ID NO: 1028076 - protein, 348 aa, Homo sapiens
MADKQISLPAKLINGGIAGLIGVTCVFPIDLAKTRLQNQQNGQRVYTSIPRQSRDPGLRLAPAGPGSPCPLGHRSDCLIKTVRSEGYFGMYRGAAVNLTLVTPEKAIKLAANDFFRHQLSKDGQKLTLLKEMLAGCGAGTCQVIVTTPMEMLKIQLQDAGRIAAQRKILAAQGQLSAQGGAQPSVEAPAAPRPTATQLTRDLLRSRGIAGLYKGLGATLLRDVPFSVVYFPLFANLNQLGRPASEEKSPFYVSFLAGCVAGSAAAVAVNPCDVVKTRLQSLQRGVNEDTYSGILDCARKILRHEGPSAFLKGAYCRALVIAPLFGIAQVVYFLGIAESLLGLLQDPQA

SEQ ID NO: 1028077 - protein, 323 aa, Homo sapiens; identical to SEQ ID NO: 1028075

SEQ ID NO: 1028078 - protein, 323 aa, Homo sapiens; identical to SEQ ID NO: 1028075

SEQ ID NO: 1028079 - protein, 323 aa, Homo sapiens; identical to SEQ ID NO: 1028075

SEQ ID NO: 1028080 - protein, 323 aa, Homo sapiens; identical to SEQ ID NO: 1028075

SEQ ID NO: 1028081 - protein, 323 aa, Homo sapiens; identical to SEQ ID NO: 1028075

SEQ ID NO: 1028082 - protein, 405 aa, Homo sapiens
MGNPALSVRHLSFLLQTMLDFLSDQEKKDVAQSLENYTSKCPGTMEPIALPGGLTLPPVPFTKLPIVRHVKLLNLPASLRPHKMKSLLGQNVSTKSPFIYSPIIAHNRGEERNKKIDFQWVQGDVCEVQLMVYNPMPFELRVENMGLLTSGVEFESLPAALSLPAESGLYPVTLVGVPQTTGTITVNGYHTTVFGVFSDCLLDNLPGIKTSGSTVEVIPALPRLQISTSLPRSAHSLQPSSGDEISTNVSVQLYNGESQQLIIKLENIGMEPLEKLEVTSKVLTTKEKLYGDFLSWKLEETLAQFPLQPGKVATFTINIKVKLDFSCQENLLQDLSDDGISVSGFPLSSPFRQVVRPRVEGKPVNPPESNKAGDYSHVKTLEAVLNFKYSGGPGHTEGYYRNITT

SEQ ID NO: 1028083 - protein, 345 aa, Homo sapiens
MGNPALSVRHLSFLLQTMLDFLSDQEKKDVAQSLENYTSKCPGTMEPIALPGGLTLPPVPFTKLPIVRHVKLLNLPASLRPHKMKSLLGQNVSTKSPFIYSPIIAHNRGEERNKKIDFQWVQGDVCEVQLMVYNPMPFELRVENMGLLTSGVEFESLPAALSLPAESGLYPVTLVGVPQTTGTITVNGYHTTVFGVFSDCLLDNLPGIKTSGSTVEVIPALPRLQISTSLPRSAHSLQPSSGDEISTNVSVQLYNGESQQLIIKLENIGMEPLEKLEVTSKVLTTKEKLYGDFLSWKLEETLAQFPLQPGKVATFTINIKVKLDFSCQENLLQDLSDGKRFPNFN

SEQ ID NO: 1028084 - protein, 248 aa, Homo sapiens
YKDLHIYSLSFGPSQPCETGMQMLLSSPSRTRTVRVVGLRAGVWVSAGGPRAASELRSSEEEPRTLRTASAVGVRPKALPVERRSSFSIPGYHTTVFGVFSDCLLDNLPGIKTSGSTVEVIPALPRLQISTSLPRSAHSLQPSSGDEISTNVSVQLYNGESQQLIIKLENIGMEPLEKLEVTSKVLTTKEKLYGDFLSWKLEETLAQFPLQPGKVATFTINIKVKLDFSCQENLLQDLSDGKRFPNFN

SEQ ID NO: 1028085 - protein, 196 aa, Homo sapiens
MGISRDNWHKRRKTGGKRKPYHKKRKYELGRPAANTKIGPRRIHTVRVRGGNKKYRALRLDVGNFSWGSECCTRKTRIIDVVYNASNNELVRTKTLVKNCIVLIDSTPYRQWKGAKLTPEEEEILNKKRSKKIQKKYDERKKNAKISSLLEEQFQQGKLLACIASRPGQCGRADGYVLEGKELEFYLRKIKARKGK

SEQ ID NO: 1028086 - protein, 126 aa, Homo sapiens
GPPPPPCLVGSRMRVLPVPVSRPERDASVELSTMRCRLCAGQKGAKLTPEEEEILNKKRSKKIQKKYDERKKNAKISSLLEEQFQQGKLLACIASRPGQCGRADGYVLEGKELEFYLRKIKARKGK

SEQ ID NO: 1028087 - protein, 105 aa, Homo sapiens
HSPLLTKRRAMGISRDNWHKRRKTGGKRKPYHKKRKYELGRPAANTKIGPRRIHTVRVRGGNKKYRALRLDVGNFSCVRSGAVVLAIHSIGHPSSDMCYTLRSNL

SEQ ID NO: 1028088 - protein, 244 aa, Homo sapiens
MGISRDNWHKRRKTGGKRKPYHKKRKYELGRPAANTKIGPRRIHTVRVRGGNKKYRALRLDVGNFSWGSECCTRKTRIIDVVYNASNNELVRTKTLVKNCIVLIDSTPYRQWYESHYALPLGRKKGAKLTPEEEEILNKKRSKKIQKKYDERKKNAKISSLLEEQFQQGKLLACIASRPGQCGRADGYVLEGKELEFYLRKSAAAIICCLTMYKVLCLFQKKKKKKNCWGWPGKFKPPLGRGPC

SEQ ID NO: 1028089 - protein, 208 aa, Homo sapiens [sequence omitted]

SEQ ID NO: 1028090 - protein, 305 aa, Homo sapiens
MGISRDNWHKRRKTGGKRKPYHKKRKYELGRPAANTKIGPRRIHTVRVRGGNKKYRALRLDVGNFSCGTQSVSECPFGRWRGKTHPKSVFKIHPMWGLARWLTPISPARWEAEAGGSPECQEFEVLAWANQSETLMVRTRRFNVRIQASNSCGLYDPRHFEAFSVAMTRISRYLGSSFSRPGLSCFQSSSCCDDWCLWFAHVLACASGVTLGVPLPAILAPGVEGDSPWPRSLAMKCGINRPCAYLARSASCYSQVDDGGSHAWLGQGWSLPFLGLLADSTGFDLPMLLGYRCVSSVCRTARVSG

SEQ ID NO: 1028091 - protein, 85 aa, Homo sapiens
HSPLLTKRRAMGISRDNWHKRRKTGGKRKPYHKKRKYELGRPAANTKIGPRRIHTVRVRGGNKKYRALRLDVGNFSSRVAQCGDR

SEQ ID NO: 1028092 - protein, 224 aa, Homo sapiens
MGISRDNWHKRRKTGGKRKPYHKKRKYELGRPAANTKIGPRRIHTVRVRGGNKKYRALRLDVGNFSWGSECCTRKTRIIDVVYNASNNELVRTKTLVKNCIVLIDSTPYRQWYESHYALPLGRKKGAKLTPTMLLPLGRQKGAKLTPEEEEILNKKRSKKIQKKYDERKKNAKISSLLEEQFQQGKLLACIASRPGQCGRADGYVLEGKELEFYLRKIKARKGK

SEQ ID NO: 1028093 - protein, 288 aa, Homo sapiens
MDLMVEASPRRIFANAHTYHINSISVNSDHETYLSADDLRINLWHLEITDRSFNIVDIKPANMEELTEVITAAEFHPHQCNVFVYSSSKGTIRLCDMRSSALCDRHSKFFEEPEDPSSRSFFSEIISSISDVKFSHSGRYMMTRDYLSVKVWDLNMESRPVETHQVHEYLRSKLCSLYENDCIFDKFECCWNGSDSAIMTGSYNNFFRMFDRDTRRDVTLEASRESSKPRASLKPRKVCTGGKRRKDEISVDSLDFNKKILHTAWHPVDNVIAVAATNNLYIFQDKIN

SEQ ID NO: 1028094 - protein, 288 aa, Homo sapiens; identical to SEQ ID NO: 1028093

SEQ ID NO: 1028095 - protein, 288 aa, Homo sapiens; identical to SEQ ID NO: 1028093

SEQ ID NO: 1028096 - protein, 435 aa, Homo sapiens
MAGAGGGGCPAGGNDFQWCFSQVKGAIDEDVAEADIISTVEFNYSGDLLATGDKGGRVVIFQREQENKSRPHSRGEYNVYSTFQSHEPEFDYLKSLEIEEKINKIRWLPQQNAAHFLLSTNDKTIKLWKISERDKRAEGYNLKDEDGRLRDPFRITALRVPILKPMDLMVEASPRRIFANAHTYHINSISVNSDHETYLSADDLRINLWHLEITDRSFNIVDIKPANMEELTEVITAAEFHPHQCNVFVYSSSKGTIRLCDMRSSALCDRHSKFFEEPEDPSSRSFFSEIISSISDVVWDLNMESRPVETHQVHEYLRSKLCSLYENDCIFDKFECCWNGSDSAIMTGSYNNFFRMFDRDTRRDVTLEASRESSKPRASLKPRKVCTGGKRRKDEISVDSLDFNKKILHTAWHPVDNVIAVAATNNLYIFQDKIN

SEQ ID NO: 1028097 - protein, 251 aa, Homo sapiens
SGCPAKRRPEGVCGRSLGSPGVPERVGAAGGASLLEERRVHTGTRRAGERLGPRAEELACARRPRLPSAVAQASLPPYSRAAPGAGALGAPGSPRGAPVRCPSEEAEGDDVIERGDGHWAAILNKGKKDPSPAAAAAAAAPAVVAAPGLSARLQRRGGRLPGLPRSPPVPPPAAMAGAGGGGCPAGGNDFQWCFSQVKGAIDEDVAEGRGEESSGLLPQIMLSRQQLHLPLALLIRGNDNSVKTADDVQGL

SEQ ID NO: 1028098 - protein, 461 aa, Homo sapiens
MACGRHLPFFIKSYNWRSYRELGFLLSHTRAHLTPGHCPLKSDIISTVEFNYSGDLLATGDKGGRVVIFQREQENKSRPHSRGEYNVYSTFQSHEPEFDYLKSLEIEEKINKIRWLPQQNAAHFLLSTNDKTIKLWKISERDKRAEGYNLKDEDGRLRDPFRITALRVPILKPMDLMVEASPRRIFANAHTYHINSISVNSDHETYLSADDLRINLWHLEITDRSFNIVDIKPANMEELTEVITAAEFHPHQCNVFVYSSSKGTIRLCDMRSSALCDRHSKFFEEPEDPSSRSFFSEIISSISDVKFSHSGRYMMTRDYLSVKVWDLNMESRPVETHQVHEYLRSKLCSLYENDCIFDKFECCWNGSDSAIMTGSYNNFFRMFDRDTRRDVTLEASRESSKPRASLKPRKVCTGGKRRKDEISVDSLDFNKKILHTAWHPVDNVIAVAATNNLYIFQDKIN

SEQ ID NO: 1028099 - protein, 453 aa, Homo sapiens
MAGAGGGGCPAGGNDFQWCFSQVKGAIDEDVAEADIISTVEFNYSGDLLATGDKGGRVVIFQREQENKSRPHSRGEYNVYSTFQSHEPEFDYLKSLEIEEKINKIRWLPQQNAAHFLLSTNDKTIKLWKISERDKRAEGYNLKDEDGRLRDPFRITALRVPILKPMDLMVEASPRRIFANAHTYHINSISVNSDHETYLSADDLRINLWHLEITDRSFNIVDIKPANMEELTEVITAAEFHPHQCNVFVYSSSKGTIRLCDMRSSALCDRHSKFFEEPEDPSSRSFFSEIISSISDVKFSHSGRYMMTRDYLSVKVWDLNMESRPVETHQVHEYLRSKLCSLYENDCIFDKFECCWNGSDSAIMTGSYNNFFRMFDRDTRRDVTLEASRESSKPRASLKPRKVCTGGKRRKDEISVDSLDFNKKILHTAWHPVDNVIAVAATNNLYIFQDKIN

SEQ ID NO: 1028100 - protein, 491 aa, Homo sapiens
MAGAGGGGCPAGGNDFQWCFSQVKGAIDEDVAEADIISTVEFNYSGDLLATGDKGGRVVIFQREQEVLAQPRLSCPAMKCEQLSQHFLQRSLAGVWILSSLQGENKSRPHSRGEYNVYSTFQSHEPEFDYLKSLEIEEKINKIRWLPQQNAAHFLLSTNDKTIKLWKISERDKRAEGYNLKDEDGRLRDPFRITALRVPILKPMDLMVEASPRRIFANAHTYHINSISVNSDHETYLSADDLRINLWHLEITDRSFNIVDIKPANMEELTEVITAAEFHPHQCNVFVYSSSKGTIRLCDMRSSALCDRHSKFFEEPEDPSSRSFFSEIISSISDVKFSHSGRYMMTRDYLSVKVWDLNMESRPVETHQVHEYLRSKLCSLYENDCIFDKFECCWNGSDSAIMTGSYNNFFRMFDRDTRRDVTLEASRESSKPRASLKPRKVCTGGKRRKDEISVDSLDFNKKILHTAWHPVDNVIAVAATNNLYIFQDKIN

SEQ ID NO: 1028101 - protein, 453 aa, Homo sapiens; identical to SEQ ID NO: 1028099

SEQ ID NO: 1028102 - protein, 453 aa, Homo sapiens; identical to SEQ ID NO: 1028099

SEQ ID NO: 1028103 - protein, 137 aa, Homo sapiens
MEELTEVITAAEFHPHQCNVFVYSSSKGTIRLCDMRSSALCDRHSKFFEEPEDPSSRSFFSEIISSISDVKFSHSGRYMMTRDLPVGEGVGPQHGRAGRWRPTRSTSTCAASSALSMRTTASLTSLSVAGTVRIAPS

SEQ ID NO: 1028104 - protein, 238 aa, Homo sapiens
AGVRPRRRPEGVCGRSLGSPGVPERVGAAGGASLLEERRGAHRHPTAGERLGPRAEELACARRPRLPSAVAQASLPPYSRAAPGAGALGAPGSPRGAPVRCPSEEAEGDDVIERGEGIGRHFEQGEKRSLPGGGGGGGGAGGGGGPGAERSAAAARRPSPWSAAVPARPAAGCHGRSRRRRLPRGRQRLPVVLLAGQGGHRRGRGRRLSSSSLKAGCPPSHPSPCRGPSTKVMIGNSC

SEQ ID NO: 1028105 - protein, 137 aa, Homo sapiens; identical to SEQ ID NO: 1028103

SEQ ID NO: 1028106 - protein, 219 aa, Homo sapiens
MAHHGYFQLKANPGAWILRLHQGKSEDIYQIVGHEGTDSQADLEDIIVVLNSFKSKILKVKVKKETDKIKEDILTDEDEKTKGLWDSIKSFTVSLHKENKKEKDVLNIFSVASGHLYELLYRIMMLSVLRNTKTPVKFWLLKNYLSPTFKEVIPHMAKEYGFRYELVQYRWPRWLRQQTERQRIIWGYKILFLDVLFPLAVDKIIFVDADQIVRHDLKE

SEQ ID NO: 1028107 - protein, 119 aa, Homo sapiens
  misc_feature (25)..(25): Xaa can be any naturally occurring amino acid
GAIDYCKSKASTFAFMESLTLGLLXCPGVSATTVLPFHTSTEMFQGMRVRFPNLFPPLKPETVARRTVEAVQLNQALLLLPWTMHALVILKSILPQAALEEIHKFSGTYTCMNTFKGRT

SEQ ID NO: 1028108 - protein, 119 aa, Homo sapiens; identical to SEQ ID NO: 1028107
  misc_feature (25)..(25): Xaa can be any naturally occurring amino acid

SEQ ID NO: 1028109 - protein, 67 aa, Homo sapiens
DFEPALFTRAYAFTHAAGKDRRDGLVDDHDLEGHAWRSAAVPVTTLNLATPARTIAVINFSNKRKFN

SEQ ID NO: 1028110 - protein, 119 aa, Homo sapiens; identical to SEQ ID NO: 1028107
  misc_feature (25)..(25): Xaa can be any naturally occurring amino acid

SEQ ID NO: 1028111 - protein, 119 aa, Homo sapiens; identical to SEQ ID NO: 1028107
  misc_feature (25)..(25): Xaa can be any naturally occurring amino acid

SEQ ID NO: 1028112 - protein, 126 aa, Homo sapiens
GRLLLLLLEFKLLTMYGDMLLLGEQDSSCPQRRIRLPLGQSQDLCTGLMGITDPHREAGKQPEATLTLLNISSSVEFIVNCFSSLTSLSSVHRPFPGGSVPRCSASRSKTHSSSACTNWLNGRNEK

SEQ ID NO: 1028113 - protein, 129 aa, Homo sapiens
MGILSFTTSYFSSPSSSSPFTSSTISSCISSSSSSSACCSPGILVSSRRFGTRGAPGLGAGRLGTQRGRGFRGRGGGGTAGTAGHWSEHIAPPPGAEPEGPRRPAQTARRGRRAQTWRPPQSPDSQAPG

SEQ ID NO: 1028114 - protein, 433 aa, Homo sapiens
MRERRRLLEGRKKTGEEADRGRGGRRGRRREKGERTERGGLEVHEGGERELQRGERTAEGERDSPEWNVEGKQSSGEPGAAMEGTGGELGGQGNWGPEDAPGLLARASLIMLPWPLPLASSALTLLFGALTSLFLWYCYRLGSQDMQALGAGSRAGGVRGGPVGCSEAGGPSPGGPGDPGEGPRTEGLVSRRLRAYARRYSWAGMGRVRRAAQGGPGPGRGPGVLGIQRPGLLFLPDLPSAPFVPRDAQRHDVELLESSFPAILRDFGAVSWDFSGTTPPPRGWSPPLAPGCYQLLLYQAGRCQPSNCRRCPGAYRALRGLRSFMSANTFGNAGFSVLLPGARLEGRCGPTNARVRCHLGLKIPPGCELVVGGEPQCWAEGHCLLVDDSFLHTVAHNGSPEDGPRVVFIVDLWHPNVAGAERQALDFVFAPDP

SEQ ID NO: 1028115 - protein, 367 aa, Homo sapiens
MRERRRLLEGRKKTGEEADRGRGGRRGRRREKGERTERGGLEVHEGGERELQRGERTAEGERDSPEWNVEGKQSSGEPGAAMEGTGGELGGQGNWGPEDAPGLLARASLIMLPWPLPLASSALTLLFGALTSLFLWYCYRLGSQDMQALGAGSRAGGVRGGPVGCSEAGGPSPGGPGDPGEGPRTEGLVSRRLRAYARRYSWAGMGRVRRAAQGWPRPWERARGPRYSAPRPAFPTRPAFSPLCAAGRPAARRGAPGEQLPCHFAGLRGCELGLLRDYPSASGLVPTSGPRVLPAPAVPSRPVPTQQLPPVPGGLSGTEGASKLYECQHLRQCRLFRSPAWGPARGPLWAHQCPGQMPSGPKDPSWL

SEQ ID NO: 1028116 - protein, 367 aa, Homo sapiens; identical to SEQ ID NO: 1028115

SEQ ID NO: 1028117 - protein, 109 aa, Homo sapiens
MSANTFGNAGFSVLLPGARLEGRCGPTNARVRCHLGLKIPPGCELVVGGEPQCWAEGHCLLVDDSFLHTVAHNGSPEDGPRVVFIVDLWHPNVAGAERQALDFVFAPDP

SEQ ID NO: 1028118 - protein, 446 aa, Homo sapiens
MRERRRLLEGRKKRVRRLTDRDRRTDTNDRYDGTTTQQGDDAHAPHTDGVARVALTPDGGERELQRGERTAEGERDSPEWNVEGKQSSGEPGAAMEGTGGELGGQGNWGPEDAPGLLARASLIMLPWPLPLASSALTLLFGALTSLFLWYCYRLGSQDMQALGAGSRAGGVRGGPVGCSEAGGPSPGGPGDPGEGPRTEGLVSRRLRAYARRYSWAGMGRVRRAAQGGPGPGRGPGVLGIQRPGLLFLPDLPSAPFVPRDAQRHDVELLESSFPAILRDFGAVSWDFSGTTPPPRGWSPPLAPGCYQLLLYQAGRCQPSNCRRCPGAYRALRGLRSFMSANTFGNAGFSVLLPGARLEGRCGPTNARVRCHLGLKIPPGCELVVGGEPQCWAEGHCLLVDDSFLHTVAHNGSPEDGPRVVFIVDLWHPNVAGAERQALDFVFAPDP

SEQ ID NO: 1028119 - protein, 367 aa, Homo sapiens; identical to SEQ ID NO: 1028115

SEQ ID NO: 1028120 - protein, 109 aa, Homo sapiens; identical to SEQ ID NO: 1028117

SEQ ID NO: 1028121 - protein, 265 aa, Homo sapiens
AGCHSDVHAVARPDPQVPCWREEGGGTMSHAVTIEEPQAQPQVSQTRYRERSRAGSHISSNRAYDFLYDPLFIVSSEKDHTQANIQATLIRSRLRKVPRFKTMFSNLIHYPRYSLYWSKSDPVPPFISREWKGHKEKHREALRQLTTTDASFQMPKEVYEDPEVTGKNRYKYFERPFLPFFQQMPFNVVYAVSKAEPYTFPPTSTKHLSIPSKSTVGTQTDYRDADVQTDPYSPEYVVCQDSIPELLTLATLTWGELVNLLTIGR

SEQ ID NO: 1028122 - protein, 86 aa, Homo sapiens
TAVVALGDGAEPLLPAVSQICSPPDSFLVALPFQVFNIFNEWLLQAGIVLGPCNAPVDKADKNPGEKGKVFKLKETSQRASPPVPL

SEQ ID NO: 1028123 - protein, 164 aa, Homo sapiens
QWPPLFTFETRSDVSPSQVICVSSSHATMSSAQGCSVGTVFSHKHLEVPECSPVTLCLNDRHRSPECMRRPRGSTKRAAFPTGALAADTVRYCPPAGSLIGSQCKSLSFSLIHPQSPWSKLQLCTRTPGSSFASSSALTPLSISNISNKSFEGCRGMNTSPLGF

SEQ ID NO: 1028124 - protein, 264 aa, Homo sapiens
QWPPLFTFETRSDVSPSQVICVSSSHATMSSAQGCSVGTVFSHKHLEVPECSPVTLCLNDRHRSPECMRRPRGSTKRAAFPTGALAADTVRYCPPAGSLIGSQCKSLSFSLIHPQSPWSKLQLCTRTPGSSFASSSALTPLSISNISNKSFEGCRGMNTSPLGFCGSVCTLLSTVIPPGGVLAAGAIVVSPVVGLSGVVGGRGVLSSVGRGGGGGGVGIGVGFGVGLVVGLEVGLLVMIGGYDGYNEGGNFGGGNYGGGGNYND

SEQ ID NO: 1028125 - protein, 164 aa, Homo sapiens; identical to SEQ ID NO: 1028123

SEQ ID NO: 1028126 - protein, 164 aa, Homo sapiens; identical to SEQ ID NO: 1028123

SEQ ID NO: 1028127 - protein, 260 aa, Homo sapiens
MALKGRALYDFSQVGTSEGNQDTSRLEDLVIFSETSLDGWLQGQNSRGETGLFPASYVEIVRSGISTNHADYSSSPAGSPGAQVSLYNSPSVASPALSGGGSGFLSNQGSFEEDDDDDWDDWDDGCTVEEEPRAGGLGTNGHPPLNLSYPGAYPSQHMAFRPKPPLERQDSLASAKRGSVVGRNLNRFSCFVRSGVEAFILGDVPMMAKIAETYSIEMGPRGPQWKANPHPFACSVEDPTKQTKFKGIKSYISYKLTPHP

SEQ ID NO: 1028128 - protein, 273 aa, Homo sapiens
RDASIHYCDSADLKKLLTPPADWTLFVPTKDAFKGMTSEEKEILIRDKNALQNIILYHLTPGVFIGKGFEPGVTNILKTTQGSKIFLKEVNDTLLVNELKSKESDIMTTNGVIHVVDKLLYPADTPVGNDQLLEILNKLIKYIQIKFVRGSTFKEIPVTVYRPTLTKVKIEGEPEFRLIKEGETITEVIHGEPIIKKYTKIIDGVPVEITEKETREERIITGPEIKYTRISTGGGETEETLKKLLQEDTPVRKLQANKKVQGSRRRLREGRSQ

SEQ ID NO: 1028129 - protein, 181 aa, Homo sapiens
RDASIHYCDSADLKKLLTPPADWTLFVPTKDAFKGMTSEEKEILIRDKNALQNIILYHLTPGVFIGKGFEPGVTNILKTTQGSKIFLKEVNDTLLVNELKSKESDIMTTNGVIHVVDKLLYPADTPVGNDQLLEILNKLIKYIQIKFVRGSTFKEIPVTVYKPFIIYTTFIMMKLALGPAG

SEQ ID NO: 1028130 - protein, 125 aa, Homo sapiens
MKNEEHCPGSFFLCKIRECVLNYRFQLQHPGFQHYLQSSGRRDRGRSEDKKPLEAGVWCWDRGGWDGSSRAVHLLFRGVAHPSLYLFPREDPPRLLFPRLSLLVCEQFWCYSATLLLAPLPASTC

SEQ ID NO: 1028131 - protein, 125 aa, Homo sapiens; identical to SEQ ID NO: 1028130

SEQ ID NO: 1028132 - protein, 78 aa, Homo sapiens
AVGWRCCWQVAYTRLGCQNEEEVKIRNHSKPVSGAGTVVAGTAAVVLSICSSEGWHILASIFSPEKIPLVCSSPVSAF

SEQ ID NO: 1028133 - protein, 1072 aa, Homo sapiens
MQFVSWATLLTLLVRDLAEMGSPDAAAAVRKDRLHPRQVKLLETLGEYEIVSPIRVNALGEPFPTNVHFKRTRRSINSATDPWPAFASSSSSSTSSQAHYRLSAFGQQFLFNLTANAGFIAPLFTVTLLGTPGVNQTKFYSEEEAELKHCFYKGYVNTNSEHTAVISLCSGMLGTFRSHDGDYFIEPLQSMDEQEDEEEQNKPHIIYRRSAPQREPSTGRHACDTSEHKNRHSKDKKKTRARKWGERINLAGDVAALNSGLATEAFSAYGNKTDNTREKRTHRRTKRFLSYPRFVEVLVVADNRMVSYHGENLQHYILTLMSIVASIYKDPSIGNLINIVIVNLIVIHNEQDGPSISFNAQTTLKNLCQWQHSKNSPGGIHHDTAVLLTRQDICRAHDKCDTLGLAELGTICDPYRSCSISEDSGLSTAFTIAHELGHVFNMPHDDNNKCKEEGVKSPQHVMAPTLNFYTNPWMWSKCSRKYITEFLDTGYGECLLNEPESRPYPLPVQLPGILYNVNKQCELIFGPGSQVCPYMMQCRRLWCNNVNGVHKGCRTQHTPWADGTECEPGKHCKYGFCVPKEMDVPVTDGSWGSWSPFGTCSRTCGGGIKTAIRECNRPEPKNGGKYCVGRRMKFKSCNTEPCLKQKRDFRDEQCAHFDGKHFNINGLLPNVRWVPKYSGILMKDRCKLFCRVAGNTAYYQLRDRVIDGTPCGQDTNDICVQGLCRQAGCDHVLNSKARRDKCGVCGGDNSSCKTVAGTFNTVHYGYNTVVRIPAGATNIDVRQHSFSGETDDDNYLALSSSKGEFLLNGNFVVTMAKREIRIGNAVVEYSGSETAVERINSTDRIEQELLLQVLSVGKLYNPDVRYSFNIPIEDKPQQFYWNSHGPWQACSKPCQGERKRKLVCTRESDQLTVSDQRCDRLPQPGHITEPCGTDCDLRWHVASRSECSAQCGLGYRTLDIYCAKYSRLDGKTEKVDDGFCSSHPKPSNREKCSGECNTGGWRYSAWTECSKSCDGGTQRRRAICVNTRNDVLDDSKCTHQEKVTIQRCSEFPCPQWKSGDWSEVRWEGCYFP

SEQ ID NO: 1028134 - protein, 1085 aa, Homo sapiens
MQFVSWATLLTLLVRDLAEMGSPDAAAAVRKDRLHPRQVKLLETLGEYEIVSPIRVNALGEPFPTNVHFKRTRRSINSATDPWPAFASSSSSSTSSQAHYRLSAFGQQFLFNLTANAGFIAPLFTVTLLGTPGVNQTKFYSEEEAELKHCFYKGYVNTNSEHTAVISLCSGMLGTFRSHDGDYFIEPLQSMDEQEDEEEQNKPHIIYRRSAPQREPSTGRHACDTSEHKNRHSKDKKKTRARKWGERINLAGDVAALNSGLATEAFSAYGNKTDNTREKRTHRRTKRFLSYPRFVEVLVVADNRMVSYHGENLQHYILTLMSIVASIYKDPSIGNLINIVIVNLIVIHNEQDGPSISFNAQTTLKNLCQWQHSKNSPGGIHHDTAVLLTRQDICRAHDKCDTLGLAELGTICDPYRSCSISEDSGLSTAFTIAHELGHVFNMPHDDNNKCKEEGVKSPQHVMAPTLNFYTNPWMWSKCSRKYITEFLDTGYGECLLNEPESRPYPLPVQLPGILYNVNKQCELIFGPGSQVCPYMMQCRRLWCNNVNGVHKGCRTQHTPWADGTECEPGKHCKYGFCVPKEMDVPVTDGSWGSWSPFGTCSRTCGGGIKTAIRECNRPEPKNGGKYCVGRRMKFKSCNTEPCLKQKRDFRDEQCAHFDGKHFNINGLLPNVRWVPKYSGILMKDRCKLFCRVAGNTAYYQLRDRVIDGTPCGQDTNDICVQGLCRQAGCDHVLNSKARRDKCGVCGGDNSSCKTVAGTFNTVHYGYNTVVRIPAGATNIDVRQHSFSGETDDDNYLALSSSKGEFLLNGNFVVTMAKREIRIGNAVVEYSGSETAVERINSTDRIEQELLLQVLSVGKLYNPDVRYSFNIPIEDKPQQFYWNSHGPWQACSKPCQGERKRKLVCTRESDQLTVSDQRCDRLPQPGHITEPCGTDCDLRWHVASRSECSAQCGLGYRTLDIYCAKYSRLDGKTEKVDDGFCSSHPKPSNREKCSGECNTGGWRYSAWTECSKSCDGGTQRRRAICVNTRNDVLDDSKCTHQEKVTIQRCSEFPCPQWKSGDWSECLVTCGKGHKHRQPWCQPGEDR

SEQ ID NO: 1028135 - protein, 488 aa, Homo sapiens
MQFVSWATLLTLLVRDLAEMGSPDAAAAVRKDRLHPRQVKLLETLGEYEIVSPIRVNALGEPFPTNVHFKRTRRSINSATDPWPAFASSSSSSTSSQAHYRLSAFGQQFLFNLTANAGFIAPLFTVTLLGTPGVNQTKFYSEEEAELKHCFYKGYVNTNSEHTAVISLCSGMLGTFRSHDGDYFIEPLQSMDEQEDEEEQNKPHIIYRRSAPQREPSTGRHACDTSEHKNRHSKDKKKTRARKWGERINLAGDVAALNSGLATEAFSAYGNKTDNTREKRTHRRTKRFLSYPRFVEVLVVADNRMVSYHGENLQHYILTLMSIVASIYKDPSIGNLINIVIVNLIVIHNEQDGPSISFNAQTTLKNLCQWQHSKNSPGGIHHDTAVLLTRQDICRAHDKCDTLGLAELGTICDPYRSCSISEDSGLSTAFTIAHELGHVFNMPHDDNNKCKEEGVKSPQHVMAPTLNFYTNPWMWSKCSRKYITEFLE

SEQ ID NO: 1028136 - protein, 370 aa, Homo sapiens
RHINHEYIAKIKSEKGYRKSVAESAGQELSTFAIDSNVSLQVCGGDNSSCKTVAGTFNTVHYGYNTVVRIPAGATNIDVRQHSFSGETDDDNYLALSSSKGEFLLNGNFVVTMAKREIRIGNAVVEYSGSETAVERINSTDRIEQELLLQVLSVGKLYNPDVRYSFNIPIEDKPQQFYWNSHGPWQACSKPCQGERKRKLVCTRESDQLTVSDQRCDRLPQPGHITEPCGTDCDLRWHVASRSECSAQCGLGYRTLDIYCAKYSRLDGKTEKVDDGFCSSHPKPSNREKCSGECNTGGWRYSAWTECSKSCDGGTQRRRAICVNTRNDVLDDSKCTHQEKVTIQRCSEFPCPQWKSGDWSEVRWEGCYFP

SEQ ID NO: 1028137 - protein, 88 aa, Homo sapiens
SKARETCTVETQRVTGRFQMIQDILKILPNHKENHQAKSEVGSLDMYWFSLAIDSQFLDIEICWLEILVPKEECLQKEMEQCFCCIGH

SEQ ID NO: 1028138 - protein, 153 aa, Homo sapiens
GCYRGFQTVKHRNENTCPLPQEMKALFKKKTYDEKKTYDQQKFDSERADGTISSEIKSARGSHHLSIYAENSLKSDGYHKRTDRKSRIIAKNVSTSKPEFEFTTLDFPELQGAENNMSEIQKQPKWGPVHSVSTDISLLREVVKPAAVLSKVR

SEQ ID NO: 1028139 - protein, 647 aa, Homo sapiens
GCYRGFQTVKHRNENTCPLPQEMKALFKKKTYDEKKTYDQQKFDSERADGTISSEIKSARGSHHLSIYAENSLKSDGYHKRTDRKSRIIAKNVSTSKPEFEFTTLDFPELQGAENNMSEIQKQPKWGPVHSVSTDISLLREVVKPAAVLSKGEIVVKNNPNESVTANAATNSPSCTRELSWTPMGYVVRQTLSTELSAAPKNVTSMINLKTIASSADPKNVSIPSSEALSSDPSYNKEKHIIHPTQKSKASQGSDLEQNEASRKNKKKKEKSTSKYEVLTVQEPPRIEDAEEFPNLAVASERRDRIETPKFQSKQQPQDNFKNNVKKSQLPVQLDLGGMLTALEKKQHSQHAKQSSKPVVVSVGAVPVLSKECASGERGRRMSQMKTPHNPLDSSAPLMKKGKQREIPKAKKPTSLKKIILKERQERKQRLQENAVSPAFTSDDTQDGESGGDDQFPEQAELSGPEGMDELISTPSVEDKSEEPPGTELQRDTEASHLAPNHTTFPKIHSRRFRDYCSQMLSKEVDACVTDLLKELVRFQDRMYQKDPVKAKTKRRLVLGLREVLKHLKLKKLKCVIISPNCEKIQSKGGLDDTLHTIIDYACEQNIPFVFALNRKALGRSLNKAVPVSVVGIFSYDGAQDQFTQDG

SEQ ID NO: 1028140 - protein, 464 aa, Homo sapiens
MGYVVRQTLSTELSAAPKNVTSMINLKTIASSADPKNVSIPSSEALSSDPSYNKEKHIIHPTQKSKASQGSDLEQNEASRKNKKKKEKSTSKYEVLTVQEPPRIEDAEEFPNLAVASERRDRIETPKFQSKQQPQDNFKNNVKKSQLPVQLDLGGMLTALEKKQHSQHAKQSSKPVVVSVGAVPVLSKECASGERGRRMSQMKTPHNPLDSSAPLMKKGKQREIPKAKKPTSLKKIILKERQERKQRLQENAVSPAFTSDDTQDGESGGDDQFPEQAELSGPEGMDELISTPSVEDKSEEPPGTELQRDTEASHLAPNHTTFPKIHSRRFRDYCSQMLSKEVDACVTDLLKELVRFQDRMYQKDPVKAKTKRRLVLGLREVLKHLKLKKLKCVIISPNCEKIQSKGGLDDTLHTIIDYACEQNIPFVFALNRKALGRSLNKAVPVSVVGIFSYDGAQDQFTQDG

SEQ ID NO: 1028141 - protein, 309 aa, Homo sapiens
MLTALEKKQHSQHAKQSSKPVVVSVGAVPVLSKECASGERGRRMSQMKTPHNPLDSSAPLMKKGKQREIPKAKKPTSLKKIILKERQERKQRLQENAVSPAFTSDDTQDGESGGDDQFPEQAELSGPEGMDELISTPSVEDKSEEPPGTELQRDTEASHLAPNHTTFPKIHSRRFRDYCSQMLSKEVDACVTDLLKELVRFQDRMYQKDPVKAKTKRRLVLGLREVLKHLKLKKLKCVIISPNCEKIQSKGGLDDTLHTIIDYACEQNIPFVFALNRKALGRSLNKAVPVSVVGIFSYDGAQDQFTQDG

SEQ ID NO: 1028142 - protein, 418 aa, Homo sapiens
DPKSDSSAKRKPFILPKKSKASQGSDLEQNEASRKNKKKKEKSTSKYEVLTVQEPPRIEDAEEFPNLAVASERRDRIETPKFQSKQQPQDNFKNNVKKSQLPVQLDLGGMLTALEKKQHSQHAKQSSKPVVVSVGAVPVLSKECASGERGRRMSQMKTPHNPLDSSAPLMKKGKQREIPKAKKPTSLKKIILKERQERKQRLQENAVSPAFTSDDTQDGESGGDDQFPEQAELSGPEGMDELISTPSVEDKSEEPPGTELQRDTEASHLAPNHTTFPKIHSRRFRDYCSQMLSKEVDACVTDLLKELVRFQDRMYQKDPVKAKTKRRLVLGLREVLKHLKLKKLKCVIISPNCEKIQSKGGLDDTLHTIIDYACEQNIPFVFALNRKALGRSLNKAVPVSVVGIFSYDGAQDQFTQDG

SEQ ID NO: 1028143 - protein, 534 aa, Homo sapiens
GCYRGFQTVKHRNENTCPLPQEMKALFKKKTYDEKKTYDQQKFDSERADGTISSEIKSARGSHHLSIYAENSLKSDGYHKRTDRKSRIIAKNVSTSKPEFEFTTLDFPELQGAENNMSEIQKQPKWGPVHSVSTDISLLREVVKPAAVLSKGEIVVKNNPNESVTANAATNSPSCTRELSWTPMGYVVRQTLSTELSAAPKNVTSMINLKTIASSADPKNVSIPSSEALSSDPSYNKEKHIIHPTQKSKASQGSDLEQNEASRKNKKKKEKSTSKYEVLTVQEPPRIEDAEEFPNLAVASERRDRIETPKFQSKQQPQDNFKNNVKKSQLPVQLDLGGMLTALEKKQHSQHAKQSSKPVVVSVGAVPVLSKECASGERGRRMSQMKTPHNPLDSSAPLMKKGKQREIPKAKKPTSLKKIILKERQERKQRLQENAVSPAFTSDDTQDGESGGDDQFPEQAELSGPEGMDELISTPSVEDKSEEPPGTELQRDTEASHLAPNHTTFPKIHSRRFRDYCSQMLSKEVDACVTDLLK

SEQ ID NO: 1028144 - protein, 171 aa, Homo sapiens
MGLSVVLKLSSVLGLHADIVAPQAGPRSRPSPLFSHLGAASLVPTHKHEVHITPCHPCFSVEVAIAEFEGPVSSVAGMLPVCSHLCPKISLHKMVELTVAARQAYKTMLENVQQELVGEPRPQAPPSLPTQGPSCPAEDGPPALKEKEEPHYSECLRESCVRSSVLLFTDL

SEQ ID NO: 1028145 - protein, 309 aa, Homo sapiens; identical to SEQ ID NO: 1028141

SEQ ID NO: 1028146 - protein, 467 aa, Homo sapiens
MPLPILLHVQALSTELSAAPKNVTSMINLKTIASSADPKNVSIPSSEALSSDPSYNKEKHIIHPTQKSKASQGSDLEQNEASRKNKKKKEKSTSKYEVLTVQEPPRIEDAEEFPNLAVASERRDRIETPKFQSKQQPQDNFKNNVKKSQLPVQLDLGGMLTALEKKQHSQHAKQSSKPVVVSVGAVPVLSKECASGERGRRMSQMKTPHNPLDSSAPLMKKGKQREIPKAKKPTSLKKIILKERQERKQRLQENAVSPAFTSDDTQDGESGGDDQFPEQAELSGPEGMDELISTPSVEDKSEEPPGTELQRDTEASHLAPNHTTFPKIHSRRFRDYCSQMLSKEVDACVTDLLKELVRFQDRMYQKDPVKAKTKRRLVLGLREVLKHLKLKKLKCVIISPNCEKIQSKGGLDDTLHTIIDYACEQNIPFVFALNRKALGRSLNKAVPVSVVGIFSYDGAQDQFTQDG

SEQ ID NO: 1028147 - protein, 103 aa, Homo sapiens
MMGPRISLHKMVELTVAARQAYKTMLENVQQELVGEPRPQAPPSLPTQGPSCPAEDGPPALKEKEEPHYIEIWKKHLEAYSGCTLELEESLEASTSQMMNLNL

SEQ ID NO: 1028148 - protein, 311 aa, Homo sapiens
GCYRGFQTVKHRNENTCPLPQEMKALFKKKTYDEKKTYDQQKFDSERADGTISSEIKSARGSHHLSIYAENSLKSDGYHKRTDRKSRIIAKNVSTSKPEFEFTTLDFPELQGAENNMSEIQKQPKWGPVHSVSTDISLLREVVKPAAVLSKGEIVVKNNPNESVTANAATNSPSCTRELSWTPMGYVVRQTLSTELSAAPKNVTSMINLKTIASSADPKNVSIPSSEALSSDPSYNKEKHIIHPTQKSKASQGSDLEQNEASRKNKKKKEKSTSKYEVLTVQEPPRIEDAEEFPNLAVASERLWGFFFCFS

SEQ ID NO: 1028149 - protein, 99 aa, Homo sapiens
SLSAPWDVSSLSVYEETVLSPPLYLGPRLPLPSGFTLNSQVQQTIALRYACSKLGINFDSFVACMIRLETLFKLFSLLDEDKDGMVQLSLAEWLCCVLV

SEQ ID NO: 1028150 - protein, 140 aa, Homo sapiens
SSQEKEICKACRIWTQSCWSLMCLEQRVLGTLGAVEFKTLWLKIQKYLEIYWETDYNHSGTIDAHEMRTALRKAGFTLNSQVQQTIALRYACSKLGINFDSFVACMIRLETLFKLFSLLDEDKDGMVQLSLAEWLCCVLV

SEQ ID NO: 1028151 - protein, 247 aa, Homo sapiens
  misc_feature (100)..(100): Xaa can be any naturally occurring amino acid
MRTALRKAGFTLNSQVQQTIALRYACSKLGINFDSFVACMIRLETLFKLFSLLDEDKDGMVQLSLAERLRCMSPDPGLQISFFFPAPLTATWHPHFFFLXHTCSSDIHWLPDPPPPATPPPALSPEVCTPDPPGPKDAQPQTTDASPRTPYPLFCNNTTESYPPHRLDDAHSPPHHTPRVPSSRPLDPPPYAPPHSATTPHPPRPPYPQYHLRHPPHPTRQAHTAARTRQNTHPAAAQIERTPEAPT

SEQ ID NO: 1028152 - protein, 82 aa, Homo sapiens
MEDMNEYSNIEEFAEGSKINASKNQQDDGKMFIGGLSWDTSKKDLTEYLARFGEVVDCTSDAASADVLELREHRLDGQLRVP

SEQ ID NO: 1028153 - protein, 344 aa, Homo sapiens
  misc_feature (235)..(235): Xaa can be any naturally occurring amino acid
RRAAEAAAEAAAGEPGGAERAAGTSRRRGLRACDEEFACPELEALFRGYTLRLEQAATLKALAVLSLLAGALALAELLGAPGPAPGLAKGSHPVHCVLFLALLVVTNVRSLQVPQLQQVGQLALLFSLTFALLCCPFALGGPPGGSAGAAGGPATAEQGVWQLLLVTFVSYALLPVRSLLAIGFGLVVAASHLLVTATLVPAKRPRLWRTLGANALLFGGVTMYGGLGGILTERXQRKGSLQARSCIEGPMRLEDENEKQERRPHEASCPGRLPGDFTGDVLKPLGRISPRFYFRGGTCWSSGGGHDGVTAVGSHVRARRGWEELQDDMRERVDNTGDNKGHQT

SEQ ID NO: 1028154 - protein, 184 aa, Homo sapiens
  misc_feature (12)..(12): Xaa can be any naturally occurring amino acid
DDACRARLGLGXVRPGARGSYGDGKRGPRRRLTGVGPGGGGVEQQYAKGGKGSAVPSDSQAREKLALYVYEYLLHIGAQKSAQTFLSEIRWEKNIMPSPGDSTNSSENMYTIMNPIGQGAGRANFPLGPGPEGRMAAMSTMEPHHVNGSLGSGDMDGLPKSSPGAVAALSNAPGTPRDDGEMAA

SEQ ID NO: 1028155 - protein, 257 aa, Homo sapiens
PDTISLVCPGNSYDKPDQMAALFKRLSSVDSVLKRMTIIGVILSFRSLAQEALRDVLSYHIPFLVSSIEDFKDHIPRETDMKVAMNVYELSSAAGLPCEIDPALVVALSSQKSENISPEEEYKIACLLMVFVAVSLPTLASNVMSQYSPAIEGHCNNIHCLAKAINQIAAALFTIHKGSIEDRLKEFLALASSSLLKIGQETDKTTTRNRESVYLLLDMIVQESPFLTMDLLESCFPYVLLRNAYHAVYKQSVTSSA

SEQ ID NO: 1028156 - protein, 430 aa, Homo sapiens
MTSHLEIRFTKSIVGMTMYNQATQEIAKPSELLTSVRAYMTVLQSIENYVQIDITRVFNNVLLQQTQHLDSHGEPTITSLYTNWYLETLLRQVSNGHIAYFPAMKAFVNLPTENELTFNAEEYSDISEMRSLSELLGPYGMKFLSESLMWHISSQVAELKKLVVENVDVLTQMRTSFDKPDQMAALFKRLSSVDSVLKRMTIIGVILSFRSLAQEALRDVETITSIYSVLSYHIPFLVSSIEDFKDHIPRETDMKVAMNVYELSSAAGLPCEIDPALVVALSSQKSENISPEEEYKIACLLMVFVAVSLPTLASNVMSQYSPAIEGHCNNIHCLAKAINQIAAALFTIHKGSIEDRLKEFLALASSSLLKIGQETDKTTTRNRESVYLLLDMIVQESPFLTMDLLESCFPYVLLRNAYHAVYKQSVTSSA

SEQ ID NO: 1028157 - protein, 235 aa, Homo sapiens
FFQCLHEIVNLFKLNVWTVDYLMQAVEKDPTHHIKKYRAVFAQGKGVAWPKAATFNEQQSIPVTTAEQWARKTLQSIENRMTFTLYVRVKSENISPEEEYKIACLLMVFVAVSLPTLASNVMSQYSPAIEGHCNNIHCLAKAINQIAAALFTIHKGSIEDRLKEFLALASSSLLKIGQETDKTTTRNRESVYLLLDMIVQESPFLTMDLLESCFPYVLLRNAYHAVYKQSVTSSA

SEQ ID NO: 1028158 - protein, 421 aa, Homo sapiens
MTSHLEIRFTKSIVGMTMYNQATQEIAKPSELLTSVRAYMTVLQSIENYVQIDITRVFNNVLLQQTQHLDSHGEPTITSLYTNWYLETLLRQVSNGHIAYFPAMKAFVNLPTENELTFNAEEYSDISEMRSLSELLGPYGMKFLSESLMWHISSQVAELKKLVVENVDVLTQMRTSFDKPDQMAALFKRLSSVDSVLKRMTIIGVILSFRSLAQEALRDVLSYHIPFLVSSIEDFKDHIPRETDMKVAMNVYELSSAAGLPCEIDPALVVALSSQKSENISPEEEYKIACLLMVFVAVSLPTLASNVMSQYSPAIEGHCNNIHCLAKAINQIAAALFTIHKGSIEDRLKEFLALASSSLLKIGQETDKTTTRNRESVYLLLDMIVQESPFLTMDLLESCFPYVLLRNAYHAVYKQSVTSSA

SEQ ID NO: 1028159 - protein, 421 aa, Homo sapiens; identical to SEQ ID NO: 1028158

SEQ ID NO: 1028160 - protein, 421 aa, Homo sapiens; identical to SEQ ID NO: 1028158

SEQ ID NO: 1028161 - protein, 249 aa, Homo sapiens
MRTSFDKPDQMAALFKRLSSVDSVLKRMTIIGVILSFRSLAQEALRDVLSYHIPFLVSSIEDFKDHIPRETDMKVAMNVYELSSAAGLPCEIDPALVVALSSQKSENISPEEEYKIACLLMVFVAVSLPTLASNVMSQYSPAIEGHCNNIHCLAKAINQIAAALFTIHKGSIEDRLKEFLALASSSLLKIGQETDKTTTRNRESVYLLLDMIVQESPFLTMDLLESCFPYVLLRNAYHAVYKQSVTSSA

SEQ ID NO: 1028162 - protein, 238 aa, Homo sapiens
AEAIRGSPLVCKCLEEVTIIGVILSFRSLAQEALRDVLSYHIPFLVSSIEDFKDHIPRETDMKVAMNVYELSSAAGLPCEIDPALVVALSSQKSENISPEEEYKIACLLMVFVAVSLPTLASNVMSQYSPAIEGHCNNIHCLAKAINQIAAALFTIHKGSIEDRLKEFLALASSSLLKIGQETDKTTTRNRESVYLLLDMIVQESPFLTMDLLESCFPYVLLRNAYHAVYKQSVTSSA

SEQ ID NO: 1028163 - protein, 272 aa, Homo sapiens
KEIKRGHKQMEKIFHAHGKEDINIMKMAILSKVIHRFNAMPIKLPLPFFTELEKKYFKFHMDAKKDPTHHIKKYRAVFAQGKGVAWPKAATFNEQQSIPVTTAEQWARKTLQSIENRMTFTLYDRVKSENISPEEEYKIACLLMVFVAVSLPTLASNVMSQYSPAIEGHCNNIHCLAKAINQIAAALFTIHKGSIEDRLKEFLALASSSLLKIGQETDKTTTRNRESVYLLLDMIVQESPFLTMDLLESCFPYVLLRNAYHAVYKQSVTSSA

SEQ ID NO: 1028164 - protein, 421 aa, Homo sapiens; identical to SEQ ID NO: 1028158

SEQ ID NO: 1028165 - protein, 440 aa, Homo sapiens
SINYSNMVVWEHTFTPREYLTSHLEIRFTKSIVGMTMYNQATQEIAKPSELLTSVRAYMTVLQSIENYVQIDITRVFNNVLLQQTQHLDSHGEPTITSLYTNWYLETLLRQVSNGHIAYFPAMKAFVNLPTENELTFNAEEYSDISEMRSLSELLGPYGMKFLSESLMWHISSQVAELKKLVVENVDVLTQMRTSFDKPDQMAALFKRLSSVDSVLKRMTIIGVILSFRSLAQEALRDVLSYHIPFLVSSIEDFKDHIPRETDMKVAMNVYELSSAAGLPCEIDPALVVALSSQKSENISPEEEYKIACLLMVFVAVSLPTLASNVMSQYSPAIEGHCNNIHCLAKAINQIAAALFTIHKGSIEDRLKEFLALASSSLLKIGQETDKTTTRNRESVYLLLDMIVQESPFLTMDLLESCFPYVLLRNAYHAVYKQSVTSSA

SEQ ID NO: 1028166 - protein, 362 aa, Homo sapiens
MVSRVKHGYRLAGKYCSPVNCGDSLGVISGQECQLWIRSARPSLVSPGLFAECDVIVSCTRSHLLGAGDITELTRFCDDTRHLETTKVLEDLHQTELGPVLVLAAKWASIRIGTGKVCQGSQPLPAVPPQNIPKRTDVKSQDVAVSPQQQQCSKSYVDRHMESLSQSKSSRRRHNSWSSSSRHPNQATPKKSGLKNGQMKNKDDECFGDDIEEIPDTDFDFEGNLALFDKAAVFEEIDTYERRSGTRSRGIPNERPTRYRHDENILESEPIVYRRIIVPHNVSKEFCTDSGLVVPSISYELHKKLLSVAEKHGWDWSLPSSLAWAFPRGIKEKYDSSVFSSFQGHPAHSTQFPRGPQSRGEA

SEQ ID NO: 1028167 - protein, 523 aa, Homo sapiens
MVSRVKHGYRLAGKYCSPVNCGDSLGVISGQECQLWIRSARPSLVSPGLFAECDVIVSCTRSHLLGAGDITELTRFCDDTRHLETTKVLEDLHQTELGPVLVLAAKWASIRIGTGKVCQGSQPLPAVPPQNIPKRTDVKSQDVAVSPQQQQCSKSYVDRHMESLSQSKSSRRRHNSWSSSSRHPNQATPKKSGLKNGQMKNKDDECFGDDIEEIPDTDFDFEGNLALFDKAAVFEEIDTYERRSGTRSRGIPNERPTRYRHDENILESEPIVYRRIIVPHNVSKEFCTDSGLVVPSISYELHKKLLSVAEKHGLTLERRLEMTGVCASQMALTLLGGPNRLNPKNVHQRPTVALLCGPHVKGAQGISCGRHLANHDVQVILFLPNFVKMLESITNELSLFSKTQGQQVSSLKDLPTSPVDLVINCLDCPENVFLRDQPWYKAAVAWANQNRAPVLSIDPPVHEVEQGIDAKWSLALGLPLPLGEHAGRIYLCDIGIPQQVFQEVGINYHSPFGCKFVIPLHSA

SEQ ID NO: 1028168 - protein, 339 aa, Homo sapiens
MVSRVKHGYRLAGKYCSPVNCGDSLGVISGQECQLWIRSARPSLVSPGLFAECDVIVSCTRSHLLGAGDITELTRFCDDTRHLETTKVLEDLHQTELGPVLVLAAKWASIRIGTGKVCQGSQPLPAVPPQNIPKRTDVKSQDVAVSPQQQQCSKSYVDRHMESLSQSKSSRRRHNSWSSSSRHPNQATPKKSGLKNGQMKNKDDECFGDDIEEIPDTDFDFEGNLALFDKAAVFEEIDTYERRSGTRSRGIPNERPTRYRHDENILESEPIVYRRIIVPHNVSKEFCTDSGLVVPSISYELHCYPTALCLEGSCAGRTLLSPAAPDNKRLKDMKLHGPC

SEQ ID NO: 1028169 - protein, 523 aa, Homo sapiens; identical to SEQ ID NO: 1028167

SEQ ID NO: 1028170 - protein, 523 aa, Homo sapiens; identical to SEQ ID NO: 1028167

SEQ ID NO: 1028171 - protein, 97 aa, Homo sapiens
SFTVRTDTGEPMGRGTKVILHLKEDQTEYLEERRIKEIVKKHSQFIGYPITLFVEKERDKEVSDDEAEEKEDKEEEKEIEEEESEAVWRYRRSIRIC

SEQ ID NO: 1028172 - protein, 91 aa, Homo sapiens
SFTVRTDTGEPMGRGTKVILHLKEDQTEYLEERRIKEIVKKHSQFIGYPITLFVEKERDKEVSDDEAEEIGRQRTRIGKRTERVVRHYRGR

SEQ ID NO: 1028173 - protein, 100 aa, Homo sapiens
SFTVRTDTGEPMGRGTKVILHLKEDQTEYLEERRIKEIVKKHSQFIGYPITLFVEKERDKEVSDDEAEETGKHPSTARHKKQQAAKSRQDKPAHCTACPV

SEQ ID NO: 1028174 - protein, 75 aa, Homo sapiens
MSSAPNRVWDINKLRNVLHKSQFIGYPITLFVEKERDKEVSDDEAEEKEDKEEEKEIEEEESEAVWRYRRSIRIC

SEQ ID NO: 1028175 - protein, 110 aa, Homo sapiens
MMASGWSVELLERLDPAHIWKELAPQCLPTSQQGAHYPQKELLRTHDAGPVLDYRIFSSLAPRLPVERVEPAITETEHRPRVPLPDLDVCLQSTHQLCPSLDRDIFVVLR

SEQ ID NO: 1028176 - protein, 147 aa, Homo sapiens
MARGLMKAPPFPPCAFLAGREGEKGSPDLHPSLLHLPWSVHLQAAHSSPPLDTHLPRHNSLPHAHICQELAPQPLPTSHHAAYYPHRELLLTHAAPPALPYSIFSSLAPRLPVERVEPAITETEHRPRVPLPDLDVASRARTSSVPL

SEQ ID NO: 1028177 - protein, 341 aa, Homo sapiens
SSEPNDARVRASGPGAPGRSSRGAVWVGAWRWARAAAGTSPLPRAAPARDRGDAKQRVRDVYDYFRAVLQRDERSERAFKLTRDAIELNAANYTVWHFRRVLLKSLQKDLHEEMNYITAIIEEQPKNYQVWHHRRVLVEWLRDPSQELELLLIFLIRMQRIIMPGSIDNGLFRNLNFGDNELQYVDQLLKEDVRNNSVWNQRYFVISNTTGYNDRAVLEREVQYTLEMIKLVPHNESAWNYLKGILQDRGLSKYPNLLNQLLDLQPSHSSPYLIAFLVDIYEDMLENQCDNKEDILNKALELCEILAKEKDTIRKEYWRYIGRSLQSKHSTENDSPTNVQQ

SEQ ID NO: 1028178 - protein, 341 aa, Homo sapiens
MAAEAGEAVASPMDDGFVSLDSPSYVLYRDRAEWADIDPVPQNDEPNPVVQIIYSDKFRDVYDYFRAVLQRDERSERAFKLTRDAIELNAANYTVWHFRRVLLKSLQKDLHEEMNYITAIIEEQPKNYQVWHHRRVLVEWLRDPSQELEFIADILNQDAKNYHAWQHRQWVIQDLNFGDNELQYVDQLLKEDVRNNSVWNQRYFVISNTTGYNDRAVLEREVQYTLEMIKLVPHNESAWNYLKGILQDRGLSKYPNLLNQLLDLQPSHSSPYLIAFLVDIYEDMLENQCDNKEDILNKALELCEILAKEKDTIRKEYWRYIGRSLQSKHSTENDSPTNVQQ

SEQ ID NO: 1028179 - protein, 341 aa, Homo sapiens; identical to SEQ ID NO: 1028178

SEQ ID NO: 1028180 - protein, 179 aa, Homo sapiens
MAAEAGEAVASPMDDGFVSLDSPSYVLYRDRAEWADIDPVPQNDEPNPVVQIIYSDKFRDVYDYFRAVLQRDERSERAFKLTRDAIELNAANYTVWHFRRVLLKSLQKDLHEEMNYITAIIEEQPKNYQVWHHRRVLVEWLRDPSQELEFIADILNQDAKNYHAWQHRQWVIQEFKLWG

SEQ ID NO: 1028181 - protein, 341 aa, Homo sapiens; identical to SEQ ID NO: 1028178

SEQ ID NO: 1028182 - protein, 364 aa, Homo sapiens
RGGSATTSAADRGEMAATEGVGEAAQGGEPGQPAQPPPQPHPPSPQQQHKEEMAAEAGEAVASPMDDGFVSLDSPSYVLSVRDVYDYFRAVLQRDERSERAFKLTRDAIELNAANYTVWHFRRVLLKSLQKDLHEEMNYITAIIEEQPKNYQVWHHRRVLVEWLRDPSQELEFIADILNQDAKNYHAWQHRQWVIQDLNFGDNELQYVDQLLKEDVRNNSVWNQRYFVISNTTGYNDRAVLEREVQYTLEMIKLVPHNESAWNYLKGILQDRGLSKYPNLLNQLLDLQPSHSSPYLIAFLVDIYEDMLENQCDNKEDILNKALELCEILAKEKDTIRKEYWRYIGRSLQSKHSTENDSPTNVQQ

SEQ ID NO: 1028183 - protein, 332 aa, Homo sapiens
MAAEAGEAVASPMDDGFVSLDSPSYVLYRDRAEWADIDPVPQNDEPNPVVQIIYSDKFRDVYDYFRAVLQRDERSERAFKLTRDAIELNAANYTVWHFRRVLLKSLQKDLHEEMNYITAIIEEQPKNYQVWHHRRVLVEWLRDPSQELEFIADILNQDAKNYHAWQHRQWVIQDLNFGDNELQYVDQLLKEDVRNNSVWNQRYFVISNTTGYNDRAVLEREVQYTLEMIKLVPHNESAWNYLKGILQDRGLSKYRYVLNPGVDVQPSHSAARPDELLSEDMYGDRIGYHYDKKVDMIKSGSYENMSDTIVQDNNTMSEGELDRPQVDPGRAN

SEQ ID NO: 1028184 - protein, 183 aa, Homo sapiens
RGGSATTSAADRGEMAATEGVGEAAQGGEPGQPAQPPPQPHPPSPQQQHKEEMAAEAGEAVASPMDDGFVSLDSPSYVLSVRDVYDYFRAVLQRDERSERAFKLTRDAIELNAANYTVWHFRRVLLKSLQKDLHEEMNYITAIIEEQPKNYQVWHHRRVLVEWLRDPSQRNDVCCTCMGLDTI

SEQ ID NO: 1028185 - protein, 356 aa, Homo sapiens
MPILKQLVSSSVHSKRRSRADLTAEMISAPLGTFRHTMHVGRAGDAFGDTSFLNSKAGEPDGESLDEQPSSSSSKRSLLSRKFRGSKRSQSVTRGEREQRDMLGSLRDSALFVKNAMSLPQLNEKEAAEKGTSKLPKSLSSSPVKKANDGEGGDEEAGTEEAVPRRNGAAGPHSPDPLLDEQAFGDLTDLPVVPKATYGLKHAESIMSFHIDLGPSMLGDVLSIMDKEEWDPEEGEGGYHGDEGAAGTITQAPPYAVAAPPLARQEGKAGPDLPSLPSHALEDEGWATAAPSPGSTRSMGSHTTRDSSSLSSCTSGILEERSPAFRGPDRARAAVSRQPPDKEFSFMDEEEEDEIV

SEQ ID NO: 1028186 - protein, 356 aa, Homo sapiens
MPILKQLVSSSVHSKRRSRADLTAEMISAPLGDFRHTMHVGRAGDAFGDTSFLNSKAGEPDGESLDEQPSSSSSKRSLLSRKFRGSKRSQSVTRGEREQRDMLGSLRDSALFVKNAMSLPQLNEKEAAEKGTSKLPKSLSSSPVKKANDGEGGDEEAGTEEAVPRRNGAAGPHSPDPLLDEQAFGDLTDLPVVPKATYGLKHAESIMSFHIDLGPSMLGDVLSIMDKEEWDPEEGEGGYHGDEGAAGTITQAPPYAVAAPPLARQEGKAGPDLPSLPSHALEDEGWAAAAPSPGSARSMGSHTTRDSSSLSSCTSGILEERSPAFRGPDRARAAVSRQPDKEFSFMDEEEEDEIRV

SEQ ID NO: 1028187 - protein, 356 aa, Homo sapiens; identical to SEQ ID NO: 1028185

SEQ ID NO: 1028188 - protein, 294 aa, Homo sapiens
MRDASIKGRAQPYDPNFYDETYDYGGFTMMFDDRRGRPVGFPMRGRGGFDRMPPGRGGRPMPPSRRDYDDMSPRRGPPPPPPGRGGRGGSRARNLPLPHTHTQLEGENSMGYDRREGDLETVYDGMVGFSADETWDSAIDTWSPSEWQMAYEPQGGSGYDYSYAGGRGSYGDLGGPIITTQVTIPKDLAGSIIGKGGQRIKQIRHESGASIKIDEPLEGSEDRIITITGTQDQITECTVFAAEQGLKPGILEKVFLTTSAHTEAGLALFNLAAVKKHNLLAKGSPLGWELVVPI

SEQ ID NO: 1028189 - protein, 254 aa, Homo sapiens
MRDASIKGRAQPYDPNFYDETYDYGGFTMMFDDRRGRPVGFPMRGRGGFDRMPPGRGGRPMPPSRRDYDDMSPRRGPPPPPPGRGGRGGSRARNLPLPHTHTQLEGENSMGYDRREGDLETVYDGMVGFSADETWDSAIDTWSPSEWQMAYEPQGGSGYDYSYAGGRGSYGDLGGPIITTQVTIPKDLAGSIIGKGGQRIKQIRHESGASIKIDEPLEGSEDRIITITGTQDQITECTVFAAEQCEAVCRCEGF

SEQ ID NO: 1028190 - protein, 254 aa, Homo sapiens
MRDASIKGRAQPYDPNFYDETYDYGGFTMMFDDRRGRPVGFPMRGRGGFDRMPPGRGGRPMPPSRRDYDDMSPRRGPPPPPPGRGGRGGSRARNLPLPHTHTQLEGENSMGYDRREGDLETVYDGMVGFSADETWDSAIDTWSPSEWQMAYEPQGGSGYDYSYAGGRGSYGDLGGPIITTQVTIPKDLAGSIIGKGGQRIKQIRHESGASIKIDEPLEGSEDRIITITGTQDQITECTVFAAEQSVKQYSGKFF

SEQ ID NO: 1028191 - protein, 252 aa, Homo sapiens
MRDASIKGRAQPYDPNFYDETYDYGGFTMMFDDRRGRPVGFPMRGRGGFDRMPPGRGGRPMPPSRRDYDDMSPRRGPPPPPPGRGGRGGSRARNLPLPHTHTQLEGENSMGYDRREGDLETVYDGMVGFSADETWDSAIDTWSPSEWQMAYEPQGGSGYDYSYAGGRGSYGDLGGPIITTQVTIPKDLAGSIIGKGGQRIKQIRHESGASIKIDEPLEGSEDRIITITGTHHHAWLIFCSFCRGGRRWKVRL

SEQ ID NO: 1028192 - protein, 254 aa, Homo sapiens; identical to SEQ ID NO: 1028190

SEQ ID NO: 1028193 - protein, 187 aa, Homo sapiens
ATQPRPPARAQATQGGREGQARTLGPAAPTVDSNLSSEARPVTSFLSLSQVSGPQLPGEGEEEEEGEDDGAPGDEAASEDSEEAAGPALGRWREDAIDWQRTFSVGAVDFELLRSDWNDLRCNVSGNLQLPEAEAVDVTAQYMERLNARHGGRFALLRIVNVEKRRDSARGSRFLLELELQERGGGR

SEQ ID NO: 1028194 - protein, 112 aa, Homo sapiens
MGLGSLVCPQSCPDPGGGGWKVDLPAGPTWRGRCCAAEPAASANSKSAEFLWPGRTQGCGRGAGWKPQYRLTAEPCRRFALLRIVNVEKRRDSARGSRFLLELELQERGGGR

SEQ ID NO: 1028195 - protein, 217 aa, Homo sapiens
MPRLPVKKIRKQMKLLLLLLLLSCAAWLTYVHLGLVRQGRALRQRLGYGRDGEKLTSETDGRGVHAVPSTQRAEDSSESREEEQAPEGRDLDMLFPGGAGRLPLNFTHQTPPWREEYKGQVNLHVFEDWCGGAVGGRRGLRAAALGLERPAMQRFGEPAAAGGGGRGRDRSVHGAAERAPRRALRASAHRERGEAPGLGARESLPAGAGAAGARGRP

SEQ ID NO: 1028196 - protein, 465 aa, Homo sapiens
MPRLPVKKIRKQMKLLLLLLLLSCAAWLTYVHLGLVRQGRALRQRLGYGRDGEKLTSETDGRGVHAVPSTQRAEDSSESREEEQAPEGRDLDMLFPGGAGRLPLNFTHQTPPWREEYKGQVNLHVFEDWCGGAVGHLRRNLHFPLFPHTRTTVKKLAVSPKWKNYGLRIFGFIHPARDGDVQFSVASDDNSEFWLSLDESPAAAQPCGLLWGKTGSEWTAPGEFTKFSSQVSKPRRLMASRRYYFELLHKQDDRGSDHVEVGWRAFLPGLKFEVISSAHISLYTDESALKMDHVAHVPQSPASHVGGRPPQEETSADMLRPDPRDTFFLTPRMESSSLENVLEPCAYAPTYVVKDFPIARYQGLQFVYLSFVYPNDYTRLTHMETDNKCFYRESPLYLERFGFYKYMKMDKEEGDEDEEDEVQRRAFLFLNPDDFLDDEDEGELLDSLEPTEAAPPRSGPQIHGC

SEQ ID NO: 1028197 - protein, 177 aa, Homo sapiens
ATQPRPPARAQATQGGREGQARTLGPAAPTVDSNLSSEARPVTSFLSLSQVSGPQLPGEGEEEEEGEDDGAPGDEAASEDSEEAAGPALGRWREDAIDWQRTFSVGAVDFELLRSDWNDLRCNVSGNLQLPEAEAVDVTAQYMERLNARHGGYGGGRTRARAVLEAGTAGEMEVLAL

SEQ ID NO: 1028198 - protein, 122 aa, Homo sapiens
MPRLPVKKIRKQMKLLLLLLLLSCAAWLTYVHLGLVRQGRALRQRLGYGRDGEKLTSETDGRGVHAVPSTQRAEDSSESREEEQAPEGRDLDMLFPGGAGRLPLNFTHQTPPWREEVSWLGL

SEQ ID NO: 1028199 - protein, 489 aa, Homo sapiens
MPRLPVKKIRKQMKLLLLLLLLSCAAWLTYVHLGLVRQGRALRQRLGYGRDGEKLTSETDGRGVHAVPSTQRAEDSSESREEEQAPEGRDLDMLFPGGAGRLPLNFTHQTPPWREEYKGQVNLHVFEDWCGGAVGHLRRNLHFPLFPHTRTTVKKLAVSPKWKNYGLRIFGFIHPARDGDVQFSVASDDNSEFWLSLDESPAAAQPCGLLWGKTGSEWTAPGEFTKFSSQVSKPRRLMASRRYYFELLHKQDDRGSDHVEVGWRAFLPGLKFEVISSAHISLYTDESALKMDHVAHVPQSPASHVGGRPPQEETSADMLRPDPRDTFFLSERGPARGRGQGCLPQPPCDPPPAAPRMESSSLENVLEPCAYAPTYVVKDFPIARYQGLQFVYLSFVYPNDYTRLTHMETDNKCFYRESPLYLERFGFYKYMKMDKEEGDEDEEDEVQRRAFLFLNPDDFLDDEDEGELLDSLEPTEAAPPRSGPQIHGC

SEQ ID NO: 1028200 - protein, 941 aa, Homo sapiens [sequence omitted]

SEQ ID NO: 1028201 - protein, 112 aa, Homo sapiens
KILYHLQGAGNPQLGIPPGPWQFLRKNWNKLVQKFELGSSSIAHMVMGTTNQFSTRTRLEEVKGFFSSLKENGSQLRCVQQTIETIEENIGWMDKNFDKIRVWLQSEKLERM

SEQ ID NO: 1028202 - protein, 66 aa, Homo sapiens
GRVGRPTRPGEHAAVLVVVSAATQAGPGGGAVGESAKAAEVRGRGVEGPRELGEKGVNPQDPTCRD

SEQ ID NO: 1028203 - protein, 114 aa, Homo sapiens
MLASDYNFPVLSRFRNANRSFGLHFYFLPSVPSLSNYMLIEQAGGPQSRPESLWGLLHLVGITGLISTLHGALIEVLFIFFMLIGLFLDWILPVIPAINSYKLWTQNFHDTFSK

SEQ ID NO: 1028204 - protein, 111 aa, Homo sapiens
MAASSSSSSAGGVSGSSVTGSGFSVSDLAPPRKALFTYPKGAGEMLEDDGSERFLCESVFSYQVASTLKQVKHDQQVARMEKLAGLVEELEADEWRFKPIEQLLGFTPSSG

SEQ ID NO: 1028205 - protein, 111 aa, Homo sapiens; identical to SEQ ID NO: 1028204

SEQ ID NO: 1028206 - protein, 111 aa, Homo sapiens; identical to SEQ ID NO: 1028204

SEQ ID NO: 1028207 - protein, 111 aa, Homo sapiens; identical to SEQ ID NO: 1028204

SEQ ID NO: 1028208 - protein, 111 aa, Homo sapiens; identical to SEQ ID NO: 1028204

SEQ ID NO: 1028209 - protein, 111 aa, Homo sapiens; identical to SEQ ID NO: 1028204

SEQ ID NO: 1028210 - protein, 114 aa, Homo sapiens; identical to SEQ ID NO: 1028203

SEQ ID NO: 1028211 - protein, 111 aa, Homo sapiens; identical to SEQ ID NO: 1028204

SEQ ID NO: 1028212 - protein, 83 aa, Homo sapiens
TPPSPLAPSVGGRTRRGPRRDGSERFLCESVFSYQVASTLKQVKHDQQVARMEKLAGLVEELEADEWRFKPIEQLLGFTPSSG

SEQ ID NO: 1028213 - protein, 68 aa, Homo sapiens
GRVGRPTRPGEHAAVLVVVSAATQAGPGGGAVGESAKAAEVQWLTPVIPALWEAKAGGSPEVGSSRPA

SEQ ID NO: 1028214 - protein, 75 aa, Homo sapiens
DAAFAAGSVCWGANTPRSSSCEVRTLLERKWLLHHHPPQLVGSVEVLSLDLVSVSQTLPHHGKPFSPTPKELERC

SEQ ID NO: 1028215 - protein, 166 aa, Homo sapiens
MAASSSSSSAGGVSGSSVTGSGFSVSDLAPPRKALFTYPKGAGEMLEDDGSERFLCESVFSYQVASTLKQVKHDQQVARMEKLAGHRAAAGIHPLFRLILPGWSPLVRSKCKASGGLSHSLHSHPEIHSYVTELLMHICTWFLCIYSQATNTYMCDLSGNVLFICF

SEQ ID NO: 1028216 - protein, 155 aa, Homo sapiens
MAASSSSSSAGGVSGSSVTGSGFSVSDLAPPRKALFTYPKGAGEMLEDDGSERFLCESVFSYQVASTLKQVKHDQQVARMEKLAGCGRRAGWSPLWRSKCKASGGLSHSLHSHPEIHSYVTELLMHICTWFLCIYSQATNTYMCDLSGNVLFICF

SEQ ID NO: 1028217 - protein, 111 aa, Homo sapiens; identical to SEQ ID NO: 1028204

SEQ ID NO: 1028218 - protein, 66 aa, Homo sapiens; identical to SEQ ID NO: 1028202

SEQ ID NO: 1028219 - protein, 114 aa, Homo sapiens; identical to SEQ ID NO: 1028203

SEQ ID NO: 1028220 - protein, 111 aa, Homo sapiens; identical to SEQ ID NO: 1028204

SEQ ID NO: 1028221 - protein, 111 aa, Homo sapiens; identical to SEQ ID NO: 1028204

SEQ ID NO: 1028222 - protein, 111 aa, Homo sapiens; identical to SEQ ID NO: 1028204

SEQ ID NO: 1028223 - protein, 111 aa, Homo sapiens; identical to SEQ ID NO: 1028204

SEQ ID NO: 1028224 - protein, 111 aa, Homo sapiens; identical to SEQ ID NO: 1028204

SEQ ID NO: 1028225 - protein, 111 aa, Homo sapiens; identical to SEQ ID NO: 1028204

SEQ ID NO: 1028226 - protein, 68 aa, Homo sapiens; identical to SEQ ID NO: 1028213

SEQ ID NO: 1028227 - protein, 111 aa, Homo sapiens; identical to SEQ ID NO: 1028204

SEQ ID NO: 1028228 - protein, 71 aa, Homo sapiens
GRRLRRWLRLLGGEHAAVLVVVSAATQAGPGGGAVGESAKAAEVQWLTPVIPALWEAKAGGSPEVGSSRPA

SEQ ID NO: 1028229 - protein, 68 aa, Homo sapiens; identical to SEQ ID NO: 1028213

SEQ ID NO: 1028230 - protein, 251 aa, Homo sapiens
ERTDEAKMSFLVTLNNVEVCSENISTLKKTLESDCTKLFSQGIGGEQAQAKFDSCLSDLAAVSNKFRDLLQEGLTELNSTAIKPQVQPWINSFFSVSHNIEEEEFNDYEANDPWVQQFILNLEQQMAEFKASLSPVIYDSLTGLMTSLVAVELEKVVLKSTFNRLGGLQFDKELRSLIAYLTTVTTWTIRDKFARLSQMATILNLERVTEILDYWGPNSGPLTWRLTPAEVRQVLALRIDFRSEDIKRLRL

SEQ ID NO: 1028231 - protein, 251 aa, Homo sapiens; identical to SEQ ID NO: 1028230

SEQ ID NO: 1028232 - protein, 223 aa, Homo sapiens
ERTDEAKMSFLVTLNNVEVCSENISTLKKTLESDCTKLFSQGIGGEQAQAKFDSCLSDLAAVSNKFRDLLQEGLTELNSTAIKPQVQPWINSFFSVSHNIEEASLSPVIYDSLTGLMTSLVAVELEKVVLKSTFNRLGGLQFDKELRSLIAYLTTVTTWTIRDKFARLSQMATILNLERVTEILDYWGPNSGPLTWRLTPAEVRQVLALRIDFRSEDIKRLRL

SEQ ID NO: 1028233 - protein, 139 aa, Homo sapiens
PRPPLWQSLLRGEGIGESTLGIYRYMALQHPTEVTLAHQKWIHNLKTLTERPVHDYRSVATKLNGKGPEIAMVQGLEKEPEVMQRWMETRFQGGMTGLRRMSEHSRKHRSRYGTENALSVEPVHLRNWYSYSLITDVSG

SEQ ID NO: 1028234 - protein, 54 aa, Homo sapiens
MAQYPCDDLGVVSSLNKDTNGGDQVEHCRYEGSEEITPGPVDEWYLGVQVTHVD

SEQ ID NO: 1028235 - protein, 275 aa, Homo sapiens
  misc_feature (4)..(4): Xaa can be any naturally occurring amino acid
  misc_feature (175)..(175): Xaa can be any naturally occurring amino acid
  misc_feature (179)..(179): Xaa can be any naturally occurring amino acid
MREXVHIQAGQCGNQIGAKFWEVISDEHGIDPTGSYYWRQLFAAGENQCLLSMKLLVTNMFLGPSWWIWSLAPWIRLGLARAILVDLEPGTMDSVLFRSGPFGQIFRPDNFVFGQSGAGNNWAKGHYTEGAELVDSVLDVVRKESESCDCLQGFQLTHSLGGGTGSGMGTLLISXIREXYPDRIMNTFSVMPSPKVSDTVVEPYNATLSVHQLVENTDETYCIDNEALYDICFRTLKLTTPTYGDLNHLVSATMSGVTTCLRFPGQLNADLRNWR

SEQ ID NO: 1028236 - protein, 254 aa, Homo sapiens
  misc_feature (4)..(4): Xaa can be any naturally occurring amino acid
  misc_feature (154)..(154): Xaa can be any naturally occurring amino acid
  misc_feature (158)..(158): Xaa can be any naturally occurring amino acid
MREXVHIQAGQCGNQIGAKFWEVISDEHGIDPTGSYYGDIDLQLERINVYYNEAAGNKYVPRAILVDLEPGTMDSVRSGPFGQIFRPDNFVFGQSGAGNNWAKGHYTEGAELVDSVLDVVRKESESCDCLQGFQLTHSLGGGTGSGMGTLLISXIREXYPDRIMNTFSVMPSPKVSDTVVEPYNATLSVHQLVENTDETYCIDNEALYDICFRTLKLTTPTYGDLNHLVSATMSGVTTCLRFPGQLNADLRNWR

SEQ ID NO: 1028237 - protein, 75 aa, Homo sapiens
  misc_feature (3)..(3): Xaa can be any naturally occurring amino acid
  misc_feature (39)..(40): Xaa can be any naturally occurring amino acid
  misc_feature (42)..(44): Xaa can be any naturally occurring amino acid
  misc_feature (46)..(47): Xaa can be any naturally occurring amino acid
  misc_feature (49)..(50): Xaa can be any naturally occurring amino acid
  misc_feature (53)..(53): Xaa can be any naturally occurring amino acid
  misc_feature (56)..(57): Xaa can be any naturally occurring amino acid
  misc_feature (62)..(62): Xaa can be any naturally occurring amino acid
  misc_feature (66)..(69): Xaa can be any naturally occurring amino acid
KIXTLRDGTEDLSLVLAVPKHVSQEQDLLGEGGQGPAEXXPXXXSXXRXXCVXSWXXRDFGXGVWXXXXSQTKTI

SEQ ID NO: 1028238 - protein, 530 aa, Homo sapiens
MAKGEGAESGSAAGLLPTSILQSTERPAQVKKEPKKKKQQLSVCNKLCYALGGAPYQVTGCALGFFLQIYLLDVAQVGPFSASIILFVGRAWDAITDPLVGLCISKSPWTCLGRLMPWIIFSTPLAVIAYFLIWFVPDFPHGQTYWYLLFYCLFETMVTCFHVPYSALTMFISTEQTERDSATAYRMTVEVLGTVLGTAIQGQIVGQADTPCFQDLNSSTVASQSANHTHGTTSHRETQKAYLLAAGVIVCIYIICAVILILGVREQREPYEAQQSEPIAYFRGLRLVMSHGPYIKLITGFLFTSLAFMLVEGNFVLFCTYTLGFRNEFQNLLLAIMLSATLTIPIWQWFLTRFGKKTAVYVGISSAVPFLILVALMESNLIITYAVAVAAGISVAAAFLLPWSMLPDVIDDFHLKQPHFHGTEPIFFSFYVFFTKFASGVSLGISTLSLDFAGYQTRGCSQPERVKFTLNMLVTMAPIVLILLGLLLFKMYPIDEERRRQNKKALQALRDEASSSGCSETDSTELASIL

SEQ ID NO: 1028239 - protein, 121 aa, Homo sapiens
VTRRRSRALLRMLPGDGLCPGFLPSDLPIGCGSGGPFLCLHHPVCGPSLGCHHRPPGGPLHQQIPLDLPGSPYALVSRICPFEVAQGRTSSISAPWSFSLSCHRQKGEEKEGVKSPRVLKP

SEQ ID NO: 1028240 - protein, 500 aa, Homo sapiens
TTGAPAPAVFSVASNLASIAILVVSIYRGGTLNSRRNKKLQQLIFAVGPFSASIILFVGRAWDAITDPLVGLCISKSPWTCLGRLMPWIIFSTPLAVIAYFLIWFVPDFPHGQTYWYLLFYCLFETMVTCFHVPYSALTMFISTEQTERDSATAYRMTVEVLGTVLGTAIQGQIVGQADTPCFQDLNSSTVASQSANHTHGTTSHRETQKAYLLAAGVIVCIYIICAVILILGVREQREPYEAQQSEPIAYFRGLRLVMSHGPYIKLITGFLFTSLAFMLVEGNFVLFCTYTLGFRNEFQNLLLAIMLSATLTIPIWQWFLTRFGKKTAVYVGISSAVPFLILVALMESNLIITYAVAVAAGISVAAAFLLPWSMLPDVIDDFHLKQPHFHGTEPIFFSFYVFFTKFASGVSLGISTLSLDFAGYQTRGCSQPERVKFTLNMLVTMAPIVLILLGLLLFKMYPIDEERRRQNKKALQALRDEASSSGCSETDSTELASIL

SEQ ID NO: 1028241 - protein, 530 aa, Homo sapiens; identical to SEQ ID NO: 1028238

SEQ ID NO: 1028242 - protein, 725 aa, Homo sapiens
GAAECVPRLPAGLASARRPWLRLLRSELGRSSGLRGRGASRLPGPKRRGPRVMAKGEGAESGSAAGLLPTSILQSTERPAQVKKEPKKKKQQLSVCNKLCYALGGAPYQVTGCALGFFLQIYLLDVAQVGPFSASIILFVGRAWDAITDPLVGLCISKSPWTCLGRLMPWIIFSTPLAVIAYFLIWFVPDFPHGQTYWYLLFYCLFETMVTCFHVPYSALTMFISTEQTERDSATAYRMTVEVLGTVLGTAIQGQIVGQADTPCFQDLNSSTVASQSANHTHGTTSHRETQKAYLLAAGVIVCIYIICAVILILGVREQREPYEAQQSEPIAYFRGLRLVMSHGPYIKLITGFLFTSLAFMLVEGNFVLFCTYTLGFRNEFQNLLLAIMLSATLTIPIWQWFLTRFGKKTAVYVGISSAVPFLILVALMESNLIITYAVAVAAGISVAAAFLLPWEVYTGPPPRVSPAPSPQFCSSLGRVLCSVLPQAILWVQVRSGGGLSCTVVQVVSFARTPSRMKNGGCNLAWAPLATLSTSKQGYFLLEQEAFSYSCEGPISSLSCVPMVLASFQRGHLFLIKHRGPVRWGSVLMGCSLLLAAGSMLPDVIDDFHLKQPHFHGTEPIFFSFYVFFTKFASGVSLGISTLSLDFAGYQTRGCSQPERVKFTLNMLVTMAPIVLILLGLLLFKMYPIDEERRRQNKKALQALRDEASSSGCSETDSTELASIL

SEQ ID NO: 1028243 - protein, 662 aa, Homo sapiens
GAAECVPRLPAGLASARRPWLRLLRSELGRSSGLRGRGASRLPGPKRRGPRVMAKGEGAESGSAAGLLPTSILQSTERPAQVKKEPKKKKQQLSVCNKLCYALGGAPYQVTGCALGFFLQIYLLDVAQVGPFSASIILFVGRAWDAITDPLVGLCISKSPWTCLGRLMPWIIFSTPLAVIAYFLIWFVPDFPHGQTYWYLLFYCLFETMVTCFHVPYSALTMFISTEQTERDSATAYRMTVEVLGTVLGTAIQGQIVGQADTPCFQDLNSSTVASQSANHTHGTTSHRETQKAYLLAAGVIVCIYIICAVILILGVREQREPYEAQQSEPIAYFRGLRLVMSHGPYIKLITGFLFTSLAFMLVEGNFVLFCTYTLGFRNEFQNLLLAIMLSATLTIPIWQWFLTRFGKKTAVYVGISSAVPFLILVALMESNLIITYAVAVAAGISVAAAFLLPWSMLPDVIDDFHLKQPHFHGTEPIFFSFYVFFTKFASGVSLGISTLSLDFAGYQTRGCSQPERVKFTLNMLVTMAPIVLILLGLLLFKMYPIDEERRRQNKKALQALGTRPAALAAQKQTPQSWLASSRARHVARSHHAEGHRRDQDLSAGLLSSWTAGARKGTEDSRRWPRTLAVLTVGPAALWPPASPLPACGAKPWGCHCEYAKD

SEQ ID NO: 1028244 - protein, 236 aa, Homo sapiens
RSSRGSQPSALLAFMLVEGNFVLFCTYTLGFRNEFQNLLLAIMLSATLTIPIWQWFLTRFGKKTAVYVGISSAVPFLILVALMESNLIITYAVAVAAGISVAAAFLLPWSMLPDVIDDFHLKQPHFHGTEPIFFSFYVFFTKFASGVSLGISTLSLDFAGYQTRGCSQPERVKFTLNMLVTMAPIVLILLGLLLFKMYPIDEERRRQNKKALQALRDEASSSGCSETDSTELASIL

SEQ ID NO: 1028245 - protein, 154 aa, Homo sapiens
MESNLIITYAVAVAAGISVAAAFLLPWSMLPDVIDDFHLKQPHFHGTEPIFFSFYVFFTKFASGVSLGISTLSLDFAGYQTRGCSQPERVKFTLNMLVTMAPIVLILLGLLLFKMYPIDEERRRQNKKALQALRDEASSSGCSETDSTELASIL

SEQ ID NO: 1028246 - protein, 460 aa, Homo sapiens
GAAECVPRLPAGLASARRPWLRLLRSELGRSSGLRGRGASRLPGPKRRGPRVMAKGEGAESGSAAGLLPTSILQSTERPAQVKKEPKKKKQQLSVCNKLCYALGGAPYQVTGCALGFFLQIYLLDVAQVGPFSASIILFVGRAWDAITDPLVGLCISKSPWTCLGRLMPWIIFSTPLAVIAYFLIWFVPDFPHGQTYWYLLFYCLFETMVTCFHVPYSALTMFISTEQTERDSATAYRMTVEVLGTVLGTAIQGQIVGQADTPCFQDLNSSTVASQSANHTHGTTSHRETQKAYLLAAGVIVCIYIICAVILILGVREQREPYEAQQSEPIAYFRGLRLVMSHGPYIKLITGFLFTSLAFMLVEGNFVLFCTYTLGFRNEFQNLLLAIMLSATLTIPIWQWFLTRFGKKTAVYVGISSAVPFLILVALMESNLIITYAVAVGSGIRVEAASYNLVKLLMS

SEQ ID NO: 1028247 - protein, 154 aa, Homo sapiens; identical to SEQ ID NO: 1028245

SEQ ID NO: 1028248 - protein, 223 aa, Homo sapiens
GAAECVPRLPAGLASARRPWLRLLRSELGRSSGLRGRGASRLPGPKRRGPRVMAKGEGAESGSAAGLLPTSILQSTERPAQVKVRARHPAWRARGGRRRKWGIRGVPGSAWSGDHWDSQGQEAYEPERTWGCPGTGGDGEKLWAPSPPFAHPHSTLCGEALPAAPCDSPLCLAGFHSSVLSGWGLPPQTPEMTPEIWETPLGSPSLIPYLPLHPPTLAPQLCC

SEQ ID NO: 1028249 - protein, 613 aa, Homo sapiens
GAAECVPRLPAGLASARRPWLRLLRSELGRSSGLRGRGASRLPGPKRRGPRVMAKGEGAESGSAAGLLPTSILQSTERPAQVKKEPKKKKQQLSVCNKLCYALGGAPYQVTGCALGFFLQIYLLDVAQVGPFSASIILFVGRAWDAITDPLVGLCISKSPWTCLGRLMPWIIFSTPLAVIAYFLIWFVPDFPHGQTYWYLLFYCLFETMVTCFHVPYSALTMFISTEQTERDSATAYRMTVEVLGTVLGTAIQGQIVGQADTPCFQDLNSSTVASQSANHTHGTTSHRETQKAYLLAAGVIVCIYIICAVILILGVREQREPYEAQQSEPIAYFRGLRLVMSHGPYIKLITGFLFTSLAFMLVEGNFVLFCTYTLGFRNEFQNLLLAIMLSATLTIPIWQWFLTRFGKKTAVYVGISVSGVEEQSLGGVGMSGGNLPADSSSCTPFPESAVPFLILVALMESNLIITYAVAVAAGISVAAAFLLPWSMLPDVIDDFHLKQPHFHGTEPIFFSFYVFFTKFASGVSLGISTLSLDFAGYQTRGCSQPERVKFTLNMLVTMAPIVLILLGLLLFKMYPIDEERRRQNKKALQALRDEASSSGCSETDSTELASIL

SEQ ID NO: 1028250 - protein, 427 aa, Homo sapiens
GAAECVPRLPAGLASARRPWLRLLRSELGRSSGLRGRGASRLPGPKRRGPRVMAKGEGAESGSAAGLLPTSILQSTERPAQVKKEPKKKKQQLSVCNKLCYALGGAPYQVTGCALGFFLQIYLLDVAQVGPFSASIILFVGRAWDAITDPLVGLCISKSPWTCLGRLMPWIIFSTPLAVIAYFLIWFVPDFPHGQTYWYLLFYCLFETMVTCFHVPYSALTMFISTEQTERDSATAYRMTVEVLGTVLGTAIQGQIVGQADTPCFQDLNSSTVASQSANHTHGTTSHRETQKAYLLAAGVIVCIYIICAVILILGVREQREPYEAQQSEPIAYFRGLRLVMSHGPYIKLITGFLFTSLAFMLVEGNFVLFCTYTLGFRNEFQNLLLAIMLSATLTIPIWQWFLTRFGKKTAVYVGISVSGVEEQSLG

SEQ ID NO: 1028251 - protein, 590 aa, Homo sapiens
GAAECVPRLPAGLASARRPWLRLLRSELGRSSGLRGRGASRLPGPKRRGPRVMAKGEGAESGSAAGLLPTSILQSTERPAQVKKEPKKKKQQLSVCNKLCYALGGAPYQVTGCALGFFLQIYLLDVAQVGPFSASIILFVGRAWDAITDPLVGLCISKSPWTCLGRLMPWIIFSTPLAVIAYFLIWFVPDFPHGQTYWYLLFYCLFETMVTCFHVPYSALTMFISTEQTERDSATAYRMTVEVLGTVLGTAIQGQIVGQADTPCFQDLNSSTVASQSANHTHGTTSHRETQKAYLLAAGVIVCIYIICAVILILGVREQREPYEAQQSEPIAYFRGLRLVMSHGPYIKLITGFLFTSLAFMLVEGNFVLFCTYTLGFRNEFQNLLLAIMLSATLTIPIWQWFLTRFGKKTAVYVGISSAVPFLILVALMESNLIITYAVAVAAGISVAAAFLLPWSMLPDVIDDFHLKQPHFHGTEPIFFSFYVFFTKFASGVSLGISTLSLDFAGYQTRGCSQPERVKFTLNMLVTMAPIVLILLGLLLFKMYPIDEERRRQNKKALQALRDEASSSGCSVASCLPSACLWGQALGLPL

SEQ ID NO: 1028252 - protein, 455 aa, Homo sapiens
GAAECVPRLPAGLASARRPWLRLLRSELGRSSGLRGRGASRLPGPKRRGPRVMAKGEGAESGSAAGLLPTSILQSTERPAQVKKEPKKKKQQLSVCNKLCYALGGAPYQVTGCALGFFLQIYLLDVAQVGPFSASIILFVGRAWDAITDPLVGLCISKSPWTCLGRLMPWIIFSTPLAVIAYFLIWFVPDFPHGQTYWYLLFYCLFETMVTCFHVPYSALTMFISTEQTERDSATAYRMTVEVLGTVLGTAIQGQIVGQADTPCFQDLNSSTVASQSANHTHGTTSHRETQKAYLLAAGVIVCIYIICAVILILGVREQREPYEAQQSEPIAYFRGLRLVMSHGPYIKLITGFLFTSLAFMLVEGNFVLFCTYTLGFRNEFQNLLLAIMLSATLTIPIWQWFLTRFGKKTAVYVGISSAVPFLILVALMESNLIITYAVAVAAGISVAAAFLLPW

SEQ ID NO: 1028253 - protein, 447 aa, Homo sapiens
GAAECVPRLPAGLASARRPWLRLLRSELGRSSGLRGRGASRLPGPKRRGPRVMAKGEGAESGSAAGLLPTSILQSTERPAQVKKEPKKKKQQLSVCNKLCYALGGAPYQVTGCALGFFLQIYLLDVAQVGPFSASIILFVGRAWDAITDPLVGLCISKSPWTCLGRLMPWIIFSTPLAVIAYFLIWFVPDFPHGQTYWYLLFYCLFETMVTCFHVPYSALTMFISTEQTERDSATAYRMTVEVLGTVLGTAIQGQIVGQADTPCFQDLNSSTVASQSANHTHGTTSHRETQKAYLLAAGVIVCIYIICAVILILGVREQREPYEAQQSEPIAYFRGLRLVMSHGPYIKLITGFLFTSLAFMLVEGNFVLFCTYTLGFRNEFQNLLLAIMLSATLTIPIWQWFLTRFGKKTAVYVGISSAVPFLILVALMEVGLLQMEVVNDIRQHGP

SEQ ID NO: 1028254 - protein, 114 aa, Homo sapiens [sequence omitted]

SEQ ID NO: 1028255 - protein, 203 aa, Homo sapiens
MALLRSGRVLPGIVLRLPPGPRRRGALPEPAPGGPMWRMGPPDPILGVTEAFKRDTKSIKMNLGVGAYRDDNGKPYVLAYASARQRPRLPQKHLDKEYLPIGGLAEFCKASAELALGENSEVLKSGRFVTVQNHFWNWSLNGSEPSLLQRFYKFSRDVFLPKATWGNHTPIFRDAGMQLQGYRYYDPRLAVLTSPGACGGYIK

SEQ ID NO: 1028256 - protein, 339 aa, Homo sapiens
MESKVSEGGLNVTLTIRLLMHGKEVGSIIGKKGETVKKMREESGARINISEGNCPERIVTITGPTDAIFKAFAMIAYKFEEDIINSMSNSPATSKPPVTLRLVVPASQCGSLIGKGGSKIKEIRESTGAQVQVAGDMLPNSTERAVTISGTPDAIIQCVKQICVVMLESPPKGATIPYRPKPASTPVIFAGGQAYTIQGQYAIPHPDQLTKLHQLAMQQTPFPPLGQTNPAFPGEKLPLHSSEEAQNLMGQSSGLDASPPASTHELTIPNDLIGCIIGRQGTKINEIRQMSGAQIKIANATEGSSERQITITGTPANISLAQYLINARLTSEVTGMGTL

SEQ ID NO: 1028257 - protein, 313 aa, Homo sapiens
MESKVSEGGLNVTLTIRLLMHGKEVGSIIGKKGETVKKMREESGARINISEGNCPERIVTITGPTDAIFKAFAMIAYKFEEDIINSMSNSPATSKPPVTLRLVVPASQCGSLIGKGGSKIKEIRESTGAQVQVAGDMLPNSTERAVTISGTPDAIIQCVKQICVVMLEAYTIQGQYAIPHPDLTKLHQLAMQQTPFPPLGQTNPAFPGEKLPLHSSEEAQNLMGQSSGLDASPPASTHELTIPNDLIGCIIGRQGTKINEIRQMSGAQIKIANATEGSSERQITITGTPANISLAQYLINARLTSEVTGMGTL

SEQ ID NO: 1028258 - protein, 89 aa, Homo sapiens
RHAGVSQSPLSKRTGPLCLVSRLSNEIAFFFSVAPKLSYPLGAQGSKTSSFKKEPCPRLVKQKPRSLKGRAIDNFRVDRALNLLRKERN

SEQ ID NO: 1028259 - protein, 82 aa, Homo sapiens
  misc_feature (43)..(43): Xaa can be any naturally occurring amino acid
RAHISPLISLREVMDGSQLRVHVGNAVRQTIHLGFANHSYHIXGCYKQAPPWIENSGSAPLVKGRAQMCGGEQFNLLRKERN

SEQ ID NO: 1028260 - protein, 111 aa, Homo sapiens
  misc_feature (82)..(82): Xaa can be any naturally occurring amino acid
MEYDSALEELAEVVITTVRWYAGSLRKRRRENERDLMVCYMYGRAGPQSGYVVVYDVVQQLRESWIVSIVSVSRSSEDKIIXRALRYERDQRSEVYGRSYICGILRFASVG

SEQ ID NO: 1028261 - protein, 134 aa, Homo sapiens
ARARRIRTRRLVDLSSPVCTLRMIRCVRAGRIKVMWGGVIIGRVVRIIDCGGRPGGRSCNVRFPCGFDAGLTQLLNVVAAEPMDLTGGEECGSYYVVVMDGYNVSVGRPALKRERFTLQFVNKRVRAAVTRIGE

SEQ ID NO: 1028262 - protein, 89 aa, Homo sapiens
  misc_feature (86)..(86): Xaa can be any naturally occurring amino acid
LNRTIDVCGARGGVIGDRPACDPRETVVYEQIAAVTASVELVHPERPNKVATGAQWTSDDDAKRTSLVGSWCGVRKHGGEKEAVEXNKT

SEQ ID NO: 1028263 - protein, 119 aa, Homo sapiens
MIEVGGGVQSGDEAANKADEVYTMIVVCTLGERWYKSFIWGVSLLSMSRPMVRGWAGHDVEEEGDRRRLMMDVLLSGVYWVWGEEEVEKWSQCWVKKERNNFGLRYQESKISLWHFGLG

SEQ ID NO: 1028264 - protein, 231 aa, Homo sapiens
RGRVSGRVDEDTYASYLEPVAHDAARLADRTHNHLRGGVGRRCQGAGGRSQDPRAGVYSDNETNRKSTIGLRVVTPIGPRTALGVCVCYIGGDAIATVSRRAGGPALSRRAPARRNFSGVQPRSDRYFRGGGGARARNWARGRNGAVRSHGHTTAWRGEASCDQVCYGSYTGGSVIMSIGHSRLLETRRRDTVMMSIHLFPFCFQRDGSCYRCANSYVFFRDHASFQCIVK

SEQ ID NO: 1028265 - protein, 68 aa, Homo sapiens
TGFQGTVSLESGDSPMADCKTDAGAVGLIILNKSLFAVSRLRRVPQFCYGCPYCGISYIALSRVKRVA

SEQ ID NO: 1028266 - protein, 157 aa, Homo sapiens
PGDTRSHGRRTFMRGREPLVCAVTRATAIPRNPSHQRPPASRGARGSHILGHISSLAPPDRADARANTPPPRSPPRARLGASSTHVYYREAVQHYTNGTASSIRVRRASRAHRRASPRRSGPPPLPPPGVFQPLGAILKYASRALDIILRASLAQPP

SEQ ID NO: 1028267 - protein, 140 aa, Homo sapiens
  misc_feature (31)..(31): Xaa can be any naturally occurring amino acid
YFLQAQGAKVKGSKGAVRLGPQGKEGEGPRXSRGWVFYGGKMTRSLRGQMEKLRICGSAVLMGCVCPQKYSPKEDKYEEEINLLEEKLKEAETRAEFAERSVAKLEKTIDDLEEPLASAKEENVEIHQTLDQTLVELNNL

SEQ ID NO: 1028268 - protein, 138 aa, Homo sapiens
QLKEAKHIVEYSGRKYEEVARKLVILEGELERSEERSEVSDSRAKQLEEDLRIVDEALKSLKAPEEEYSPKEDKYEEEINLLEEKLKEAETRAEFAERSVAKLEKTIDDLEEPLASAKEENVEIHQTLDQTLVELNNL

SEQ ID NO: 1028269 - protein, 230 aa, Homo sapiens
QPAGSPVSCPRACVAPVPVAPVPVAPLPPLTMGPGPRLLLPLVLCVGLGALVFSSGAEGFRKRGPSVTAKVFFDVRIGDKDVGRIVIGLFGKVVPKTVENFVALATGEKGYGYKGSKFHRVIKDFMIQGGDITTGDGTGGVSIYGETFPDENFKLKHYGIGWVSMANAGPDTNGSQFFITLTKPTWLDGKHVVFGKVIDGMTVVHSIELQATDGHDRPLTNCSIIQQLAR

SEQ ID NO: 1028270 - protein, 263 aa, Homo sapiens
  misc_feature (171)..(171): Xaa can be any naturally occurring amino acid
  misc_feature (173)..(173): Xaa can be any naturally occurring amino acid
  misc_feature (176)..(176): Xaa can be any naturally occurring amino acid
  misc_feature (179)..(180): Xaa can be any naturally occurring amino acid
  misc_feature (184)..(185): Xaa can be any naturally occurring amino acid
  misc_feature (188)..(192): Xaa can be any naturally occurring amino acid
  misc_feature (195)..(195): Xaa can be any naturally occurring amino acid
  misc_feature (198)..(198): Xaa can be any naturally occurring amino acid
  misc_feature (200)..(200): Xaa can be any naturally occurring amino acid
  misc_feature (204)..(204): Xaa can be any naturally occurring amino acid
  misc_feature (209)..(209): Xaa can be any naturally occurring amino acid
  misc_feature (211)..(211): Xaa can be any naturally occurring amino acid
  misc_feature (216)..(217): Xaa can be any naturally occurring amino acid
  misc_feature (219)..(220): Xaa can be any naturally occurring amino acid
  misc_feature (222)..(223): Xaa can be any naturally occurring amino acid
  misc_feature (225)..(225): Xaa can be any naturally occurring amino acid
  misc_feature (229)..(229): Xaa can be any naturally occurring amino acid
  misc_feature (232)..(233): Xaa can be any naturally occurring amino acid
  misc_feature (236)..(239): Xaa can be any naturally occurring amino acid
  misc_feature (242)..(242): Xaa can be any naturally occurring amino acid
  misc_feature (245)..(251): Xaa can be any naturally occurring amino acid
  misc_feature (253)..(255): Xaa can be any naturally occurring amino acid
  misc_feature (257)..(260): Xaa can be any naturally occurring amino acid
QPAGSPVSCPRACVAPVPVAPVPVAPLPPLTMGPGPRLLLPLVLCVGLGALVFSSGAEGFRKRGPSVTAKVFFDVRIGDKDVGRIVIGLFGKVVPKTVENFVALATGEKGYGYKGSKFHRVIKDFMIQGGDITTGDGTGGVSIYGETFPDENFKLKHYGIGWVRLGPGGGXRXGCXLFXXLAPXXWLXXXXXCLXRAXWXRVLXASLLXAXLGLRXXCXXAXXCXISRXLVXXVLXXXXVHXSRXXXXXXXGXXXVXXXXYMM

SEQ ID NO: 1028271 - protein, 375 aa, Homo sapiens
QPAGSPVSCPRACVAPVPVAPVPVAPLPPLTMGPGPRLLLPLVLCVGLGALVFSSGAEGFRKRGPSVTAKVFFDVRIGDKDVGRIVIGLFGKVVPKTVENFVALATGEVCLNFISFKLGLLSLKPNIKMSSEKISIKLVCQMNLTTFDFIFQLNMYYLGTQCPEASGNWEKIIIKGKYGLLSFNLFTLILYFHNIFIFWSANDKFLSVNHSWDIIKFCRHLFEFSQFVLSRSTLSLSFSMASVTCYSTEAISLKGYGYKGSKFHRVIKDFMIQGGDITTGDGTGGVSIYGETFPDENFKLKHYGIGWVSMANAGPDTNGSQFFITLTKPTWLDGKHVVFGKVIDGMTVVHSIELQATDGHDRPLTNCSIIQQLAR

SEQ ID NO: 1028272 - protein, 214 aa, Homo sapiens
MVIAVALAISWSSRSAGISPPIRMARGAPGRSDEGPECCPELSSLSSIRQESHVESSSDSDYRPRSGRIVIGLFGKVVPKTVENFVALATGEKGYGYKGSKFHRVIKDFMIQGGDITTGDGTGGVSIYGETFPDENFKLKHYGIGWVSMANAGPDTNGSQFFITLTKPTWLDGKHVVFGKVIDGMTVVHSIELQATDGHDRPLTNCSIIQQLAR

SEQ ID NO: 1028273 - protein, 239 aa, Homo sapiens
QPAGSPVSCPRACVAPVPVAPVPVAPLPPLTMGPGPRLLLPLVLCVGLGALVFSSGAEGFRKRGPSVTAKVFFDVRIGDKDVGRIVIGLFGKVVPKTVENFVALATGEVKPVYEPSLLKSRAKEHSCKDDCTSLRRMEFGDSSSSISTGVSIYGETFPDENFKLKHYGIGWVSMANAGPDTNGSQFFITLTKPTWLDGKHVVFGKVIDGMTVVHSIELQATDGHDRPLTNCSIIQQLAR

SEQ ID NO: 1028274 - protein, 183 aa, Homo sapiens
  misc_feature (3)..(3): Xaa can be any naturally occurring amino acid
  misc_feature (24)..(24): Xaa can be any naturally occurring amino acid
  misc_feature (26)..(26): Xaa can be any naturally occurring amino acid
  misc_feature (29)..(29): Xaa can be any naturally occurring amino acid
  misc_feature (38)..(38): Xaa can be any naturally occurring amino acid
  misc_feature (49)..(49): Xaa can be any naturally occurring amino acid
  misc_feature (52)..(52): Xaa can be any naturally occurring amino acid
  misc_feature (55)..(55): Xaa can be any naturally occurring amino acid
  misc_feature (72)..(72): Xaa can be any naturally occurring amino acid
  misc_feature (77)..(77): Xaa can be any naturally occurring amino acid
  misc_feature (87)..(87): Xaa can be any naturally occurring amino acid
  misc_feature (91)..(91): Xaa can be any naturally occurring amino acid
MNXDKLRFADGSIRTSELRLSMQXSXENXAAVFRVGSXLQEGCGKISKXYGXVKXRKTFDRGMGGNTGLPEXPDPQXLMLCARQTIXGGEXRKESRGAHAREDYKSNKKRDGVSGIQVRIDEYDYSKPIQRLQKKPYEEHWRKHTLSYVDVGTGKVTLEYRPVIDKTLNEADCATVPPAIRSY

SEQ ID NO: 1028275 - protein, 212 aa, Homo sapiens
  misc_feature (3)..(3): Xaa can be any naturally occurring amino acid
  misc_feature (24)..(24): Xaa can be any naturally occurring amino acid
  misc_feature (26)..(26): Xaa can be any naturally occurring amino acid
  misc_feature (29)..(29): Xaa can be any naturally occurring amino acid
  misc_feature (38)..(38): Xaa can be any naturally occurring amino acid
  misc_feature (49)..(49): Xaa can be any naturally occurring amino acid
  misc_feature (52)..(52): Xaa can be any naturally occurring amino acid
  misc_feature (55)..(55): Xaa can be any naturally occurring amino acid
  misc_feature (72)..(72): Xaa can be any naturally occurring amino acid
  misc_feature (77)..(77): Xaa can be any naturally occurring amino acid
  misc_feature (87)..(87): Xaa can be any naturally occurring amino acid
  misc_feature (91)..(91): Xaa can be any naturally occurring amino acid
MNXDKLRFADGSIRTSELRLSMQXSXENXAAVFRVGSXLQEGCGKISKXYGXVKXRKTFDRGMGGNTGLPEXPDPQXLMLCARQTIXGGEXRKESRGAHAREDYKVRIDEYDYSKPIQRLQKKPYEEHWRKHTLSYVDVGTGKVTLEYRPVIDKTLNEADCATAPASHSLLLMRQDVVMTESAFVIMYNSSCMCPCHNCLHTLLHSGEEGVH

SEQ ID NO: 1028276 - protein, 125 aa, Homo sapiens
MLTEVMEVWHGLVIAVVSLFLQACFLTAINYLLSRHMDDSDTPSDSLDSSCSSPPACQATEDVDYTQVVFSDPGELKNDSPLDYENIKEITDYVNVNPEKTQAQFSGILATLLWLSQAEYEQGGM

SEQ ID NO: 1028277 - protein, 173 aa, Homo sapiens
MLTEVMEVWHGLVIAVVSLFLQACFLTAINYLLSRHMAHKSEQILKAASLQVPRPSPGHHHPPAVKEMKETQTERDIPMSDSLYRHDSDTPSDSLDSSCSSPPACQATEDVDYTQVVFSDPGELKNDSPLDYENIKEITDYVKCQSKKTQAQFSGILATLLWLSQAEYEQGGM

SEQ ID NO: 1028278 - protein, 128 aa, Homo sapiens
STYKEARSFLLAALGQLPLEPDCHAVRKPGGSEAAMQMCSRWPWQNLTKSAPATRPASKDALSRRPLQLSSDCPRDTLSEHCPAETRQLQNCERRWFHDFLAVVTAVGQLWVTLKGHSDKGHLPACVT

SEQ ID NO: 1028279 - protein, 121 aa, Homo sapiens
MNHCQLPVVIDNGSGMIKAGVAGCREPQFIYPNIIGRAKGQSLLLAQGWARILCCERPSSGLEELRVFISYPVEALVSLLSLARTVEIMWERISSDYKLKLKPCYGPVLITEPVLKPVANR

SEQ ID NO: 1028280 - protein, 490 aa, Homo sapiens
CFDALVSSPYDRAAGGENSLVIRDCEKELNGKQIYVGRAQKKVERQTELKRKFEQMKQDRITRYQGVNLYVKNLDDGIDDERLRKEFSPFGTITSAKVMMEGGRSKGFGFVCFSSPEEATKAVTEMNGRIVATKPLYVALAQRQEERQAHLTNQYMQRMASVRAVPNPVINPYQPAPPSGYFMAAIPQTQNRAAYYPPSQIAQLRPSPRWTAQGARPHPFQNMPGAIRPAAPRPPFSTMRPASSQVPRVMSTQRVANTSTQTMGPRPAAAAAAATPAVRTVPQYKYAAGVRNPQQHLNAQPQSYNATACWSLYKVRNLWTASMLASAPPQEQKQMLGERLFPLIQAMNPTLAGTITGLLLEMDNFRTSSYARVSRVTPVLTVDEAVAVTTSPQAKEVPESSNSATGVPTCYNGSGPMKRNFVLHAKEKYLNIENLDLYWKATTRCESIGIHNNAGTRTLEPDVPSKCPGLGNDYASPKFRYDQKEAKTHK

SEQ ID NO: 1028281 - protein, 421 aa, Homo sapiens
MGFSVIHHSQKGSRQHIIKSRDKSMDNKARYDTFSGFGNILSGKGVRDEKGSRGWDWYTFDDRRKQLKELLDKMKGMLLNDRKVFGSDDFKVTAKANEKLELRELGQTEFTNVYIKNFGEDMDDERLKDLFGKFGPALSVKVMTDESGKSKGFGFVSFERHEDAQKAVDEMNGKELNGKQIYVGRAQKKVERQTELKRKFEQMKQDRITRYQGVNLYVKNLDDGIDDERLRKEFSPFGTITSAKVMMEGGRSKGFGFVCFSSPEEATKAVTEMNGRIVATKPLYVALAQRQEERQAHLTNQYMQRMASVRAVPNPVINPYQPAPPSGYFMAAIPQTQNRAAYYPPSQIAQLRPSPRWTAQGARPHPFQNMPGAIRPAAPRPPFSTMRPASSQVPRVMSTQRVANTSTQTDVCITALGILRD

SEQ ID NO: 1028282 - protein, 337 aa, Homo sapiens
KYRRAKDEEVSVPNPVINPYQPAPPSGYFMAAIPQTQNRAAYYPPSQIAQLRPSPRWTAQGARPHPFQNMPGAIRPAAPRPPFSTMRPASSQVPRVMSTQRVANTSTQTMGPRPAAAAAAATPAVRTVPQYKYAAGVRNPQQHLNAQPQSYNATACWSLYKVRNLWTASMLASAPPQEQKQMLGERLFPLIQAMNPTLAGTITGLLLEMDNFRTSSYARVSRVTPVLTVDEAVAVTTSPQAKEVPESSNSATGVPTCYNGSGPMKRNFVLHAKEKYLNIENLDLYWKATTRCESIGIHNNAGTRTLEPDVPSKCPGLGNDYASPKFRYDQKEAKTHK

SEQ ID NO: 1028283 - protein, 638 aa, Homo sapiens
ETGFSVIHHSQKGSRQHIIKSRDKSMDNKARYDTFSGFGNILSGKGVRDEKGSRGWDWYTFDDRRKQLKELLDKMKGMLLNDRKVFGSDDFKVTAKANEKLELRELGQTEFTNVYIKNFGEDMDDERLKDLFGKFGPALSVKVMTDESGKSKGFGFVSFERHEDAQKAVDEMNGKELNGKQIYVGRAQKKVERQTELKRKFEQMKQDRITRYQGVNLYVKNLDDGIDDERLRKEFSPFGTITSAKVMMEGGRSKGFGFVCFSSPEEATKAVTEMNGRIVATKPLYVALAQRQEERQAHLTNQYMQRMASVRAVPNPVINPYQPAPPSGYFMAAIPQTQNRAAYYPPSQIAQLRPSPRWTAQGARPHPFQNMPGAIRPAAPRPPFSTMRPASSQVPRVMSTQRVANTSTQTMGPRPAAAAAAATPAVRTVPQYKYAAGVRNPQQHLNAQPQVTMQQPAGHCTRSGTFGLLPCWHLPLLKRQKQMLGERLFPLIQAMNPTLAGTITGLLLEMDNFRTSSYARVSRVTPVLTVDEAVAVTTSPQAKEVPESSNSATGVPTCYNGSGTHEKKLCASREEKYLNFENLDLYWKATTRCESIGIHNNAGTRTLEPDVPSKCPGLGNDYASPKFRYDQKEAKTHK

SEQ ID NO: 1028284 - protein, 546 aa, Homo sapiens
ETGFSVIHHSQKGSRQHIIKSRDKSMDNKARYDTFSGFGNILSGKGVRDEKGSRGWDWYTFDDRRKQLKELLDKMKGMLLNDRKVFGSDDFKVTAKANEKLELRELGQTEFTNVYIKNFGEDMDDERLKDLFGKFGPALSVKVMTDESGKSKGFGFVSFERHEDAQKAVDEMNGKELNGKQIYVGRAQKKVERQTELKRKFEQMKQDRITSMQRMASVRAVPNPVINPYQPAPPSGYFMAAIPQTQNRAAYYPPSQIAQLRPSPRWTAQGARPHPFQNMPGAIRPAAPRPPFSTMRPASSQVPRVMSTQRVANTSTQTMGPRPAAAAAAATPAVRTVPQYKYAAGVRNPQQHLNAQPQVTMQQPAGHCTRSGTFGLLPCWHLPLLKRQKQMLGERLFPLIQAMNPTLAGTITGLLLEMDNFRTSSYARVSRVTPVLTVDEAVAVTTSPQAKEVPESSNSATGVPTCYNGSGTHEKKLCASREEKYLNFENLDLYWKATTRCESIGIHNNAGTRTLEPDVPSKCPGLGNDYASPKFRYDQKEAKTHK

SEQ ID NO: 1028285 - protein, 89 aa, Homo sapiens
QQRGKPLSNWITQFARRCGKSPYAPLTPEAKAGGNAMNSREVEVARESESHPCNSMPGPIHAHCPLHKKRKKKEKEGLQIIAHGKYSQQ

SEQ ID NO: 1028286 - protein, 376 aa, Homo sapiens
  misc_feature (254)..(254): Xaa can be any naturally occurring amino acid
  misc_feature (280)..(280): Xaa can be any naturally occurring amino acid
  misc_feature (285)..(285): Xaa can be any naturally occurring amino acid
  misc_feature (316)..(316): Xaa can be any naturally occurring amino acid
  misc_feature (320)..(321): Xaa can be any naturally occurring amino acid
VPRSLGVSGGSVRVSARRVPSSSVPALLTAAPSERPAPAAAGSAILRRLAIPNAMAAVACLAGPSGASWAHVSPGCGPLWPSFPCPAFLQPGEPVPGGRALARGVGSPAATSCGGTLDGIRNIVLSNPKKRNTVVTCNAEHLSKVTFFMTLTATILKVIIISAEGPVFSSGHDLQGADRGAKAVITMPKYLRTVLQMAWPRLPAVNWLPAADIAVASDKSSFATPGVNVGLFCSTPGVALARAVPRKGAFEMLXTGEPISAQGALLHGLLSKVVPRAELXEETMXIARKIASLEPSVVSLGKAPSTSSCPKTWGRXTTSXXKPLWQPWPADRQEGITSSSKSRLVHQPCEWRRRVRPTAVPGHLPSWPGTLLFLAL

SEQ ID NO: 1028287 - protein, 142 aa, Homo sapiens
GSGILRSAAAQLGRQRHSEVGSGTFEVRQRHSEVGSGSECRQTVHMRCVCAAGSEVWQLCAAAVLFLWTLNHGDHVPDGDLGLGAKAAAQRGRHDLNVEFETSEEVDVSPTFDTMGLLGRTMLRGIYAYGFDKTISNPSNEP

SEQ ID NO: 1028288 - protein, 72 aa, Homo sapiens
MSVCLMSVCLMSVCLMSVCLMSVCLMSVCLMSVCLMSVCLMSVCLMSVCLVCSNCHFIFTLLDIRSSVIEVE

SEQ ID NO: 1028289 - protein, 119 aa, Homo sapiens
MSVCLMSVCLMSVCLMSVCLMSVCLMSVCLMSVCLMSVCLMSVCLMSVCLMSVCLMSVRLMSVCLMSVCLMSVCLMSVCLMSVCLIVERVPIIQKELSLSCTLRAKCNKESDGHTFNYQ

SEQ ID NO: 1028290 - protein, 122 aa, Homo sapiens
MSVCLMSVCLMSVCLMSVCLMSVCLMSVCLMSVCLMSVCLMSVCLMSVCLCKKEVDMGDFSFCSVLRKLLPWDPVDAVTLPPTLCSLKHVLCPLRVKRIKGGARCALLNRCLKAACSLRVIT

SEQ ID NO: 1028291 - protein, 77 aa, Homo sapiens
MSVCLMSVCLMSVCLMSVCLMSVCLMSVCLMSVCLMSVCLMSVCLMSVCLQCLCLLENVTITAGQRIDLAVLLADTP

SEQ ID NO: 1028292 - protein, 79 aa, Homo sapiens
DPTKTDRNCAHCTHRDARCTHVYARVRTCTHVYARVRTCTNVYAVYARVRTLCPVTIDLNSTLFGLSCRIMSSMKSSYN

SEQ ID NO: 1028293 - protein, 79 aa, Homo sapiens; identical to SEQ ID NO: 1028292

SEQ ID NO: 1028294 - protein, 102 aa, Homo sapiens
KHTLVDTCGPKECSRITIPPLSPRPQTFFPGPPAKPRSAQSEVPASPFTPSSLPAAQWVPRPDTLYLNAKVEEMEVDDFYDGIKRLYNEDNVLRKCGFCVWH

SEQ ID NO: 1028295 - protein, 102 aa, Homo sapiens; identical to SEQ ID NO: 1028294

SEQ ID NO: 1028296 - protein, 113 aa, Homo sapiens
VPCLDVLLQAVQRYAAGADVAHQRVNLRDAAIHDFFRGLAFGVSLLRRNRRALGTAGYFMGRGGHFVDRSSHLVRLVTLAFHGFFRAIGLLADLDMQRIWHPLLVRFGANTLK

SEQ ID NO: 1028297 - protein, 108 aa, Homo sapiens
  misc_feature (104)..(104): Xaa can be any naturally occurring amino acid
MQSPAALHSLGTQAEYGLLTRHLLAFKAYLWPQTAIFVKHRSWEEAAGLHVGRDLLQALKSGEEVLQVWEGIQAAGLKYLGPLKDIISDEIHKGELVPKKPWLXPQKL

SEQ ID NO: 1028298 - protein, 277 aa, Homo sapiens
IRATTCIDAKKGILQYAHEVYPDLQITNVVEANQPVTIQNWCKRGRKQCKTHPHFVIPYRCLVGEFVSDALLVPDKCKFLHQERMDVCETHLHWHTVAKETCSEKSTNLHDYGMLLPCGIDKFRGVEFVCCPLAEESDNVDSADAEEDDSDVWWGGADTDYADGSEDKVVEVAEEEEVAEVEEEEAMMRGDEDGDEVEERWEPTKKPQREPHRMGSSRQTPHKKIRGTRWFDRCALNKDDDGDVRGNDLQVDTADVTEGKCAPYFYGGMVAADGNNF

SEQ ID NO: 1028299 - protein, 67 aa, Homo sapiens
PIVQTIPRTGHEVTLEGGYDGYGSGRGFGDGYNGYGGGPGGGNFGGSPGYGGGGDLLHDEVIFCTIR

SEQ ID NO: 1028300 - protein, 449 aa, Homo sapiens
MLGTEGGEGFVVKVRGLPWSCSADEVQRFFSDCKIQNGAQGIRFIYTREGRPSGEAFVELESEDEVKLALKKDRETMGHRYVEVFKSNNVEMDWVLKHTGPNSPDTANDGFVRLRGLPFGCSKEEIVQFFSGLEIVPNGITLPVDFQGRSTGEAFVQFASQEIAEKALKKHKERIGHRWYIEIFKSSRAEVRTHYDPPRKLMAMQRPGPYDRPGAGRGYNSIGRGAGFERMRRGAYGGGYGGYDDYNGYNDGYGFGSDRFGRDLNYCFSGMSDHRYGDGGSTFQSTTGHCVHMRGLPYRATENDIYNFFSPLNPVRVHIEIGPDGRVTGEADVEFATHEDAVAAMSKDKANMQHRYVELFLNSTAGASGGAYEHRYVELFLNSTAGASGGAYGSQMMGGMGLSNQSSYGGPASQQLSGGYGGGYGGQSSMSGYDQVLQENSSDFQSNIA

SEQ ID NO: 1028301 - protein, 449 aa, Homo sapiens; identical to SEQ ID NO: 1028300

SEQ ID NO: 1028302 - protein, 449 aa, Homo sapiens; identical to SEQ ID NO: 1028300

SEQ ID NO: 1028303 - protein, 449 aa, Homo sapiens; identical to SEQ ID NO: 1028300

SEQ ID NO: 1028304 - protein, 472 aa, Homo sapiens
MLGTEGGEGFVVKVRGLPWSCSADEVQRFFSDCKIQNGAQGIRFIYTREGRPSGEAFVELESEDEVKLALKKDRETMGHRYVEVFKSNNVEMDWVLKHTGPNSPDTANDGFVRLRGLPFGCSKEEIVQFFSGLEIVPNGITLPVDFQGRSTGEAFVQFASQEIAEKALKKHKERIGHRWYIEIFKSSRAEVRTHYDPPRKLMAMQRPGPYDRPGAGRGYNSIGRGAGFERMRRGAYGGGYGGYDDYNGYNDGYGFGSDRFGRDLNYCFSGMSDHRYGDGGSTFQSTTGHCVHMRGLPYRATENDIYNFFSPLNPVRVHIEIGPDGRVTGEADVEFATHEDAVAAMSKDKANMQHRYVELFLNSTAGASGGAYEHRYVELFLNSTAGASGGAYGSQMMGGMGLSNQSSYGGPASQQLSGGYGGGYGGQSSMSGYGNQGAVNSSYYSSGSRASMGVNGMGGLSSMSSMSGGWGM

SEQ ID NO: 1028305 - protein, 406 aa, Homo sapiens
MLGTEGGEGFVVKVRGLPWSCSADEVQRFFSDCKIQNGAQGIRFIYTREGRPSGEAFVELESEDEVKLALKKDRETMGHRYVEVFKSNNVEMDWVLKHTGPNSPDTANDGFVRLRGLPFGCSKEEIVQFFSGLEIVPNGITLPVDFQGRSTGEAFVQFASQEIAEKALKKHKERIGHRWYIEIFKSSRAEVRTHYDPPRKLMAMQRPGPYDRPGAGRGYNSIGRGAGFERMRRGAYGGGYGGYDDYNGYNDGYGFGSDRFGRDLNYCFSGMSDHRYGDGGSTFQSTTGHCVHMRGLPYRATENDIYNFFSPLNPVRVHIEIGPDGRVTGEADVEFATHEDAVAAMSKDKANMQHRYVELFLNSTAGASGGAYEHRYVELFLNSTAGASGGAYGSQMMGGMGLCKYR

SEQ ID NO: 1028306 - protein, 393 aa, Homo sapiens
MLGTEGGEGFVVKVRGLPWSCSADEVQRFFSDCKIQNGAQGIRFIYTREGRPSGEAFVELESEDEVKLALKKDRETMGHRYVEVFKSNNVEMDWVLKHTGPNSPDTANDGFVRLRGLPFGCSKEEIVQFFSGLEIVPNGITLPVDFQGRSTGEAFVQFASQEIAEKALKKHKERIGHRWYIEIFKSSRAEVRTHYDPPRKLMAMQRPGPYDRPGAGRGYNSIGRGAGFERMRRGAYGGGYGGYDDYNGYNDGYGFGSDRFGRDLNYCFSGMSDHRYGDGGSTFQSTTGHCVHMRGLPYRATENDIYNFFSPLNPVRVHIEIGPDGRVTGEADVEFATHEDAVAAMSKDKANMQHRYVELFLNSTAGASGGAYGSQMLGGMGLCKYHFSVFFLS

SEQ ID NO: 1028307 - protein, 393 aa, Homo sapiens; identical to SEQ ID NO: 1028306

SEQ ID NO: 1028308 - protein, 429 aa, Homo sapiens
MLGTEGGEGFVVKVRGLPWSCSADEVQRFFSDCKIQNGAQGIRFIYTREGRPSGEAFVELESEDEVKLALKKDRETMGHRYVEVFKSNNVEMDWVLKHTGPNSPDTANDGFVRLRGLPFGCSKEEIVQFFSGLEIVPNGITLPVDFQGRSTGEAFVQFASQEIAEKALKKHKERIGHRWYIEIFKSSRAEVRTHYDPPRKLMAMQRPGPYDRPGAGRGYNSIGRGAGFERMRRGAYGGGYGGYDDYNGYNDGYGFGSDRFGRDLNYCFSGMSDHRYGDGGSTFQSTTGHCVHMRGLPYRATENDIYNFFSPLNPVRVHIEIGPDGRVTGEADVEFATHEDAVAAMSKDKANMQHRYVELFLNSTAGASGGAYGSQMLGGMGLSNQSSYGGPASQQLSGGYGGGYGGQSSMSGYDQVLQENSSDFQSNIA

SEQ ID NO: 1028309 - protein, 133 aa, Homo sapiens
MLGTEGGEGFVVKVRGLPWSCSADEVQRFFSDCKIQNGAQGIRFIYTREGRPSGEAFVELESEDEVKLALKKDRETMGHRYVEVFKSNNVEMDWVLKHTGPNSPDTANDGFVRLRGLPFGCSKEEIVQFFSGM

SEQ ID NO: 1028310 - protein, 133 aa, Homo sapiens; identical to SEQ ID NO: 1028309

SEQ ID NO: 1028311 - protein, 133 aa, Homo sapiens; identical to SEQ ID NO: 1028309

SEQ ID NO: 1028312 - protein, 133 aa, Homo sapiens; identical to SEQ ID NO: 1028309

SEQ ID NO: 1028313 - protein, 246 aa, Homo sapiens
MQRPGPYDRPGAGRGYNSIGRGAGFERMRRGAYGGGYGGYDDYNGYNDGYGFGSDRFGRDLNYCFSGMSDHRYGDGGSTFQSTTGHCVHMRGLPYRATENDIYNFFSPLNPVRVHIEIGPDGRVTGEADVEFATHEDAVAAMSKDKANMQHRYVELFLNSTAGASGGAYEHRYVELFLNSTAGASGGAYGSQMMGGMGLSNQSSYGGPASQQLSGGYGGGYGGQSSMSGYDQVLQENSSDFQSNIA

SEQ ID NO: 1028314 - protein, 179 aa, Homo sapiens
MSDHRYGDGGSTFQSTTGHCVHMRGLPYRATENDIYNFFSPLNPVRVHIEIGPDGRVTGEADVEFATHEDAVAAMSKDKANMQHRYVELFLNSTAGASGGAYEHRYVELFLNSTAGASGGAYGSQMMGGMGLSNQSSYGGPASQQLSGGYGGGYGGQSSMSGYDQVLQENSSDFQSNIA

SEQ ID NO: 1028315 - protein, 133 aa, Homo sapiens; identical to SEQ ID NO: 1028309

SEQ ID NO: 1028316 - protein, 114 aa, Homo sapiens
MLGTEGGEGFVVKVRGLPWSCSADEVQRFFSDCKIQNGAQGIRFIYTREGRPSGEAFVELESEDEVKLALKKDRETMGHRYVEGLIYIALVTVNKALNNRGLTPPVNIVYCLLL

SEQ ID NO: 1028317 - protein, 249 aa, Homo sapiens
MMLGTEGGEGFVVKVRGLPWSCSADEVQRFFSDCKIQNGAQGIRFIYTREGRPSGEAFVELESEDEVKLALKKDRETMGHRYVEVFKSNNVEMDWVLKHTGPNSPDTANDGFVRLRGLPFGCSKEEIVQFFSGLEIVPNGITLPVDFQGRSTGEAFVQFASQEIAEKALKKHKERIGHRWYIEIFKSSRAEVRTHYDPPRKLMAMQRPGPYDRPGAGRGYNSIGRGAGFERMRRGAYGGGYGGYDDSRL

SEQ ID NO: 1028318 - protein, 449 aa, Homo sapiens; identical to SEQ ID NO: 1028300

SEQ ID NO: 1028319 - protein, 449 aa, Homo sapiens; identical to SEQ ID NO: 1028300

SEQ ID NO: 1028320 - protein, 449 aa, Homo sapiens; identical to SEQ ID NO: 1028300

SEQ ID NO: 1028321 - protein, 450 aa, Homo sapiens
MMLGTEGGEGFVVKVRGLPWSCSADEVQRFFSDCKIQNGAQGIRFIYTREGRPSGEAFVELESEDEVKLALKKDRETMGHRYVEVFKSNNVEMDWVLKHTGPNSPDTANDGFVRLRGLPFGCSKEEIVQFFSGLEIVPNGITLPVDFQGRSTGEAFVQFASQEIAEKALKKHKERIGHRWYIEIFKSSRAEVRTHYDPPRKLMAMQRPGPYDRPGAGRGYNSIGRGAGFERMRRGAYGGGYGGYDDYNGYNDGYGFGSDRFGRDLNYCFSGMSDHRYGDGGSTFQSTTGHCVHMRGLPYRATENDIYNFFSPLNPVRVHIEIGPDGRVTGEADVEFATHEDAVAAMSKDKANMQHRYVELFLNSTAGASGGAYEHRYVELFLNSTAGASGGAYGSQMMGGMGLSNQSSYGGPASQQLSGGYGGGYGGQSSMSGYDQVLQENSSDFQSNIA

SEQ ID NO: 1028322 - protein, 373 aa, Homo sapiens
MLGTEGGEGFVVKVRGLPWSCSADEVQRFFSDCKIQNGAQGIRFIYTREGRPSGEAFVELESEDEVKLALKKDRETMGHRYVEVFKSNNVEMDWVLKHTGPNSPDTANDGFVRLRGLPFGCSKEEIVQFFSGLEIVPNGITLPVDFQGRSTGEAFVQFASQEIAEKALKKHKERIGHRWYIEIFKSSRAEVRTHYDPPRKLMAMQRPGPYDRPGAGRGYNSIGRGAGFERMRRGAYGGGYGGYDDYNGYNDGYGFGSDRFGRDLNYCFSGMSDHRYGDGGSTFQSTTGHCVHMRGLPYRATENDIYNFFSPLNPVRVHIEIGPDGRVTGEADVEFATHEDAVAAMSKDKANMQHRYVELFLNSTAGASGGAYG

SEQ ID NO: 1028323 - protein, 373 aa, Homo sapiens; identical to SEQ ID NO: 1028322

SEQ ID NO: 1028324 - protein, 405 aa, Homo sapiens
MLGTEGGEGFVVKVRGLPWSCSADEVQRFFSDCKIQNGAQGIRFIYTREGRPSGEAFVELESEDEVKLALKKDRETMGHRYVEVFKSNNVEMDWVLKHTGPNSPDTANDGFVRLRGLPFGCSKEEIVQFFSGLEIVPNGITLPVDFQGRSTGEAFVQFASQEIAEKALKKHKERIGHRWYIEIFKSSRAEVRTHYDPPRKLMAMQRPGPYDRPGAGRGYNSIGRGAGFERMRRGAYGGGYGGYDDYNGYNDGYGFGSDRFGRDLNYCFSGMSDHRYGDGGSTFQSTTGHCVHMRGLPYRATENDIYNFFSPLNPVRVHIEIGPDGRVTGEADVEFATHEDAVAAMSKDKANMQHRYVELFLNSTAGASGGAYEHRYVELFLNSTAGASGGAYQTSPATGAQPASS

SEQ ID NO: 1028325 - protein, 443 aa, Homo sapiens
MLGTEGGEGFVVKVRGLPWSCSADEVQRFFSDCKIQNGAQGIRFIYTREGRPSGEAFVELESEDEVKLALKKDRETMGHRYVEVFKSNNVEMDWVLKHTGPNSPDTANDGFVRLRGLPFGCSKEEIVQFFSGLEIVPNGITLPVDFQGRSTGEAFVQFASQEIAEKALKKHKERIGHRWYIEIFKSSRAEVRTHYDPPRKLMAMQRPGPYDRPGAGRGYNSIGRGAGFERMRRGAYGGGYGGYDDYNGYNDGYGFGSDRFGRDLNYCFSGMSDHRYGDGGSTFQSTTGHCVHMRGLPYRATENDIYNFFSPLNPVRVHIEIGPDGRVTGEADVEFATHEDAVAAMSKDKANMQHRYVELFLNSTAGASGGAYEHRYVELFLNSTAGASGGAYGSQMMGGMGLSNQSSYGGPASQQLSGGYGGGYGGQSSMSGYGKACLLLYLE

SEQ ID NO: 1028326 - protein, 397 aa, Homo sapiens
MLGTEGGEGFVVKVRGLPWSCSADEVQRFFSDCKIQNGAQGIRFIYTREGRPSGEAFVELESEDEVKLALKKDRETMGHRYVEVFKSNNVEMDWVLKHTGPNSPDTANDGFVRLRGLPFGCSKEEIVQFFSGLEIVPNGITLPVDFQGRSTGEAFVQFASQEIAEKALKKHKERIGHRWYIEIFKSSRAEVRTHYDPPRKLMAMQRPGPYDRPGAGRGYNSIGRGAGFERMRRGAYGGGYGGYDDYNGYNDGYGFGSDRFGRDLNYCFSGMSDHRYGDGGSTFQSTTGHCVHMRGLPYRATENDIYNFFSPLNPVRVHIEIGPDGRVTGEADVEFATHEDAVAAMSKDKANMQHRYVELFLNSTAGASGGAYGKQVMWKAVQAEERVSSKALWQKQE

SEQ ID NO: 1028327 - protein, 269 aa, Homo sapiens
MLGTEGGEGFVVKVRGLPWSCSADEVQRFFSDCKIQNGAQGIRFIYTREGRPSGEAFVELESEDEVKLALKKDRETMGHRYVEVFKSNNVEMDWVLKHTGPNSPDTANDGFVRLRGLPFGCSKEEIVQFFSGLEIVPNGITLPVDFQGRSTGEAFVQFASQEIAEKALKKHKERIGHRWYIEIFKSSRAEVRTHYDPPRKLMAMQRPGPYDRPGAGRGYNSIGRGAGFERMRRGAYGGGYGGYDDYNGYNDGYGFGSDRFGRDLNYCFW

SEQ ID NO: 1028328 - protein, 252 aa, Homo sapiens
MLGTEGGEGFVVKVRGLPWSCSADEVQRFFSDCKIQNGAQGIRFIYTREGRPSGEAFVELESEDEVKLALKKDRETMGHRYVEVFKSNNVEMDWVLKHTGPNSPDTANDGFVRLRGLPFGCSKEEIVQFFSGLEIVPNGITLPVDFQGRSTGEAFVQFASQEIAEKALKKHKERIGHRWYIEIFKSSRAEVRTHYDPPRKLMAMQRPGPYDRPGAGRGYNSIGRGAGFERMRRGAYGGGYGGYDDSHGLRRR

SEQ ID NO: 1028329 - protein, 114 aa, Homo sapiens; identical to SEQ ID NO: 1028316

SEQ ID NO: 1028330 - protein, 114 aa, Homo sapiens; identical to SEQ ID NO: 1028316

SEQ ID NO: 1028331 - protein, 241 aa, Homo sapiens
MNIKGSHGKGSLLLLLVSKLLLCQSVGPLRICPGGADRCQVNLRELFVTAPSSCPTTSSKLSSEMFREFDKRNTHGLVFITKAINSCHTSSLGNPEDKEQAQQMNQKDILSLIVSILRTWNEPLYHLVTEVRGMQEAPEAILSKAVEIEEQTKRLLEGMELIVSQVHPETKEMRSTLSVRDFHPCRMADEESRLSAYYNLLHCLRRDSHKIGKYLKLLECRIITQQQLVSPHPFHLFLRSS

SEQ ID NO: 1028332 - protein, 223 aa, Homo sapiens
MNIKGSHGKGSLLLLLVSKLLLCQSVGPLRICPGGADRCQVNLRELFVTAPSSCPTTSSKLSSEMFREFDKRNTHGLVFITKAINSCHTSSLGNPEDKEQAQQMNQKDILSLIVSILRTWNEPLYHLVTEVRGMQEAPEAILSKAVEIEEQTKRLLEGMELIVSQVHPETKEMRSTLSVRDFHPCRMADEESRLSAYNLVTDYARIPLSSTISAPNCDNHDGP

SEQ ID NO: 1028333 - protein, 106 aa, Homo sapiens
MLDTPHKYRMLIAMVDVIFADVAQPDQTRIVALNAHTFLRNGGHFVISIKANCIDSTASAEAVFASEVKKMQQENMKPQEQLTLEPYERDHAVVVGVYRPPPKVKN

SEQ ID NO: 1028334 - protein, 733 aa, Homo sapiens
MGKLITRMWKLLRRRSAPKELLSRTSLETQKLDLMTEVSELKLKLVGMEKEQREQEEKQRKAEELLQELRHLKIKVEELENERNQYEWKLKATKAEVAQLQEQVALKDAEIERLHSQLSRTAALHSESHTERDQEIQRLKMGMETLLLANEDKDRRIEELTGLLNQYRKVKEIVMVTQGPSERTLSINEEEPEGGFSKWNATNKDPEELFKQEMPPRCSSPTVGPPPLPQKSLETRAQKKLSCSLEDLRSESVDKCMDGNQPFPVLEPKDSPFLAEHKYPTLPGKLSGATPNGEAAKSPPTICQPDATGSSLLRLRDTESGWDDTAVVNDLSSTSSGTESGPQSPLTPDGKRNPKGIKKFWGKIRRTQSGNFYTDTLGMAEFRRGGLRATAGPRLSRTRDSKGQKSDANAPFAQWSTERVCAWLEDFGLAQYVIFARQWVSSGHTLLTATPQDMEKELGIKHPLHRKKLVLAVKAINTKQEEKSALLDHIWVTRWLDDIGLPQYKDQFHESRVDGRMLQYLTVNDLLFLKVTSQLHHLSIKCAIHVLHVNKFNPHCLHRRPADESNLSPSEVVQWSNHRVMEWLRSVDLAEYAPNLRGSGVHGGLIILEPRFTGDTLAMLLNIPPQKTLLRRHLTTKFNALIGPEAEQEKREKMASPAYTPLTTTAKVRPRKLGFSHFGNIRKKKFDESTDYICPMEPSDGVSDSHRVYSGYRGLSPLDAPELDGLDQVGQIS

SEQ ID NO: 1028335 - protein, 216 aa, Homo sapiens
MEKELGIKHPLHRKKLVLAVKAINTKQEEKSALLDHIWVTRWLDDIGLPQYKDQFHESRVDGRMLQYLTVNDLLFLKVTSQLHHLSIKCAIHVLHVNKFNPHCLHRRPADESNLSPSEVVQWSNHRVMEWLRSVDLAEYAPNLRGSGVHGGLIILEPRFTGDTLAMLLNIPPQKTLLRRHLTTKFNALIGPEAEQEKREKMAQQLYMTPASRRIVS

SEQ ID NO: 1028336 - protein, 87 aa, Homo sapiens
PVPRTVEEFYVDLSAPLVCVCVRRRPRPLDHIHCLLPISGDTESGWDDTAVVNDLSSTSSGTESGPQSPLTPDGKRNPKGIKKFWGK

SEQ ID NO: 1028337 - protein, 806 aa, Homo sapiens
GVTPQGASAPFSAIPSSTWNSSQSQVNHHSAASNETYQERLARLEGDKESLILQVSVLTDQVEAQGEKIRDLEVCLEGHQVKLNAAEEMLQQELLSRTSLETQKLDLMTEVSELKLKLVGMEKEQREQEEKQRKAEELLQELRHLKIKVEELENERNQYEWKLKATKAEVAQLQEQVALKDAEIERLHSQLSRTAALHSESHTERDQEIQRLKMGMETLLLANEDKDRRIEELTGLLNQYRKVKEIVMVTQGPSERTLSINEEEPEGGFSKWNATNKDPEELFKQEMPPRCSSPTVGPPPLPQKSLETRAQKKLSCSLEDLRSESVDKCMDGNQPFPVLEPKDSPFLAEHKYPTLPGKLSGATPNGEAAKSPPTICQPDATGSSLLRLRDTESGWDDTAVVNDLSSTSSGTESGPQSPLTPDGKRNPKGIKKFWGKIRRTQSGNFYTDTLGMAEFRRGGLRATAGPRLSRTRDSKGQKSDANAPFAQWSTERVCAWLEDFGLAQYVIFARQWVSSGHTLLTATPQDMEKELGIKHPLHRKKLVLAVKAINTKQEEKSALLDHIWVTRWLDDIGLPQYKDQFHESRVDGRMLQYLTVNDLLFLKVTSQLHHLSIKCAIHVLHVNKFNPHCLHRRPADESNLSPSEVVQWSNHRVMEWLRSVDLAEYAPNLRGSGVHGGLIILEPRFTGDTLAMLLNIPPQKTLLRRHLTTKFNALIGPEAEQEKREKMASPAYTPLTTTAKVRPRKLGFSHFGNIRKKKFDESTDYICPMEPSDGVSDSHRVYSGYRGLSPLDAPELDGLDQVGQIS

SEQ ID NO: 1028338 - protein, 540 aa, Homo sapiens
MVVGPPNRLSSTVTLLSLVQMPPRCSSPTVGPPPLPQKSLETRAQKKLSCSLEDLRSESVDKCMDGNQPFPVLEPKDSPFLAEHKYPTLPGKLSGATPNGEAAKSPPTICQPDATGSSLLRLRDTESGWDDTAVVNDLSSTSSGTESGPQSPLTPDGKRNPKGIKKFWGKIRRTQSGNFYTDTLGMAEFRRGGLRATAGPRLSRTRDSKGQKSDANAPFAQWSTERVCAWLEDFGLAQYVIFARQWVSSGHTLLTATPQDMEKELGIKHPLHRKKLVLAVKAINTKQEEKSALLDHIWVTRWLDDIGLPQYKDQFHESRVDGRMLQYLTVNDLLFLKVTSQLHHLSIKCAIHVLHVNKFNPHCLHRRPADESNLSPSEVVQWSNHRVMEWLRSVDLAEYAPNLRGSGVHGGLIILEPRFTGDTLAMLLNIPPQKTLLRRHLTTKFNALIGPEAEQEKREKMASPAYTPLTTTAKVRPRKLGFSHFGNIRKKKFDESTDYICPMEPSDGVSDSHRVYSGYRGLSPLDAPELDGLDQVGQIS

SEQ ID NO: 1028339 - protein, 280 aa, Homo sapiens
MEKELGIKHPLHRKKLVLAVKAINTKQEEKSALLDHIWVTRWLDDIGLPQYKDQFHESRVDGRMLQYLTVNDLLFLKVTSQLHHLSIKCAIHVLHVNKFNPHCLHRRPADESNLSPSEVVQWSNHRVMEWLRSVDLAEYAPNLRGSGVHGGLIILEPRFTGDTLAMLLNIPPQKTLLRRHLTTKFNALIGPEAEQEKREKMASPAYTPLTTTAKVRPRKLGFSHFGNIRKKKFDESTDYICPMEPSDGVSDSHRVYSGYRGLSPLDAPELDGLDQVGQIS

SEQ ID NO: 1028340 - protein, 349 aa, Homo sapiens
MIRFRTSGSPTNRNMLFSRQKSDANAPFAQWSTERVCAWLEDFGLAQYVIFARQWVSSGHTLLTATPQDMEKELGIKHPLHRKKLVLAVKAINTKQEEKSALLDHIWVTRWLDDIGLPQYKDQFHESRVDGRMLQYLTVNDLLFLKVTSQLHHLSIKCAIHVLHVNKFNPHCLHRRPADESNLSPSEVVQWSNHRVMEWLRSVDLAEYAPNLRGSGVHGGLIILEPRFTGDTLAMLLNIPPQKTLLRRHLTTKFNALIGPEAEQEKREKMASPAYTPLTTTAKVRPRKLGFSHFGNIRKKKFDESTDYICPMEPSDGVSDSHRVYSGYRGLSPLDAPELDGLDQVGQIS

SEQ ID NO: 1028341 - protein, 917 aa, Homo sapiens
MASDASHALEAALEQMDGIIAGTKTGADLSDGTCEPGLASPASYMNPFPVLHLIEDLRLALEMLELPQERAALLSQIPGPTAAYIKEWFEESLSQVNHHSAASNETYQERLARLEGDKESLILQVSVLTDQVEAQGEKIRDLEVCLEGHQVKLNAAEEMLQQELLSRTSLETQKLDLMTEVSELKLKLVGMEKEQREQEEKQRKAEELLQELRHLKIKVEELENERNQYEWKLKATKAEVAQLQEQVALKDAEIERLHSQLSRTAALHSESHTERDQEIQRLKMGMETLLLANEDKDRRIEELTGLLNQYRKVKEIVMVTQGPSERTLSINEEEPEGGFSKWNATNKDPEELFKQEMPPRCSSPTVGPPPLPQKSLETRAQKKLSCSLEDLRSESVDKCMDGNQPFPVLEPKDSPFLAEHKYPTLPGKLSGATPNGEAAKSPPTICQPDATGSSLLRLRDTESGWDDTAVVNDLSSTSSGTESGPQSPLTPDGKRNPKGIKKFWGKIRRTQSGNFYTDTLGMAEFRRGGLRATAGPRLSRTRDSKGQKSDANAPFAQWSTERVCAWLEDFGLAQYVIFARQWVSSGHTLLTATPQDMEKELGIKHPLHRKKLVLAVKAINTKQEEKSALLDHIWVTRWLDDIGLPQYKDQFHESRVDGRMLQYLTVNDLLFLKVTSQLHHLSIKCAIHVLHVNKFNPHCLHRRPADESNLSPSEVVQWSNHRVMEWLRSVDLAEYAPNLRGSGVHGGLIILEPRFTGDTLAMLLNIPPQKTLLRRHLTTKFNALIGPEAEQEKREKMASPAYTPLTTTAKVRPRKLGFSHFGNIRKKKFDESTDYICPMEPSDGVSDSHRVYSGYRGLSPLDAPELDGLDQHQWKHMNFDAGPETMDTPTRLSSQAPPTLQLREKLKCLRPVDHSLG

SEQ ID NO: 1028342 - protein, 691 aa, Homo sapiens
MASDASHALEAALEQMDGIIAGTKTGADLSDGTCEPGLASPASYMNPFPVLHLIEDLRLALEMLELPQERAALLSQIPGPTAAYIKEWFEESLSQVNHHSAASNETYQERLARLEGDKESLILQVSVLTDQVEAQGEKIRDLEVCLEGHQVKLNAAEEMLQQELLSRTSLETQKLDLMTEVSELKLKLVGMEKEQREQEEKQRKAEELLQELRHLKIKVEELENERNQYEWKLKATKAEVAQLQEQVALKDAEIERLHSQLSRTAALHSESHTERDQEIQRLKMGMETLLLANEDKDRRIEELTGLLNQYRKVKEIVMVTQGPSERTLSINEEEPEGGFSKWNATNKDPEELFKQEMPPRCSSPTVGPPPLPQKSLETRAQKKLSCSLEDLRSESVDKCMDGNQPFPVLEPKDSPFLAEHKYPTLPGKLSGATPNGEAAKSPPTICQPDATGSSLLRLRDTESGWDDTAVVNDLSSTSSGTESGPQSPLTPDGKRNPKGIKKFWGKIRRTQSGNFYTDTLGMAEFRRGGLRATAGPRLSRTRDSKGQKSDANAPFAQWSTERVCAWLEDFGLAQYVIFARQWVSSGHTLLTATPQDMEKELGIKHPLHRKKLVLAVKAINTKQEEKSALLDHIWVTRWLDDIGLPQYKDQFHESRVDGRMLQYLTVNDLLFLKVTSQLHHLSRLKQVPSST

SEQ ID NO: 1028343 - protein, 224 aa, Homo sapiens [sequence omitted]

SEQ ID NO: 1028344 - protein, 181 aa, Homo sapiens
MASDASHALEAALEQMDGIIAGTKTGADLSDGTCEPGLASPASYMNPFPVLHLIEDLRLALEMLELPQERAALLSQIPGPTAAYIKEWFEESLSQVNHHSAASNETYQERLARLEGDKESLILQVSVLTDQVEAQGEKIRDLEVCLEGHQVKLNAAEEMLQQICNLVLRFCMLNITFFPFK

SEQ ID NO: 1028345 - protein, 280 aa, Homo sapiens; identical to SEQ ID NO: 1028339

SEQ ID NO: 1028346 - protein, 876 aa, Homo sapiens
MASDASHALEAALEQMDGIIAGTKTGADLSDGTCEPGLASPASYMNPFPVLHLIEDLRLALEMLELPQERAALLSQIPGPTAAYIKEWFEESLSQVNHHSAASNETYQERLARLEGDKESLILQVSVLTDQVEAQGEKIRDLEVCLEGHQVKLNAAEEMLQQELLSRTSLETQKLDLMTEVSELKLKLVGMEKEQREQEEKQRKAEELLQELRHLKIKVEELENERNQYEWKLKATKAEVAQLQEQVALKDAEIERLHSQLSRTAALHSESHTERDQEIQRLKMGMETLLLANEDKDRRIEELTGLLNQYRKVKEIVMVTQGPSERTLSINEEEPEGGFSKWNATNKDPEELFKQEMPPRCSSPTVGPPPLPQKSLETRAQKKLSCSLEDLRSESVDKCMDGNQPFPVLEPKDSPFLAEHKYPTLPGKLSGATPNGEAAKSPPTICQPDATGSSLLRLRDTESGWDDTAVVNDLSSTSSGTESGPQSPLTPDGKRNPKGIKKFWGKIRRTQSGNFYTDTLGMAEFRRGGLRATAGPRLSRTRDSKGQKSDANAPFAQWSTERVCAWLEDFGLAQYVIFARQWVSSGHTLLTATPQDMEKELGIKHPLHRKKLVLAVKAINTKQEEKSALLDHIWVTRWLDDIGLPQYKDQFHESRVDGRMLQYLTVNDLLFLKVTSQLHHLSIKCAIHVLHVNKFNPHCLHRRPADESNLSPSEVVQWSNHRVMEWLRSVDLAEYAPNLRGSGVHGGLIILEPRFTGDTLAMLLNIPPQKTLLRRHLTTKFNALIGPEAEQEKREKMASPAYTPLTTTAKVRPRKLGFSHFGNIRKKKFDESTDYICPMEPSDGVSDSHRVYSGYRGLSPLDAPELDGLDQVGQIS

SEQ ID NO: 1028347 - protein, 876 aa, Homo sapiens; identical to SEQ ID NO: 1028346

SEQ ID NO: 1028348 - protein, 715 aa, Homo sapiens
MASDASHALEAALEQMDGIIAGTKTGADLSDGTCEPGLASPASYMNPFPVLHLIEDLRLALEMLELPQERAALLSQIPGPTAAYIKEWFEESLSQVNHHSAASNETYQERLARLEGDKESLILQVSVLTDQVEAQGEKIRDLEVCLEGHQVKLNAAEEMLQQELLSRTSLETQKLDLMTEVSELKLKLVGMEKEQREQEEKQRKAEELLQELRHLKIKVEELENERNQYEWKLKATKAEVAQLQEQVALKDAEIERLHSQLSRTAALHSESHTERDQEIQRLKMGMETLLLANEDKDRRIEELTGLLNQYRKVKEIVMVTQGPSERTLSINEEEPEGGFSKWNATNKDPEELFKQEMPPRCSSPTVGPPPLPQKSLETRAQKKLSCSLEDLRSESVDKCMDGNQPFPVLEPKDSPFLAEHKYPTLPGKLSGATPNGEAAKSPPTICQPDATGSSLLRLRDTESGWDDTAVVNDLSSTSSGTESGPQSPLTPDGKRNPKGIKKFWGKIRRTQSGNFYTDTLGMAEFRRGGLRATAGPRLSRTRDSKGQKSDANAPFAQWSTERVCAWLEDFGLAQYVIFARQWVSSGHTLLTATPQDMEKELGIKHPLHRKKLVLAVKAINTKQEEKSALLDHIWVTRWLDDIGLPQYKDQFHESRVDGRMLQYLTVNDLLFLKVTSQLHHLSIKCAIHVLHVNKFNPHCLHRRPADELYSGPTTG

SEQ ID NO: 1028349 - protein, 355 aa, Homo sapiens
YREYKMRRRVIRVVLNFLGPRILYGQKSDANAPFAQWSTERVCAWLEDFGLAQYVIFARQWVSSGHTLLTATPQDMEKELGIKHPLHRKKLVLAVKAINTKQEEKSALLDHIWVTRWLDDIGLPQYKDQFHESRVDGRMLQYLTVNDLLFLKVTSQLHHLSIKCAIHVLHVNKFNPHCLHRRPADESNLSPSEVVQWSNHRVMEWLRSVDLAEYAPNLRGSGVHGGLIILEPRFTGDTLAMLLNIPPQKTLLRRHLTTKFNALIGPEAEQEKREKMASPAYTPLTTTAKVRPRKLGFSHFGNIRKKKFDESTDYICPMEPSDGVSDSHRVYSGYRGLSPLDAPELDGLDQVGQIS

SEQ ID NO: 1028350 - protein, 771 aa, Homo sapiens
MASDASHALEAALEQMDGIIAGTKTGADLSDGTCEPGLASPASYMNPFPVLHLIEDLRLALEMLELPQERAALLSQIPGPTAAYIKEWFEESLSQVNHHSAASNETYQERLARLEGDKESLILQVSVLTDQVEAQGEKIRDLEVCLEGHQVKLNAAEEMLQQELLSRTSLETQKLDLMTEVSELKLKLVGMEKEQREQEEKQRKAEELLQELRHLKIKVEELENERNQYEWKLKATKAEVAQLQEQVALKDAEIERLHSQLSRTAALHSESHTERDQEIQRLKMGMETLLLANEDKDRRIEELTGLLNQYRKVKEIVMVTQGPSERTLSINEEEPEGGFSKWNATNKDPEELFKQEMPPRCSSPTVGPPPLPQKSLETRAQKKLSCSLEDLRSESVDKCMDGNQPFPVLEPKDSPFLAEHKYPTLPGKLSGATPNGEAAKSPPTICQPDATGSSLLRLRDTESGWDDTAVVNDLSSTSSGTESGPQSPLTPDGKRNPKGIKKFWGKIRRTQSGNFYTDTLGMAEFRRGGLRATAGPRLSRTRDSKGQKSDANAPFAQWSTERVCAWLEDFGLAQYVIFARQWVSSGHTLLTATPQDMEKELGIKHPLHRKKLVLAVKAINTKQEEKSALLDHIWVTRWLDDIGLPQYKDQFHESRVDGRMLQYLTVNDLLFLKVTSQLHHLSIKCAIHVLHVNKFNPHCLHRRPADESNLSPSEVVQWSNHRVMEWLRSVDLAEYAPNLRGSGVHGGLIVSGLSGLAHLPWCKWDIQKLIY

SEQ ID NO: 1028351 - protein, 477 aa, Homo sapiens
MASDASHALEAALEQMDGIIAGTKTGADLSDGTCEPGLASPASYMNPFPVLHLIEDLRLALEMLELPQERAALLSQIPGPTAAYIKEWFEESLSQVNHHSAASNETYQERLARLEGDKESLILQVSVLTDQVEAQGEKIRDLEVCLEGHQVKLNAAEEMLQQELLSRTSLETQKLDLMTEVSELKLKLVGMEKEQREQEEKQRKAEELLQELRHLKIKVEELENERNQYEWKLKATKAEVAQLQEQVALKDAEIERLHSQLSRTAALHSESHTERDQEIQRLKMGMETLLLANEDKDRRIEELTGLLNQYRKVKEIVMVTQGPSERTLSINEEEPEGGFSKWNATNKDPEELFKQEMPPRCSSPTVGPPPLPQKSLETRAQKKLSCSLEDLRSESVDKCMDGNQPFPVLEPKDSPFLAEHKYPTLPGKLSGATPNGEAAKSPPTICQPDATGSSLLRLSECPALVLVASEQCPWHFQ

SEQ ID NO: 1028352 - protein, 185 aa, Homo sapiens
RPRLLKPLPPPGSSSLSCLGHVGDRRLSSPWTPWPASGAGPDSSSRVSLLPPFLSDQAQHVHALGNFYLFCQATGPADIRFVWEKNGRALETCVPVQTHALPDGRAHALSWLQDAIRESAEYRCSVLSSAGNKTSKVQVAVMRPEVTHQERWTRELSAWRAVAGEHDRMMQSWRKAWESCSKDTL

SEQ ID NO: 1028353 - protein, 124 aa, Homo sapiens
GNGGFLHCIQMDTSVNAANQVVSVGADIAFDADPKFFACLVRFESSSVPTTLPTAYDVYPLNGRHDGGYYTVKDCVTIDVLPRTPGNNVYVGFMVWSNFTATKCRGLVSLNQVIKEIICLQPLK

SEQ ID NO: 1028354 - protein, 253 aa, Homo sapiens
  misc_feature (3)..(3): Xaa can be any naturally occurring amino acid
  misc_feature (12)..(12): Xaa can be any naturally occurring amino acid
  misc_feature (222)..(222): Xaa can be any naturally occurring amino acid
MSXPKPRQKPKXTLVGETTGTRAATGAGTSSTKASEEPKCESGGQAGTSTEATTGAGTGTGTVIGTGTGTSAGTATLLGFGFSFCSRLDPGFGPGSDISFVPVAGPGSILRAEPNAHSSSNLGPSLGFSCSLSCSLQIRFHRLSVLSCPFLGILLLYLAGKLEDFHLAGLIVRAQAPEELIFRGIAIGDSGIVQVLLIHKLISDELLHVPKECMMYPRAHPXCAHNNKEENNKEQISIHEDDAKKHHEQTQLG

SEQ ID NO: 1028355 - protein, 440 aa, Homo sapiens
RGGGARAPGAGLPARWSVFRPCVCGRPASLTCSPLDPEVGPYCDTPTMRTLFNLLWLALACSPVHTTLSKSDAKKAASKTLLEKSQFSDKPVQDRGLVVTDLKAESVVLEHRSYCSAKARDRHFAGDVLGYVTPWNSHGYDVTKVFGSKFTQISPVWLQLKRRGREMFEVTGLHDVDQGWMRAVRKHAKGLHIVPRLLFEDWTYDDFRNVLDSEDEIEELSKTVVQVAKNQHFDGFVVEVWNQLLSQKRVGLIHMLTHLAEALHQARLLALLVIPPAITPGTDQLGMFTHKEFEQLAPVLDGFSLMTYDYSTAHQPGPNAPLSWVRACVQVLDPKSKWRSKILLGLNFYGMDYATSKDAREPVVGARYIQTLKDHRPRMVWDSQVSEHFFEYKKSRSGRHVVFYPTLKSLQVRLELARELGVGVSIWELGQGLDYFYDLL

SEQ ID NO: 1028356 - protein, 393 aa, Homo sapiens
MRTLFNLLWLALACSPVHTTLSKSDAKKAASKTLLEKSQFSDKPVQDRGLVVTDLKAESVVLEHRSYCSAKARDRHFAGDVLGYVTPWNSHGYDVTKVFGSKFTQISPVWLQLKRRGREMFEVTGLHDVDQGWMRAVRKHAKGLHIVPRLLFEDWTYDDFRNVLDSEDEIEELSKTVVQVAKNQHFDGFVVEVWNQLLSQKRVGLIHMLTHLAEALHQARLLALLVIPPAITPGTDQLGMFTHKEFEQLAPVLDGFSLMTYDYSTAHQPGPNAPLSWVRACVQVLDPKSKWRSKILLGLNFYGMDYATSKDAREPVVGARYIQTLKDHRPRMVWDSQASEHFFEYKKSRSGRHVVFYPTLKSLQVRLELARELGVGVSIWELGQGLDYFYDLL

SEQ ID NO: 1028357 - protein, 440 aa, Homo sapiens; identical to SEQ ID NO: 1028355

SEQ ID NO: 1028358 - protein, 445 aa, Homo sapiens
MRSRPEPPRPHPGALASLGKTQTQPQRPHSHQAPPTTSPLDPEVGPYCDTPTMRTLFNLLWLALACSPVHTTLSKSDAKKAASKTLLEKSQFSDKPVQDRGLVVTDLKAESVVLEHRSYCSAKARDRHFAGDVLGYVTPWNSHGYDVTKVFGSKFTQISPVWLQLKRRGREMFEVTGLHDVDQGWMRAVRKHAKGLHIVPRLLFEDWTYDDFRNVLDSEDEIEELSKTVVQVAKNQHFDGFVVEVWNQLLSQKRVGLIHMLTHLAEALHQARLLALLVIPPAITPGTDQLGMFTHKEFEQLAPVLDGFSLMTYDYSTAHQPGPNAPLSWVRACVQVLDPKSKWRSKILLGLNFYGMDYATSKDAREPVVGARYIQTLKDHRPRMVWDSQVSEHFFEYKKSRSGRHVVFYPTLKSLQVRLELARELGVGVSIWELGQGLDYFYDLL

SEQ ID NO: 1028359 - protein, 502 aa, Homo sapiens
RGGGARAPGAGLPARWSVFRPCVCGRPASLTCRFPPRRQRRSQWSWNGLGSKTGCLGAEAATVSAWPASRNCRGCSSTHCLCLWLHVLGAAVLASPLDPEVGPYCDTPTMRTLFNLLWLALACSPVHTTLSKSDAKKAASKTLLEKSQFSDKPVQDRGLVVTDLKAESVVLEHRSYCSAKARDRHFAGDVLGYVTPWNSHGYDVTKVFGSKFTQISPVWLQLKRRGREMFEVTGLHDVDQGWMRAVRKHAKGLHIVPRLLFEDWTYDDFRNVLDSEDEIEELSKTVVQVAKNQHFDGFVVEVWNQLLSQKRVGLIHMLTHLAEALHQARLLALLVIPPAITPGTDQLGMFTHKEFEQLAPVLDGFSLMTYDYSTAHQPGPNAPLSWVRACVQVLDPKSKWRSKILLGLNFYGMDYATSKDAREPVVGARYIQTLKDHRPRMVWDSQVSEHFFEYKKSRSGRHVVFYPTLKSLQVRLELARELGVGVSIWELGQGLDYFYDLL

SEQ ID NO: 1028360 - protein, 440 aa, Homo sapiens; identical to SEQ ID NO: 1028355

SEQ ID NO: 1028361 - protein, 354 aa, Homo sapiens
RGGGARAPGAGLPARWSVFRPCVCGRPASLTCSPLDPEVGPYCDTPTMRTLFNLLWLALACSPVHTTLSKSDAKKAASKTLLEKSQFSDKPVQDRGLVVTDLKAESVVLEHRSYCSAKARDRHFAGDVLGYVTPWNSHGYDVTKVFGSKFTQISPVWLQLKRRGREMFEVTGLHDVDQGWMRAVRKHAKGLHIVPRLLFEDWTYDDFRNVLDSEDEIEELSKTVVQVAKNQHFDGFVVEVWNQLLSQKRVGLIHMLTHLAEALHQARLLALLVIPPAITPGTDQLGMFTHKEFEQLAPVLDGFSLMTYDYSTAHQPGPNAPLSWVRACVQVLDPKSKWRSKILLGLNFYGTSRH

SEQ ID NO: 1028362 - protein, 367 aa, Homo sapiens
RGGGARAPGAGLPARWSVFRPCVCGRPASLTCSPLDPEVGPYCDTPTMRTLFNLLWLALACSPVHTTLSKSDAKKAASKTLLEKSQFSDKPVQDRGLVVTDLKAESVVLEHRSYCSAKARDRHFAGDVLGYVTPWNSHGYDVTKVFGSKFTQISPVWLQLKRRGREMFEVTGLHDVDQGWMRAVRKHAKGLHIVPRLLFEDWTYDDFRNVLDSEDEIEELSKTVVQVAKNQHFDGFVVEVWNQLLSQKRVGLIHMLTHLAEALHQARLLALLVIPPAITPGTDQLGMFTHKEFEQLAPVLDGFSLMTYDYSTAHQPGPNAPLSWVRACVQVLDPKSKWRSKILLGLNFYGMDYATSKDAREPVVGAR

SEQ ID NO: 1028363 - protein, 336 aa, Homo sapiens
ISVHGARGFELIVWWPIVCLVWHILGYVTPWNSHGYDVTKVFGSKFTQISPVWLQLKRRGREMFEVTGLHDVDQGWMRAVRKHAKGLHIVPRLLFEDWTYDDFRNVLDSEDEIEELSKTVVQVAKNQHFDGFVVEVWNQLLSQKRVGLIHMLTHLAEALHQARLLALLVIPPAITPGTDQLGMFTHKEFEQLAPVLDGFSLMTYDYSTAHQPGPNAPLSWVRACVQVLDPKSKWRSKILLGLNFYGMDYATSKDAREPVVGARYIQTLKDHRPRMVWDSQVSEHFFEYKKSRSGRHVVFYPTLKSLQVRLELARELGVGVSIWELGQGLDYFYDLL

SEQ ID NO: 1028364 - protein, 362 aa, Homo sapiens [sequence omitted]

SEQ ID NO: 1028365 - protein, 133 aa, Homo sapiens
RGGGARAPGAGLPARWSVFRPCVCGRPASLTCRFPPRRQRRSQWSWNGLGSKTGCLGAEAATVSAWPALWTPRLDPTVTHLPCGHSSTSSGLPWPAALFTLPCQSQMPKKPPQRRCWRRVSFQISRCKTGVWW

SEQ ID NO: 1028366 - protein, 440 aa, Homo sapiens; identical to SEQ ID NO: 1028355

SEQ ID NO: 1028367 - protein, 440 aa, Homo sapiens; identical to SEQ ID NO: 1028355

SEQ ID NO: 1028368 - protein, 549 aa, Homo sapiens
MFQWPRSDRTWSAIVAQVLPLGDPGQGLLVRTGQSHEAATVGKGPACADSANEESPRAAATPPRSTGQPGEDTNPAPKAPQPPGTSNNQVPPHPTGLPLPYSVPPMPTADRQWASRRASGQVRPGPTGQSLDLRQGNSNPTSPLDPEVGPYCDTPTMRTLFNLLWLALACSPVHTTLSKSDAKKAASKTLLEKSQFSDKPVQDRGLVVTDLKAESVVLEHRSYCSAKARDRHFAGDVLGYVTPWNSHGYDVTKVFGSKFTQISPVWLQLKRRGREMFEVTGLHDVDQGWMRAVRKHAKGLHIVPRLLFEDWTYDDFRNVLDSEDEIEELSKTVVQVAKNQHFDGFVVEVWNQLLSQKRVGLIHMLTHLAEALHQARLLALLVIPPAITPGTDQLGMFTHKEFEQLAPVLDGFSLMTYDYSTAHQPGPNAPLSWVRACVQVLDPKSKWRSKILLGLNFYGMDYATSKDAREPVVGARYIQTLKDHRPRMVWDSQVSEHFFEYKKSRSGRHVVFYPTLKSLQVRLELARELGVGVSIWELGQGLDYFYDLL

SEQ ID NO: 1028369 - protein, 440 aa, Homo sapiens; identical to SEQ ID NO: 1028355

SEQ ID NO: 1028370 - protein, 608 aa, Homo sapiens
RGGGARAPGAGLPARWSVFRPCVCGRPASLTCSPLDPEVGPYCDTPTMRTLFNLLWLALACSPVHTTLSKSDAKKAASKTLLEKSQFSDKPVQDRGLVVTDLKAESVVLEHRSYCSAKARDRHFAGDVLGYVTPWNSHGYDVTKVFGSKFTQISPVWLQLKRRGREMFEVTGLHDVDQGWMRAVRKHAKGLHIVPRLLFEDWTYDDFRNVLDSEDEIEELSKTVVQVAKNQHFDGFVVEVWNQLLSQKRVGLIHMLTHLAEALHQARLLALLVIPPAITPGTDQLGMFTHKEFEQLAPVLDGFSLMTYDYSTAHQPGPNAPLSWVRACVQVLDPKSKWRSKILLGLNFYGMDYATSKDAREPVVGAMFMEPLESAFVLLANLENLRPNSSNIFSVSSLLSSRLETTNTRSIEFVPQLTNTPFTFWNSFPVRRSLALSPRLELQLTAIWLAAALLPGHAISCLSLPSSWDYRRLPPRPANLVSLVEIGISPHKPGWSRSPDLMIRPSLASQSAGITGVSHHTGLGYYFLCFLVFTGKRGLPQNPGCVHVGANIAHGGPNTTGLKPSSQPQPRQISRGPRVHATYGPAIWHPPVEDGVRAHAARGWSHNP

SEQ ID NO: 1028371 - protein, 347 aa, Homo sapiens
RGGGARAPGAGLPARWSVFRPCVCGRPASLTCSPLDPEVGPYCDTPTMRTLFNLLWLALACSPVHTTLSKSDAKKAASKTLLEKSQFSDKPVQDRGLVVTDLKAESVVLEHRSYCSAKARDRHFAGDVLGYVTPWNSHGYDVTKVFGSKFTQISPVWLQLKRRGREMFEVTGLHDVDQGWMRAVRKHAKGLHIVPRLLFEDWTYDDFRNVLDSEDEIEELSKTVVQVAKNQHFDGFVVEVWNQLLSQKRVGLIHMLTHLAEALHQARLLALLVIPPAITPGTDQLGMFTHKEFEQLAPVLDGFSLMTYDYSTAHQPGPNAPEVQVAKQNPPGAQLLWYGLRDLQGCP

SEQ ID NO: 1028372 - protein, 401 aa, Homo sapiens
RGGGARAPGAGLPARWSVFRPCVCGRPASLTCSPLDPEVGPYCDTPTMRTLFNLLWLALACSPVHTTLSKSDAKKAASKTLLEKSQFSDKPVQDRGLVVTDLKAESVVLEHRSYCSAKARDRHFAGDVLGYVTPWNSHGYDVTKVFGSKFTQISPVWLQLKRRGREMFEVTGLHDVDQGWMRAVRKHAKGLHIVPRLLFEDWTYDDFRNVLDSEDEIEELSKTVVQVAKNQHFDGFVVEVWNQLLSQKRVGLIHMLTHLAEALHQARLLALLVIPPAITPGPLSWVRACVQVLDPKSKWRSKILLGLNFYGMDYATSKDAREPVVGARYIQTLKDHRPRMVWDSQVSEHFFEYKKSRSGRHVVFYPTLKSLQVRLELARELGVGVSIWELGQGLDYFYDLL

SEQ ID NO: 1028373 - protein, 362 aa, Homo sapiens
MRTLFNLLWLALACSPVHTTLSKSDAKKAASKTLLEKSQFSDKPVQDRGLVVTDLKAESVVLEHRSYCSAKARDRHFAGDVLGYVTPWNSHGYDVTKVFGSKFTQISPVWLQLKRRGREMFEVTGLHDVDQGWMRAVRKHAKGLHIVPRLLFEDWTYDDFRNVLDSEDEIEELSKTVVQVAKNQHFDGFVVEVWNQLLSQKRVTDQLGMFTHKEFEQLAPVLDGFSLMTYDYSTAHQPGPNAPLSWVRACVQVLDPKSKWRSKILLGLNFYGMDYATSKDAREPVVGARYIQTLKDHRPRMVWDSQASEHFFEYKKSRSGRHVVFYPTLKSLQVRLELARELGVGVSIWELGQGLDYFYDLL

SEQ ID NO: 1028374 - protein, 67 aa, Homo sapiens
MGARHLDGTNPTNPDYSASLLPDWLTCTFIKSGHHVPGVYPRVGGGGGGGGEMRAPGFTPPKGVVGC

SEQ ID NO: 1028375 - protein, 111 aa, Homo sapiens
MLAQPNNVCRSPVTLPKAFITRAKQKFSTTTQQLDQDYYAVAPVLPMRETDGTNPTNPDYSASLLPDWLTCTFIKSGHHVPGVYPRVGGGGGGGGEMRAPGFTPPKGCGGV

SEQ ID NO: 1028376 - protein, 104 aa, Homo sapiens
LGPRYACRAGYFNAAALGLSNDNENAVGVRSRAPLMSINTLKPKRLPPDAPDYSASLLPDWLTCTFIKSGHHVPGVYPRVGGGGGGGGEMRAPGFTPPKGCGGV

SEQ ID NO: 1028377 - protein, 121 aa, Homo sapiens
MDRWEDYEIGGNHVQQDDGGTDDYWQQQWRTNWKTVKPDSLPMLPTEMPATTTPAGLGAVSVTSGSYPDYSASLLPDWLTCTFIKSGHHVPGVYPRVGGGGGGGGEMRAPGFTPPKGVVGC

SEQ ID NO: 1028378 - protein, 174 aa, Homo sapiens
IVDIIEKTYQTTGDQDTNIANDIKKPGLKRSAEPYLQHIIVILTVNYNGVTYAVNGGPAATIEYSVHCDHAAGTLPIWFGQYLRNIIIRKNETIKFGGKTSISCQAKGNINDRVYLIRNWVPDYSASLLPDWLTCTFIKSGHHVPGVYPRVGGGGGGGGEMRAPGFTPPKGVVG

SEQ ID NO: 1028379 - protein, 129 aa, Homo sapiens
DATFGTLAAMTAHVNALCCLPFGNDAATICTAEKMAYCAPRATWACVAVVPYVILARGNCSDCERNLDDRLAAFAVCVPTMCGQRPFVTRAVGGPRFVYPRPTPTTHNCGMGLLRTLYMHCTREWSFKC

SEQ ID NO: 1028380 - protein, 102 aa, Homo sapiens
MACCVLKLAEKSTPNKPTESESTELVIPIVPQKFQIKGLDLQQALTTFPDYSASLLPDWLTCTFIKSGHHVPGVYPRVGGGGGGGGERGPRGLPPRKGVVGC

SEQ ID NO: 1028381 - protein, 58 aa, Homo sapiens
MTTFPDYSASLLPDWLTCTFIKSGHHVPGVYPRVGGGGGGGGEMRAPGFTPPKGVVGC

SEQ ID NO: 1028382 - protein, 114 aa, Homo sapiens
LSTGKGRTSGPVVAAPLTPKETFGVPGYVSFSVSVPNVRRSYKYRIHPPPLTFNKQPPDAPDYSASLLPDWLTCTFIKSGHHVPGVYPRVGGGGGGGGEMTARGLPPRKGVVGC

SEQ ID NO: 1028383 - protein, 78 aa, Homo sapiens
MRYLGVVRFNAPGYYGAVTLCIARPDYSASLLPDWLTCTFIKSGHHVPGVYPRVGGGGGGGGEMTARGLPPRKGVVGC

SEQ ID NO: 1028384 - protein, 100 aa, Homo sapiens
MNTAAECWLNRTMFVGARSRYPKRSSRVPSKSLVRRHNNLTRITMHPDYSASLLPDWLTCTFIKSGHHVPGVYPRVGGGGGGGGEMRAPGFTPPKGVVGC

SEQ ID NO: 1028385 - protein, 67 aa, Homo sapiens
MRYNGLTLLCIARPDYSASLLPDWLTCTFIKSGHHVPGVYPRVGGGGGGGGEMRAPGFTPPKGVVGC

SEQ ID NO: 1028386 - protein, 95 aa, Homo sapiens
VIRVCVTEYDRQHYIKSTGDHGNTAKRTSTQKATPGPPELIPDYSASLLPDWLTCTFIKSGHHVPGVYPRVGGGGGGGGEMRAPGFTPPKGVVGC

SEQ ID NO: 1028387 - protein, 58 aa, Homo sapiens
MHSGPDYSASLLPDWLTCTFIKSGHHVPGVYPRVGGGGGGGGERGPRGLPPRKGVVGC

SEQ ID NO: 1028388 - protein, 65 aa, Homo sapiens
MLPVQQALTTFPDYSASLLPDWLTCTFIKSGHHVPGVYPRVGGGGGGGGEMRAPGFTPPKGVVGC

SEQ ID NO: 1028389 - protein, 133 aa, Homo sapiens
SVRRRYTVIDVRPGAGNNGVDGGGPGKPTDAENGIWELDPEVWVETKGLQGGKPMVINAVCSKYKGGGIGVLKRLCIARPDYSASLLPDWLTCTFIKSGHHVPGVYPRVGGGGGGGGEMRAPGFTPPKGVVGC

SEQ ID NO: 1028390 - protein, 100 aa, Homo sapiens
MSNITMLQDFAMELLMHYLVGKVMYHTKLKRETDQQLRKYQALTTFPDYSASLLPDWLTCTFIKSGHHVPGVYPRVGGGGGGGGEMTAPGFPPRKGVVGC

SEQ ID NO: 1028391 - protein, 109 aa, Homo sapiens
MHNSLAALTLGMPMREPCYDDYTKTSHTSKRGHGPNKMTPARTGVSATVGIMHSAPDYSASLLPDWLTCTFIKSGHHVPGVYPRVGGGGGGGGEMRAPGFTPPKGVVGC

SEQ ID NO: 1028392 - protein, 114 aa, Homo sapiens
LLYSVRRMQETNTKKASTHNANGLNKEPPTKSLSRPTREKSIYSGQKISHIGALQLCIARPDYSASLLPDWLTCTFIKSGHHVPGVYPRVGGGGGGGGEMRAPGFTPPKGCGGV

SEQ ID NO: 1028393 - protein, 106 aa, Homo sapiens
MGSVVEYGAIGGNVGPVAEFSPRCSGLEKRIEMVEPKVVIDNRCRDFHQMLYPDYSASLLPDWLTCTFIKSGHHVPGVYPRVGGGGGGGGEMTARGLPPRKGVVGC

SEQ ID NO: 1028394 - protein, 92 aa, Homo sapiens
VLTHQPTPLMRACIAKDRPIIVEAVKSNRLGLIWDDGDPDYSASLLPDWLTCTFIKSGHHVPGVYPRVGGGGGGGGEMRAPGFTPPKGCGGV

SEQ ID NO: 1028395 - protein, 96 aa, Homo sapiens
YRYVCSRRLTRKIFSAVKIGRRCKRAILDTSPEDFRTSSLGCPDYSASLLPDWLTCTFIKSGHHVPGVYPRVGGGGGGGGEMRAPGFTPPKGVVGC

SEQ ID NO: 1028396 - protein, 84 aa, Homo sapiens
MPIVAAILICYRRPLLPLPDRINTTSPPERPDYSASLLPDWLTCTFIKSGHHVPGVYPRVGGGGGGGGEMTARGLPPRKGVVGC

SEQ ID NO: 1028397 - protein, 86 aa, Homo sapiens
VIRVCVTEYDRQHYIKSTGDHGHPARKRPTRAPDYSASLLPDWLTCTFIKSGHHVPGVYPRVGGGGGGGGEMTARGLPPRKGVVGC

SEQ ID NO: 1028398 - protein, 99 aa, Homo sapiens
AVLTVAVNMYLMAGARWIHGLHSHSLPTPNFTTHGKASAYCITTTPDYSASLLPDWLTCTFIKSGHHVPGVYPRVGGGGGGGGEMRAPGFTPPKGVVGC

SEQ ID NO: 1028399 - protein, 69 aa, Homo sapiens
MIESNNWKQQLKPTFPDYSASLLPDWLTCTFIKSGHHVPGVYPRVGGGGGGGGEMRAPGFTPPKGVVGC

SEQ ID NO: 1028400 - protein, 93 aa, Homo sapiens
MWTSRRFVIGRWGLVIYDGLTFLWLARFHTRLKIPTRCRPDYSASLLPDWLTCTFIKSGHHVPGVYPRVGGGGGGGGEMRAPGFTPPKGVVGC

SEQ ID NO: 1028401 - protein, 134 aa, Homo sapiens
MNTAAECWLNRTMFVGARSRYPKRSSRVPSKSLVRRHNNLTRITMQSRRFCQCVKPQTLTYAAWTPRLVDTPEDGTNPTNPDYSASLLPDWLTCTFIKSGHHVPGVYPRVGGGGGGGGEMRAPGFTPPKGCGGV

SEQ ID NO: 1028402 - protein, 67 aa, Homo sapiens; identical to SEQ ID NO: 1028374

SEQ ID NO: 1028403 - protein, 135 aa, Homo sapiens
MIPTVPVYERLVHQTRYLPLTFVTAYTVAAFCGVHLHLLHRVSNALYAKVSVSTFAALLTSRGLRCCTALWPLVCLTSGSYPDYSASLLPDWLTCTFIKSGHHVPGVYPRVGGGGGGGGEMRAPGFTPPKGVVGC

SEQ ID NO: 1028404 - protein, 121 aa, Homo sapiens
MTKTAEEKDEEYNRGGAGGSRAGGKSNDKLLTLQMEVSKKGKRPELSKIKRTAGYHYALRRLQTSGSYPDYSASLLPDWLTCTFIKSGHHVPGVYPRVGGGGGGGGEMRAPGFTPPKGVVG

SEQ ID NO: 1028405 - protein, 155 aa, Homo sapiens
RSELSLGGWSIHGAHVWEIGYNILDVLRLLVLTVYSISERKKTRAKSINMFAYRRALWLCYGYCYLPKGRLLHMLIWQLSVEFARKNRKYSASRKQAAHYIPDYSASLLPDWLTCTFIKSGHHVPGVYPRVGGGGGGGGEMRAPGFTPPKGVVGC

SEQ ID NO: 1028406 - protein, 148 aa, Homo sapiens
MGHCYLPWATLSDKYYWIKNIGFRLELLLEPMKEEVGSERVAGAIADKPAYVYRMKGRLPVHVVLNQVHNLASLILEINDKHAVERLTLLCIARPDYSASLLPDWLTCTFIKSGHHVPGVYPRVGGGGGGGGERGPRGLPPRKGVVGC

SEQ ID NO: 1028407 - protein, 72 aa, Homo sapiens
YSVRQNRLVIRCNGVVICGHLSGNTTGGHGDEHEDTHEQKDDDYNEHYKLVPLNIRQVPGYICYFNIMPVVY

SEQ ID NO: 1028408 - protein, 68 aa, Homo sapiens
MLLAGRKDGTNPTNPDYSASLLPDWLTCTFIKSGHHVPGVYPRVGGGGGGGGEMTARGLPPRKGVVGC

SEQ ID NO: 1028409 - protein, 82 aa, Homo sapiens
MVASHQSPPDATRAPPDAHQTTTTPPDAPDYSASLLPDWLTCTFIKSGHHVPGVYPRVGGGGGGGGEMTARGLPPRKGVVGC

SEQ ID NO: 1028410 - protein, 159 aa, Homo sapiens
VSSGEPFYWEPKLIPRITMNPSRVVQEEKIETEEENPGVKKDENEGGDRGKGEHKGDRERQQKLKKGFKLQIGHMPNCRSTKGSTEDIPIEIDTGEAEKQAAHYIPDYSASLLPDWLTCTFIKSGHHVPGVYPRVGGGGGGGGEMRAPGFTPPKGVVGC

SEQ ID NO: 1028411 - protein, 132 aa, Homo sapiens
DAWHSMIHVARARPLDTEFNVCALGHVLGADKNAAIHCVRRRSYQKEHNKYTHACIHDMKGKVDDYSPASRRRLCIARPDYSASLLPDWLTCTFIKSGHHVPGVYPRVGGGGGGGGEMRAPGFTPPKGCGGV

SEQ ID NO: 1028412 - protein, 116 aa, Homo sapiens
MRWHYTLVRFVTRKWETVRRTSNGLAELSAYISYINFSANQTWRYASVGLAKNHLVLHLFDTNPDYSASLLPDWLTCTFIKSGHHVPGVYPRVGGGGGGGGEMRAPGFTPPKGVVG

SEQ ID NO: 1028413 - protein, 67 aa, Homo sapiens
MSSVAMLKVLTRAPDYSASLLPDWLTCTFIKSGHHVPGVYPRVGGGGGGGGEMRAPGFTPPKGVVGC

SEQ ID NO: 1028414 - protein, 89 aa, Homo sapiens
TPKKQTVCCEVSAGGPIWRRLNDKIVPIRLCTGRGPDYSASLLPDWLTCTFIKSGHHVPGVYPRVGGGGGGGGEMRAPGFTPPKGVVGC

SEQ ID NO: 1028415 - protein, 91 aa, Homo sapiens
VSSCVVTYGPCVALSICRVYKIAIRILAFEDGTNPTNPDYSASLLPDWLTCTFIKSGHHVPGVYPRVGGGGGGGGEMRAPGFTPPKGVVGC

SEQ ID NO: 1028416 - protein, 105 aa, Homo sapiens
VITSFIELYTSCLEFWLVLNTDTGERVRERKTKANALDLSTRETSAGATRAPDYSASLLPDWLTCTFIKSGHHVPGVYPRVGGGGGGGGEMRAPGFTPPKGCGGV

SEQ ID NO: 1028417 - protein, 87 aa, Homo sapiens
ESLERYGKCALLTCCVTLLDHQSPPEHQSPPDAPDYSASLLPDWLTCTFIKSGHHVPGVYPRVGGGGGGGGEMTARGLPPRKGVVGC

SEQ ID NO: 1028418 - protein, 71 aa, Homo sapiens
MMMQAMGRLTTRAHEIRPDYSASLLPDWLTCTFIKSGHHVPGVYPRVGGGGGGGGEMRAPGFTPPKGVVGC

SEQ ID NO: 1028419 - protein, 104 aa, Homo sapiens
MWTSPVTLPKAFITRAKQKFSTTTQQLDQDYYAVAPVLPMRETDGTNPTNPDYSASLLPDWLTCTFIKSGHHVPGVYPRVGGGGGGGGEMRAPGFTPPKGCGGV

SEQ ID NO: 1028420 - protein, 104 aa, Homo sapiens
MLAQPNNVCRSPVTLPKAFITRAKQKFSTTTQQLDQDYYAVAPVLPMRETPDYSASLLPDWLTCTFIKSGHHVPGVYPRVGGGGGGGGEMRAPGFTPAKGCGGV

SEQ ID NO: 1028421 - protein, 158 aa, Homo sapiens
LSVMLRHDACICPVIMQYYYTIFQMIKQDKQDDENTMDKLKKKNKGTNIKLGVIEDHSNRTRLAKLLRFQSSHHPTDITSLDQYVERMKEKQDKIYFMAGSSRKEAESSPFVERLLKKGYEVIYLTEPVDEYCIQALPEFDGKRFQNVAKEGVKFDEQ

SEQ ID NO: 1028422 - protein, 475 aa, Homo sapiens
MPSLQPVVMCVMKHLPKVPEKKLKLVMADKELYRACAVEVKRQIWQDNQALFGDEVSPLLKQYILEKESALFSTELSVLHNFFSPSPKTRRQGEVVQRLTRMVGKNVKLYDMVLQFLRTLFLRTRNVHYCTLRAELLMSLHDLDVGEICTVDPCHKFTWCLDACIRERFVDSKRARELQGFLDGVKKGQEQVLGDLSMILCDPFAINTLALSTVRHLQELVGQETLPRDSPDLLLLLRLLALGQGAWDMIDSQVFKEPKMEVELITRFLPMLMSFLVDDYTFNVDQKLPAEEKAPVSYPNTLPESFTKFLQEQRMACEVGLYYVLHITKQRNKNALLRLLPGLVETFGDLAFGDIFLHLLTGNLALLADEFALEDFCSSLFDGFFLTASPRKENVHRHALRLLIHLHPRVAPSKLEALQKALEPTGQSGEAVKELYSQLGEKLEQLDHRKPSPAQAAETPALELPLPSVPAPAPL

SEQ ID NO: 1028423 - protein, 475 aa, Homo sapiens; identical to SEQ ID NO: 1028422

SEQ ID NO: 1028424 - protein, 374 aa, Homo sapiens
MVGKNVKLYDMVLQFLRTLFLRTRNVHYCTLRAELLMSLHDLDVGEICTVDPCHKFTWCLDACIRERFVDSKRARELQGFLDGVKKGQEQVLGDLSMILCDPFAINTLALSTVRHLQELVGQETLPRDSPDLLLLLRLLALGQGAWDMIDSQVFKEPKMEVELITRFLPMLMSFLVDDYTFNVDQKLPAEEKAPVSYPNTLPESFTKFLQEQRMACEVGLYYVLHITKQRNKNALLRLLPGLVETFGDLAFGDIFLHLLTGNLALLADEFALEDFCSSLFDGFFLTASPRKENVHRHALRLLIHLHPRVAPSKLEALQKALEPTGQSGEAVKELYSQLGEKLEQLDHRKPSPAQAAETPALELPLPSVPAPAPL

SEQ ID NO: 1028425 - protein, 724 aa, Homo sapiens
RFPGGLVGVADLGGCGAEVGGCGTRAESRGGRDLAELEGAGERGSGGPRGPAERASGVSAAAPGERAGDGAPSRAVAGASAMFAGLQDLGVANGEDLKETLTNCTEPLKAIEQFQTENGVLLPSLQSALPFLDLHGTPRLEFHQSVFDELRDKLLERVSAIASEGKAEERYKKLEDLLEKSFSLVKMPSLQPVVMCVMKHLPKVPEKKLKLVMADKELYRACAVEVKRQIWQDNQALFGDEVSPLLKQYILEKESALFSTELSVLHNFFSPSPKTRRQGEVVQRLTRMVGKNVKLYDMVLQFLRTLFLRTRNVHYCTLRAELLMSLHDLDVGEICTVDPCHKFTWCLDACIRERFVDSKRARELQGFLDGVKKGQEQVLGDLSMILCDPFAINTLALSTVRHLQELVGQETLPRDSPDLLLLLRLLALGQGAWDMIDSQVFKEPKMEVELITRFLPMLMSFLVDDYTFNVDQKLPAEEKAPVSYPNTLPESFTKFLQEQRMACEVGLYYVLHITKQRNKNALLRLLPGLVETFGDLAFGDIFLHLLTGNLALLADEFALEDFCSSLFDGFFLTASPRKENVHRHALRLLIHLHPRVAPSKLEALQKALEPTGQSGEAVKELYSQLGEKLEQLDHRKPSPAQAAETPALELPLPSVPPCRVAALLSRKRLPDLDVQGSLSSRGYGWACPAVMAPCFLLLGAGSRTLPTIHAVAPRAEPLLVLWQP

SEQ ID NO: 1028426 - protein, 374 aa, Homo sapiens; identical to SEQ ID NO: 1028424

SEQ ID NO: 1028427 - protein, 661 aa, Homo sapiens
RFPGGLVGVADLGGCGAEVGGCGTRAESRGGRDLAELEGAGERGSGGPRGPAERASGVSAAAPGERAGDGAPSRAVAGASAMFAGLQDLGVANGEDLKETLTNCTEPLKAIEQFQTENGVLLPSLQSALPFLDLHGTPRLEFHQSVFDELRDKLLERVSAIASEGKAEERYKKLEDLLEKSFSLVKMPSLQPVVMCVMKHLPKVPEKKLKLVMADKELYRACAVEVKRQIWQDNQALFGDEVSPLLKQYILEKESALFSTELSVLHNFFSPSPKTRRQGEVVQRLTRMVGKNVKLYDMVLQFLRTLFLRTRNVHYCTLRAELLMSLHDLDVGEICTVDPCHKFTWCLDACIRERFVDSKRARELQGFLDGVKKGQEQVLGDLSMILCDPFAINTLALSTVRHLQELVGQETLPRDSPDLLLLLRLLALGQGAWDMIDSQVFKEPKMEVELITRFLPMLMSFLVDDYTFNVDQKLPAEEKAPVSYPNTLPESFTKFLQEQRMACEVGLYYVLHITKQRNKNALLRLLPGLVETFGDLAFGDIFLHLLTGNLALLADEFALEDFCSSLFDGFFLTASPRKENVHRHALRLLIHLHPRVAPSKLEALQKALEPTGQSGEAVKELYSQLGEKLEQLDHRKPSPAQAAETPALELPLPSVPAPAPL

SEQ ID NO: 1028428 - protein, 221 aa, Homo sapiens
KFLIHIESVVIHQEDMSIGRNLVDDYTFNVDQKLPAEEKAPVSYPNTLPESFTKFLQEQRMACEVGLYYVLHITKQRNKNALLRLLPGLVETFGDLAFGDIFLHLLTGNLALLADEFALEDFCSSLFDGFFLTASPRKENVHRHALRLLIHLHPRVAPSKLEALQKALEPTGQSGEAVKELYSQLGEKLEQLDHRKPSPAQAAETPALELPLPSVPAPAPL

SEQ ID NO: 1028429 - protein, 578 aa, Homo sapiens
RFPGGLVGVADLGGCGAEVGGCGTRAESRGGRDLAELEGAGERGSGGPRGPAERASGVSAAAPGERAGDGAPSRAVAGASAMFAGLQDLGVANGEDLKETLTNCTEPLKAIEQFQTENGVLLPSLQSALPFLDLHGTPRLEFHQSVFDELRDKLLERVSAIASEGKAEERYKKLEDLLEKSFSLVKMPSLQPVVMCVMKHLPKVPEKKLKLVMADKELYRACAVEVKRQIWQDNQALFGDEVSPLLKQYILEKESALFSTELSVLHNFFSPSPKTRRQGEVVQRLTRMVGKNVKLYDMVLQFLRTLFLRTRNVHYCTLRAELLMSLHDLDVGEICTVDPCHKFTWCLDACIRERFVDSKRARELQGFLDGVKKGQEQVLGDLSMILCDPFAINTLALSTVRHLQELVGQETLPRDSPDLLLLLRLLALGQGAWDMIDSQVFKEPKMEVELITRFLPMLMSFLVDDYTFNVDQKLPAEEKAPVSYPNTLPESFTKFLQEQRMACEVGLYYVLHITKQRNKNALLRLLPGLVETFGDLALGNLPPPVPGHLGCGENGLRLLGGLRRFPPPPGRRPGRGPN

SEQ ID NO: 1028430 - protein, 157 aa, Homo sapiens [sequence omitted]

SEQ ID NO: 1028431 - protein, 262 aa, Homo sapiens
RFPGGLVGVADLGGCGAEVGGCGTRAESRGGRDLAELEGAGERGSGGPRGPAERASGVSAAAPGERAGDGAPSRAVAGASAMFAGLQDLGVANGEDLKETLTNCTEPLKAIEQFQTENGVLLPSLQSALPFLDLHGTPRLEFHQSVFDELRDKLLERVSAIASEGKAEERYKKLEDLLEKSFSLVKMPSLQPVVMCVMKHLPKVGPYPNPDGVDRPPTLMPLVSGSSGGRLAPGASCAACPSAVHGELCADFSHMSRVETEP

SEQ ID NO: 1028432 - protein, 322 aa, Homo sapiens
KLRLGTRPGWCFFSPSPKTRRQGEVVQRLTRMVGKNVKLYDMVLQFLRTLFLRTRNVHYCTLRAELLMSLHDLDVGEICTVDPCHKFTWCLDACIRERFVDSKRARELQGFLDGVKKGQEQVLGDLSMILCDPFAINTLALSTVRHLQELVGQETLPRDSPDLLLLLRLLALGQGAWDMIDSQVFKEPKMEVELITRFLPMLMSFLVDDYTFNVDQKLPAEEKAPVSYPNTLPESFTKFLQEQRMACEVGLYYVLHITKQRNKNALLRLLPGLVETFGDLALGNLPPPVPGHLGCGENGLRLLGGLRRFPPPPGRRPGRGPN

SEQ ID NO: 1028433 - protein, 405 aa, Homo sapiens
KLRLGTRPGWCFFSPSPKTRRQGEVVQRLTRMVGKNVKLYDMVLQFLRTLFLRTRNVHYCTLRAELLMSLHDLDVGEICTVDPCHKFTWCLDACIRERFVDSKRARELQGFLDGVKKGQEQVLGDLSMILCDPFAINTLALSTVRHLQELVGQETLPRDSPDLLLLLRLLALGQGAWDMIDSQVFKEPKMEVELITRFLPMLMSFLVDDYTFNVDQKLPAEEKAPVSYPNTLPESFTKFLQEQRMACEVGLYYVLHITKQRNKNALLRLLPGLVETFGDLAFGDIFLHLLTGNLALLADEFALEDFCSSLFDGFFLTASPRKENVHRHALRLLIHLHPRVAPSKLEALQKALEPTGQSGEAVKELYSQLGEKLEQLDHRKPSPAQAAETPALELPLPSVPAPAPL

SEQ ID NO: 1028434 - protein, 661 aa, Homo sapiens; identical to SEQ ID NO: 1028427

SEQ ID NO: 1028435 - protein, 355 aa, Homo sapiens
GVSLGAWLAWRTWAVRGGSGRLRDARGVARRAGPGRAGGRRGAGLGRSPRPGGAGFWGVCGGAGVKKGQEQVLGDLSMILCDPFAINTLALSTVRHLQELVGQETLPRDSPDLLLLLRLLALGQGAWDMIDSQVFKEPKMEVELITRFLPMLMSFLVDDYTFNVDQKLPAEEKAPVSYPNTLPESFTKFLQEQRMACEVGLYYVLHITKQRNKNALLRLLPGLVETFGDLAFGDIFLHLLTGNLALLADEFALEDFCSSLFDGFFLTASPRKENVHRHALRLLIHLHPRVAPSKLEALQKALEPTGQSGEAVKELYSQLGEKLEQLDHRKPSPAQAAETPALELPLPSVPAPAPL

SEQ ID NO: 1028436 - protein, 635 aa, Homo sapiens
RFPGGLVGVADLGGCGAEVGGCGTRAESRGGRDLAELEGAGERGSGGPRGPAERASGVSAAAPGERAGDGAPSRAVAGASAMFAGLQDLGVANGEDLKETLTNCTEPLKAIEQFQTENGVLLPSLQSALPFLDLHGTPRLEFHQSVFDELRDKLLERVSAIASEGKAEERYKKLEDLLEKSFSLVKMPSLQPVVMCVMKHLPKVPEKKLKLVMADKELYRACAVEVKRQIWQDNQALFGDEVSPLLKQYILEKESALFSTELSVLHNFFSPSPKTRRQGEVVQRLTRMVGKNVKLYDMVLQFLRTLFLRTRNVHYCTLRAELLMSLHDLDVGEICTVDPCHKFTWCLDACIRERFVDSKRARELQGFLDGVKKGQEQVLGDLSMILCDPFAINTLALSTVRHLQELVGQETLPRDSPDLLLLLRLLALGQGAWDMIDSQVFKEPKMEVELITRFLPMLMSFLVDDYTFNVDQKLPAEEKAPVSYPNTLPESFTKFLQEQRMACEVGLYYVLHITMQWLPGQSLSLYFGSHRKRAHFLFSCVRKKPPVFQGERAGPEGGGGASSLAQLGESEAHCLLPWGCGDGPVTSWRPCGGSSLACAMVGVLGPVRREPPHPAAQVAGVALFLLAQQCCLQRP

SEQ ID NO: 1028437 - protein, 620 aa, Homo sapiens
RFPGGLVGVADLGGCGAEVGGCGTRAESRGGRDLAELEGAGERGSGGPRGPAERASGVSAAAPGERAGDGAPSRAVAGASAMFAGLQDLGVANGEDLKETLTNCTEPLKAIEQFQTENGVLLPSLQSALPFLDLHGTPRLEFHQSVFDELRDKLLERVSAIASEGKAEERYKKLEDLLEKSFSLVKMPSLQPVVMCVMKHLPKVPEKKLKLVMADKELYRACAVEVKRQIWQDNQALFGDEVSPLLKQYILEKESALFSTELSVLHNFFSPSPKTRRQGEVVQRLTRMVGKNVKLYDMVLQFLRTLFLRTRNVHYCTLRAELLMSLHDLDVGEICTVDPCHKFTWCLDACIRERFVDSKRARELQGFLDGVKKGQEQVLGDLSMILCDPFAINTLALSTVRHLQELVGQETLPRDSPDLLLLLRLLALGQGAWDMIDSQVFKEPKMEVELITRFLPMLMSFLVDDYTFNVDQKLPAEEKAPVSYPNTLPESFTKFLQEQRMACEVGLYYVLHITKQRNKNALLRLLPGLVETFGDLAFGDIFLHLLTGNLALLADEFALEDFCSSLFDGFFLTLQPRLQVWPCFSLPSSAAFSGRDGASWTHGEIFSYVNKRQFGKREKK

SEQ ID NO: 1028438 - protein, 299 aa, Homo sapiens
RFPGGLVGVADLGGCGAEVGGCGTRAESRGGRDLAELEGAGERGSGGPRGPAERASGVSAAAPGERAGDGAPSRAVAGASAMFAGLQDLGVANGEDLKETLTNCTEPLKAIEQFQTENGVLLPSLQSALPFLDLHGTPRLEFHQSVFDELRDKLLERVSAIASEGKAEERYKKLEDLLEKSFSLVKMPSLQPVVMCVMKHLPKVPEKKLKLVMADKELYRACAVEVKRQIWQDNQALFGDEVSPLLKQYILEKESALFSTELSVLHNFFSPSPKTRRQGEKAEPGVQDENMKADKERDH

SEQ ID NO: 1028439 - protein, 475 aa, Homo sapiens; identical to SEQ ID NO: 1028422

SEQ ID NO: 1028440 - protein, 475 aa, Homo sapiens; identical to SEQ ID NO: 1028422

SEQ ID NO: 1028441 - protein, 200 aa, Homo sapiens
MLAVIIGSEMCHIHRASVRGRKLFHSKCISWSYRNRGYDARIHRKVIVNASVFSTKLIVYSSDVCGSWNAPRKRIAVNAFIMMMLAYSAMKNMAKGPAAYSTLKPDTSSDSPSVRSNGARLVSARVEINHIMARGQDVKIIQMCSCVVIRVDRVYDPFIRSTDSRMIASVTSYEIVWATARRAPMSAYFELDAHPDHRIE

SEQ ID NO: 1028442 - protein, 176 aa, Homo sapiens
VGRAHLEPELGIRIEKKTQQRVIVNASVFSTKLIVYSSDVCGSWNAPRKRIAVNAFIMMMLAYSAMKNMAKGPAAYSTLKPDTSSDSPSVRSNGARLVSARVEINHIMARGQDVKIIQMCSCVVIRVDRVYDPFIRSTDSRMIASVTSYEIVWATARRAPMSAYFELDAHPDHRIE

SEQ ID NO: 1028443 - protein, 152 aa, Homo sapiens
GQDVKIIQMCSCVVIQGGSWNAPRKRIAVNAFIMMMLAYSAMKNMAKGPAAYSTLKPDTSSDSPSVRSNGARLVSARVEINHIMARGQDVKIIQMCSCVVIRVDRVYDPFIRSTDSRMIASVTSYEIVWATARRAPMSAYFELDAHPDHRIE

SEQ ID NO: 1028444 - protein, 102 aa, Homo sapiens
VRRPLSCENDLDFCPLHGAMFRLVSARVEINHIMARGQDVKIIQMCSCVVIRVDRVYDPFIRSTDSRMIASVTSYEIVWATARRAPMSAYFELDAHPDHRIE

SEQ ID NO: 1028445 - protein, 124 aa, Homo sapiens
MNHQQTGGVGGLSYVGGYVSAAALLSLIAVLCLKETRDNDLNKVPDRPPSRASPLPHLTEFQHENAVKCGSGLARKGATRLQLYYNSLGSTGRFSPSRFNRLIPRQRHAHPTLTIHTSPYLENK

SEQ ID NO: 1028446 - protein, 110 aa, Homo sapiens
HADGGVEKREPCYTVGGIEIGATTVENSMVIPQKTRIDLGIPLLGIYPEKTMTQKDACTRMFTEALFSIAKTWKQPKCPSAEEWIKKIWYPSATRRWVFCKVERGSVGFC

SEQ ID NO: 1028447 - protein, 102 aa, Homo sapiens
GAGLPHHHHDEGLLLLLSNGARLVSARVEINHIMARGQDVKIIQMCSCVVIRVDRVYDPFIRSTDSRMIASVTSYEIVWATARRAPMSAYFELDAHPDHRIE

SEQ ID NO: 1028448 - protein, 116 aa, Homo sapiens
MDHHSTYAALSLVTLSVSLHVLHSAPDVQDCPECTPQENPFFSQPGAPKLQGMGCCFSRAYPTPLRSKKTMLVQKNVTSESTCCVAKSYNRVTVMGGFKVENHTACHCSTCYYHKS

SEQ ID NO: 1028449 - protein, 175 aa, Homo sapiens
ITREETPLKTEGKKIPFFRVSNSSNPGPCEPHFRCKIEAPMRKEGRRQWRIQPYKENIYCEANLSGAHCECGCFSCIVTHIRVSSDVQDCPECTPQENPFFSQPGAPKLQGMGCCFSRAYPTPLRSKKTMLVQKNVTSESTCCVAKSYNRVTVMGGFKVENHTACHCSTCYYHKS

SEQ ID NO: 1028450 - protein, 134 aa, Homo sapiens
MKACSGTAWLARHPEDRTTASISRGFILVINAPLGFLARLHNPPEIGPKLLLKWGHLLLNRKAYACYYRPRRVPPALRRPLLTHPKPLAQAPGRQPGLSRSRASFFAPHFRVPAFLREPLGLTWIRDNPCPLPP

SEQ ID NO: 1028451 - protein, 136 aa, Homo sapiens
MADHLGIPLGLGFDSCSLHCSQQSKKVWAEEKASDQQWQWQLWRTAKPSGLNGEASKSQEMVHFGEPRSRQKLQTMFMTADETMEPAEMWTLIVGCNSNPIILQRHNSCHHNHYREVVQLPHTMRGRVFHYKFFSA

SEQ ID NO: 1028452 - protein, 223 aa, Homo sapiens
RGAALQEVSSLVTPFLAVHPIPGAKTVPGSQRQLRQNRCYQQTKTHSTPVGRSHTTHGSESDGHSHGSQEGGANTTSGPIRTPQIPEWLIILASLLALALILAVCIAVNSRRRCGQKKKLVINSWQWQLWRTAKPSGLNGEASKSQEMVHFGEPRSRQKLQTMFMTADETMEPAEMWTLIVGCNSNPIILQRHNSCHHNHYREVVQLPHTMRGRVFHYKFFSA

SEQ ID NO: 1028453 - protein, 290 aa, Homo sapiens
TGTGPLAMTTQQSNSQSFWTAQEGLEEDRDHPTTGTRTSSHRNDVTGGRRDPDRSEGSTTVLEGYTSHYPHAKESRTFIPVTSAKTGSCGVTAVTVGDSHSNVNVPYQQTKTHSTPVGRSHTTHGSESDGHSHGSQEGGANTTSGPIRTPQIPEWLIILASLLALALILAVCIAVNSRRRCGQKKKLVINSWQWQLWRTAKPSGLNGEASKSQEMVHFGEPRSRQKLQTMFMTADETMEPAEMWTLIVGCNSNPIILQRHNSCHHNHYREVVQLPHTMRGRVFHYKFFSA

SEQ ID NO: 1028454 - protein, 32 aa, Homo sapiens
CYLHKRFFFFIVTKPHFSIDILISIFDWHVVL

SEQ ID NO: 1028455 - protein, 428 aa, Homo sapiens
MERTTCYPPLLLYEMRTEIPRRVPANDQAQYDLLMKRTCPTHVTRGIDLYRICLRYPVTSLRAFPAQKKKQKKERTKKKQNKGGGDPHIYLIFYTVSQLIKKSTHTSQQVRTRRKHNSKQRRREEENEQMSDSKRRRGRKRRTPETTREHGGFDLIKENTRSGARSRRGEREGGQRTEGRGQKRRGAAARQEKNAQGVASRRPAEQRLRRREEEDEERKDRHNSKDRKQKAAEEESDRRAREKDTNARDDCTTTQNARGKEKREDGSVPTSKQRKAKAKREKRQRPSGDHDRKDNREPNRTRTERERNKRSKKIPTQQPVKRREQTQQSSRNTCSDEQQKAAARCEQTNKRKKKIRKPQSIPSRLQVRHARQHNDGPHTARNSAAEYYRDSTRTESKTTASTRTSRTKETGRPYRDKTTSNRKHQTRT

SEQ ID NO: 1028456 - protein, 76 aa, Homo sapiens
EILHQSFQRVNRKPYYSGHTLQIDDVLRMELFMPLINDMMWRQRAQLKKLVESLPQKPRESIIKLMEKIAPSSLCN

SEQ ID NO: 1028457 - protein, 46 aa, Homo sapiens
MSLDCRTIKVTYRLHSQRGTYRLGPEPLRRFWSGFLSQQGEQIVSI

SEQ ID NO: 1028458 - protein, 68 aa, Homo sapiens
DTGEAWLGSPQEADNHGRRRRGSRHVSGHGGAGETERVKQEVLHASKQPDPMSAHSLSRDQQGGRQPP

SEQ ID NO: 1028459 - protein, 305 aa, Homo sapiens
  misc_feature (277)..(277): Xaa can be any naturally occurring amino acid
FTGIPAGPVTDLRLRGREGGGAGGARRGRALGTRPGSRLRGFSWPRQRGLCGGGGGAASRTSSFPERPAAPVPREAGGRRTRPNLDVDYRAARDGKRLIKPRPAGPSHSPPRRPAAPNAGHTQPPWSDGPTPDDPGHGQTRDDPGRGAPPAGGRAAGLGSPWRGHACDMASAVFEGTSLVNMFVRGCWVNGIRRLIVSRRGDEEEFFEIRTEWSDRSVLYLHRSLADLGRLWQRLRDAFPEDRSELAQGPLRQGAGPGTREGRGAEAALKCTKEAGXRLQPRLRLLLSARPGQGTLGPRARRRGV

SEQ ID NO: 1028460 - protein, 497 aa, Homo sapiens
FTGIPAGPVTDLRLRGREGGGAGGARRGRALGTRPGSRLRGFSWPRQRGLCGGGGGAASRTSSFPERPAAPVPREAGGRRTRPNLDVDYRAARDGKRLIKPRPAGPSHSPPRRPAAPNAGHTQPPCDVDCVPVPLWLTPVPLGHDPVWLTPVACVAAASLSCAVCCVLCCVVLVCDASCAGVCIAVLYIGLLAGCLMGALSASCEQCSVRCAAGVERDPAVLIVSRRGDEEEFFEIRTEWSDRSVLYLHRSLADLGRLWQRLRDAFPEDRSELAQGPLRQGLVAIKEAHDIETRLNEVEKLLKTIISMPCKYSRSEVVLTFFERSPLDQVLKNDNVHKIQPSFQSPVKISEIMRSNGFCLANTETIVIDHSIPNGRDQHLGVDPTERYGRMAVSSLRSWRPRDRPRQAYVHQPVHITTWSPFENDFGRGPFYKAARPQWLLPVLVCPCAGPGPAVAPWDPSSGPWPGGVSWDTALAGAEPRWRRAGGPGGARGVASC

SEQ ID NO: 1028461 - protein, 470 aa, Homo sapiens
FTGIPAGPVTDLRLRGREGGGAGGARRGRALGTRPGSRLRGFSWPRQRGLCGGGGGAASRTSSFPERPAAPVPREAGGRRTRPNLDVDYRAARDGKRLIKPRPAGPSHSPPRRPAAPNAGHTQPPWSDGPTPDDPGHGQTRDDPGRGAPPAGGRAAGLGSPWRGHACDMASAVFEGTSLVNMFVRGCWVNGIRRLIVSRRGDEEEFFEIRTEWSDRSVLYLHRSLADLGRLWQRLRDAFPEDRSELAQGPLRQGLVAIKEAHDIETRLNEVEKLLKTIISMPCKYSRSEVVLTFFERSPLDQVLKNDNVHKIQPSFQSPVKISEIMRSNGFCLANTETIVIDHSIPNGRDQHLGVDPTERYGRMAVSSLRSWRPRDRPRQAYVHQPVHITTWSPFENDFGRGPFYKAARPQWLLPVLVCPCAGPGPAVAPWDPSSGPWPGGVSWDTALAGAEPRWRRAGGPGGARGVASC

SEQ ID NO: 1028462 - protein, 262 aa, Homo sapiens
FTGIPAGPVTDLRLRGREGGGAGGARRGRALGTRPGSRLRGFSWPRQRGLCGGGGGAASRTSSFPERPAAPVPREAGGRRTRPNLDVDYRAARDGKRLIKPRPAGPSHSPPRRPAAPNAGHTQPPWSDGPTPDDPGHGQTRDDPGRGAPPAGGRAAGLGSPWRGHACDMASAVFEGTSLVNMFVRGCWVNGIRRLIVSRRGDEEEFFEIRTEWSDRSVLYLHRSLADLGRLWQRLRDAFPEDRSELAQGPLRQDLFNELLEN

SEQ ID NO: 1028463 - protein, 169 aa, Homo sapiens
RQYSYGLSGWSGSVAGAESGPQRALSSPTAAAGLVTITPREEPQLPQPAPVTITATMSSEAETQQPPAPPRRPRPQRRRHQAPALRAAAQGAVARAASHRRRLPGGDKKVIATTGLGNSKTGSSVRNGYGFINRNDTKERCICTTRLAIKKNNPRKYLRQCTEMERLWS

SEQ ID NO: 1028464 - protein, 109 aa, Homo sapiens
TAVLLRFKWLVWIGSGSGERTPESPEQPHRRRRPSYHHTPGGAAAAAAGPSHHHRNHEQRGRDPAAARAPPAPPTSAPPTPSAGTTGSGRRVAGGYWGLRGKKYEKLEN

SEQ ID NO: 1028465 - protein, 159 aa, Homo sapiens
TAVLLRFKWLVWMVAGAESGPQRALSSPTAAAGLVTITPREEPQLPQPAPVTITATMSSEAETQQPPAPPRRPRPQRRRHQAPALRASHRRRLPGGDKKVIATTGLGNSKTGSSVRNGYGFINRNDTKERCICTTRLAIKKNNPRKYLRQCTEMERLWS

SEQ ID NO: 1028466 - protein, 61 aa, Homo sapiens
QIKMSARLDSIVVCAGGNPATFSHPPTLSYLRSTARHGVRMIGVSAGPFIPAQAGLLDSYR

SEQ ID NO: 1028467 - protein, 82 aa, Homo sapiens
MHALNDVTAVVEHTADVLSVHSAGEMRVAVVTPISTGSADPQKLISNEVLGPGLQKLFSAHFRRMNGPSPAQAWLRCHAIDR

SEQ ID NO: 1028468 - protein, 182 aa, Homo sapiens
MHALNDVTAVVEHTADVLSVHSAGEMRVAVVTPISTGSADPQKLISNEVLGPGHAWVLSGLGSSILRSSVASKFWKVVLNLRFPSKDFLSEQILLVEEQDHRDGAQPSVVPDALEEVQSLLQAVWSDCPPEKTMIVNCCLATTKMNGKSHRMKHWIHLRRYIALATHVKHVEIDFVHLELGP

SEQ ID NO: 1028469 - protein, 285 aa, Homo sapiens
PHLHQPTQIPRSDSARPRSPRLPGASREPAGLAHSDSEQSLSFDPDAPAPFPGTPAPAGQLLPTCLAMDDPCPMLAAATLQLGLQCQLHSCCLPTLHHPGCMEKEDLQELNDRLAVYIDRVRSLETENAGLRLRITESEEVVSREVSGIKAAYEAELGDARKTLDSVAKERARLQLELSKVREEFKELKARNTKKEGDLIAAQARLKDLEALLNSKEAALSTALSEKRTLEGELHDLRGQVAKLEADLGEAKKQLQDEMLRRVDAENQAEDPVKEELDFQNDHLQ

SEQ ID NO: 1028470 - protein, 228 aa, Homo sapiens
CHFLHGGGSGVASLERAESSSTEPAKAIKPIDRKSVHQICSGPVVLSLSTAVKKIVENSLDAGATNIDLKLKDYGMDLIEVSGNGCGVEEENFEGLTLKHHTSKIQEFADLTRVETFGFRGKALSSLCALSDVTISTCHVSAKVGTRLVFDHDGKIIQKTPYPHPRGTTVSVKQLFSTLPVRHKEFQRNIKKKRACFPFAFCRDCQFLEGSPAMLPVQPAKLTPRSTP

SEQ ID NO: 1028471 - protein, 197 aa, Homo sapiens
CHFLHGGGSGVASLERAESSSTEPAKAIKPIDRKSAHQICSGPVVLSLSTAVKKMVENSLDAGATNIDLKLKDYGMDLIEVSGNGCGVEEENFEGFNDVTISTCHVSAKVGTRLVFDHDGKIIQKTPYPHPRGTTVSVKQLFSTLPVRHKEFQRNIKKKRACFPFAFCRDCQFLEGSPAMLPVQPAKLVSQLNFFTS

SEQ ID NO: 1028472 - protein, 385 aa, Homo sapiens
CHFLHGGGSGVASLERAESSSTEPAKAIKPIDRKSAHQICSGPVVLSLSTAVKKMVENSLDAGATNIDLKLKDYGMDLIEVSGNGCGVEEENFEGFNDVTISTCHVSAKVGTRLVFDHDGKIIQKTPYPHPRGTTVSVKQLFSTLPVRHKEFQRNIKKKRACFPFAFCRDCQFLEGSPAMLPVQPAKLTEPAKAIKPIDRKSVHQICSGPVVLSLSTAVKKIVGNSLDAGATNIDLKLKDYGMDLIEVSGNGCGVEEENFEGLSLSALKHHTSKIREFADLTRVETFGFRGKALSSLCALSDVTISTCHVSAKVGTRLVFDHDGKIIQKTPYPHPRGTTVSVKQLFSTLPVRHKEFQRNIKKNLLRPSNLLIGSQSIRFALGRWY

SEQ ID NO: 1028473 - protein, 137 aa, Homo sapiens
CHFLHGGGSGVASLERAESSSTEPAKAIKPIDRKSVHQICSGPVVLSLSTAVKKIVENSLDAGATNIDLKLKDYGMDLIEVSGNGCGVEEENFEGLMMSPFLPATYRRRLGLDWCLITMGKSSRKPPTPTPEGPQSA

SEQ ID NO: 1028474 - protein, 136 aa, Homo sapiens
MWGRRRKLRRLNDVTISTCHVSAKVGTRLVFDHDGKIIQKTPYPHPRGTTVSVKQLFSTLPVRHKEFQRNIKKKRACFPFAFCRDCQFLEGSPAMLPVQPAKLTPRSTPPHPCSLEDNVITVFSSVKNGPGSSPPS

SEQ ID NO: 1028475 - protein, 217 aa, Homo sapiens
CHFLHGGGSGVASLERAESSSTEPAKAIKPIDRKSVHQICSGPVVLSLSTAVKKIVENSLDAGATNIDLKLKDYGMDLIEVSGNGCGVEEENFEGLTLKHHTSKIQEFADLTRVETFGFRGKALSSLCALSDVTISTCHVSAKVGTRLVFDHDGKIIQKTPYPHPRGTTVSVKQLFSTLPVRHKEFQRNIKKPHPCSLEDNVITVFSSVKNGPGSSR

SEQ ID NO: 1028476 - protein, 136 aa, Homo sapiens; identical to SEQ ID NO: 1028474

SEQ ID NO: 1028477 - protein, 136 aa, Homo sapiens; identical to SEQ ID NO: 1028474

SEQ ID NO: 1028478 - protein, 136 aa, Homo sapiens; identical to SEQ ID NO: 1028474

SEQ ID NO: 1028479 - protein, 35 aa, Homo sapiens
MILTTATPAWGDRRKSCLNNKKPDTGLPFKTHHNK

SEQ ID NO: 1028480 - protein, 144 aa, Homo sapiens
MWGRRRKLRRLKALKHHTSKIQEFADLTRVETFGFRGKALSSLCALSDVTISTCHVSAKVGTRLVFDHDGKIIQKTPYPHPRGTTVSVKQLFSTLPVRHKEFQRNIKKKRACFPFAFCRDCQFLEGSPAMLPVQPAKLTPRSTP

SEQ ID NO: 1028481 - protein, 46 aa, Homo sapiens
MLMSIYQSSLARFSELYCLGKKRYGRGMSPVAHAVFQDLGDNPGKI

SEQ ID NO: 1028482 - protein, 136 aa, Homo sapiens; identical to SEQ ID NO: 1028474

SEQ ID NO: 1028483 - protein, 136 aa, Homo sapiens; identical to SEQ ID NO: 1028474

SEQ ID NO: 1028484 - protein, 136 aa, Homo sapiens; identical to SEQ ID NO: 1028474

SEQ ID NO: 1028485 - protein, 136 aa, Homo sapiens; identical to SEQ ID NO: 1028474

SEQ ID NO: 1028486 - protein, 136 aa, Homo sapiens; identical to SEQ ID NO: 1028474

SEQ ID NO: 1028487 - protein, 217 aa, Homo sapiens; identical to SEQ ID NO: 1028475

SEQ ID NO: 1028488 - protein, 273 aa, Homo sapiens
CHFLHGGGSGVASLERAESSSTEPAKAIKPIDRKSAHQICSGPVVLSLSTAVKKMVENSLDAGATNIDLKLKDYGMDLIEVSGNGCGVEEENFEGFNDVTISTCHVSAKVGTRLVFDHDGKIIQKTPYPHPRGTTVSVKQLFSTLPVRHKEFQRNIKKKRACFPFAFCRDCQFLEGSPAMLPVQPAKLTEPAKAIKPIDRKSVHQICSGPVVLSLSTAVKKIVGNSLDAGATNIDLKLKDYGMDLIEVSGNGCGVEEENFEGLISFSSETSHI

SEQ ID NO: 1028489 - protein, 128 aa, Homo sapiens
MQHLLLHSLCLSCSTMARNVPASPSPSAVIVSFLRAPQPCFLYSLQNCPETQEPAKAIKPIDRKSVHQICSGPVVLSLSTAVKKIVENSLDAGATNIDLKLKDYGMDLIEVSGNGCGVEEENFEGLKL

SEQ ID NO: 1028490 - protein, 65 aa, Homo sapiens
GDGAYVWGQLRPHRMGRRLDGGAKFRQLNNFNSEATFQFHTTCDSSGLKFDVHLKNRMVFLFCLL

SEQ ID NO: 1028491 - protein, 224 aa, Homo sapiens
MASLPGSDGGIQYGWQVALLPLTGIRYSSCSVKTQRISPLYGFLPQNPFREPSELSGEMLFASCCCLHTHVLVPVEVKRPRGVSLTNHHFYDESKPFTCLDGSATIPFDQVNDDYCDCKDGSDEPGTAACPNGSFHCTNTGYKPLYIPSTGSTMVYCDCCDGTDEYKQLCIICDAHHAESKGRNVRERPCSRWPMVTRDGYRLTMILIEGLARRHGRRSRKMLI

SEQ ID NO: 1028492 - protein, 167 aa, Homo sapiens
  misc_feature (35)..(35): Xaa can be any naturally occurring amino acid
MVPAAQEAEAGEWLNLGVRGCSEPGVAPMACQASXDRVRLVSKKQKNQTTNKTTESGGTIRHYDTARHRNNNHAQGTQGTHKTISSHTCDTTKSYNDRRDPAAQRHNAGRALPSTETHAPAGVTHAEDWWTQPPKRDRRTTEEEEYTNRRKHTGESRERLRTTPTHP

SEQ ID NO: 1028493 - protein, 278 aa, Homo sapiens
PETVRYYPVQAKALLSSTVSSYHDEERTRDSTSGSILNLNLDRSKAEMDLKELSESVQEQIHPVFLSSLPSARSRSRFQLNSGQAPYRVAKHNLGINDTSRTHVYTADESTAIRRHLSTLSIAERIAERILTLQCMSHAHAPPAPRAQHRPQHATHRQAPRSTHAPPQRSPNSLTLPPPTPPQPPTQPTLITTPPQRMPTHHLTQDTRKTLGTQHTATGFHTQRPHNGNTQRANETTPWATYSTPSQQCEHHTCHPTHPPLNSPPFNRHTGHPIIISP

SEQ ID NO: 1028494 - protein, 277 aa, Homo sapiens
VLSLSGSFGSASVATAPALPPPPTAARASVAAASLSRSLDRTSSQMQRRDDPAARMSRSSGRSGSMDPSGAHPSVRQTPVSAACLLPHLCPWGVLEWGSLLGCCPGPRPATQPATAAACPRPRGPRQRTVGWASAGPRCCPPRPQPRSRWMPENKYLPELMAEKDSLDPSFTHAMQLLTAEIEKIQKGDSKKDDEENYLDLFSHKNMKLKGASADTLSNQYPKFNFCGEDSWTTREYNPRLRERLGKISVWARLIEDNQRKCQGDPFPLMSFLLALV

SEQ ID NO: 1028495 - protein, 198 aa, Homo sapiens
  misc_feature (22)..(22): Xaa can be any naturally occurring amino acid
  misc_feature (38)..(38): Xaa can be any naturally occurring amino acid
  misc_feature (56)..(56): Xaa can be any naturally occurring amino acid
AEEDFAIVLLKLDEVKGFNSKXDSPKLFQINRQNKSLXPPVFMKLVFTLAKIIEAXLKMYSISNNKAMTRGAIAAMLSTILYSRRFFPYYVYNIIGGLDEEGKGAVYSFDPVGSYQKDSFKAGGSASAMLKPLLTNQVGFKNIQNVEHVPLSLDRAMRLVKDVFISAAKKNVYPGDALRICIVTKEGIREETVSLRKD

SEQ ID NO: 1028496 - protein, 102 aa, Homo sapiens
MMLNGIPLGPFLLGTPWRDMHETIRPLVNRSINGSRGWRDFGAFDQMLKRLHIRLNEQGLIDLETWMIDSTAVRATRASSGAGKKGDLKNRKTTRSGAAGVA

SEQ ID NO: 1028497 - protein, 406 aa, Homo sapiens
MGVTARRRVVWDYSTPGNQPRSLQEGLKGEQVKLTEALKNSQGLEKPLQVASATVSAGLWLLYPKPLFEDTPYILEPGEYPISEAWGTSDPSVGSLKPMRLAVVYEAPGFQGRSWEVSRDIYNLQQPEDSQSPHLASVGSLRVLGGCWVGYEKEGFRGHQYLLEEGEYPDWSHWGGYDELLTSLRVIRTDFGDPAVVLFEAMDFEGHGVEVSKALPDVELVQHGPNTQAIHVLSGVWVAYQEVGFSGEQYVLEKGVYRNCEDWGAGNSTLASLQPVLQVGEHDLHFVSKIQLFSRPDFLGDHFSFEDDQAALPPPSDLSPAGSTAAAGSCLMRRTSRVTSTILSEGRVPQSHGMGCLASTVLGSLQKVSCTFQSPPIFLVLARVARGGRAIELAGSCGACKRGSHL

SEQ ID NO: 1028498 - protein, 300 aa, Homo sapiens
MGVTARRRVVWDYSTPGNQPRSLQEGLKGEQVKLTEALKNSQGLEKPLQVASATVSAGLWLLYPKPLFEDTPYILEPGEYPISEAWGTSDPSVGSLKPMRLGCPSVEKPGEPRAVVYEAPGFQGRSWEVSRDIYNLQQPEDSQSPHLASVGSLRVLGGCWVGYEKEGFRGHQYLLEEGEYPDWSHWGGYDELLTSLRVIRTDFGDPAVVLFEAMDFEGHGVEVSKALPDVELVQHGPNTQAIHVLSGVSGSTICTSSQRFSFSPAPTFWATTSLSKMTRPLCRLLPTSVLPGPRRQLDPV

SEQ ID NO: 1028499 - protein, 67 aa, Homo sapiens
MSRSLHWRWHLGKSGCVIQGCGASDFRSRSNWKWFQEKPLSFSHTRPYRKPTQVGEMSILRRNERFR

SEQ ID NO: 1028500 - protein, 41 aa, Homo sapiens
MRRGFMLNCPSDVYLRSVTGVVYALQGPVQLQHSTLRILLN

SEQ ID NO: 1028501 - protein, 110 aa, Homo sapiens
ILLMLIPPYAHPVLMLIPPYARSLLMLIPPYAHPSLCSSLLMLIPPYAHPSLCSSLLMLIPPYAHPSLCSSLLMLIPPYAHYQPSLTDHTFAKPFHPNNVIGDRNRNLAQ

SEQ ID NO: 1028502 - protein, 227 aa, Homo sapiens
DFLPPKKIKDPDASKPEDWDERAKIDDPTDSKPEDWDKPEHIPDPDAKKPEDWDEEMDGEWEPPVIQNPEYKGEWKPRQIDNPEWTQGTSGPPRNWTNPGVFFRFQRILLANVVYILCVWRGLLRLCGVSMCGKPSYDIFLITNDEAYAEEFGNETWGVTKAAEKQMKDKQDEEQRLKEEEEDKKRKEEEEAEDKEDDEDKDEDEEDEEDKEEDEEEDVPGQAKDEL

SEQ ID NO: 1028503 - protein, 80 aa, Homo sapiens
DFLPPKKIKDPDASKPEDWDERAKIDDPTDSKPEDWDKPEHIPDPDAKKPEDWDEEMDGEWEPPVIQNPVIQWCIGIVLR

SEQ ID NO: 1028504 - protein, 89 aa, Homo sapiens
LVPLKEGLRHLKLEVTPQITPEGNIILDVDINKDSRGETTACRHRDQHQAREDPGTGRERRHGGDRRQSFEQVDRDEVSQTILRDPLSH

SEQ ID NO: 1028505 - protein, 90 aa, Homo sapiens
EEEDIGGGGPGYGNYRSGGYGGGYDNYGGGNYGSGNYNDFGNYNQQPSNYGPMKSGDFGGSRNMGGPYGGGNYGPGGSGGSGGYGGRSRY

SEQ ID NO: 1028506 - protein, 149 aa, Homo sapiens
MESRGKSASSPKPDTKVPQVTTEAKVPPAADGKAPLTKPSKKEAPAEKQQPPAAPTTAPAKKTSAKADPALLNNHSNLKPAPTVPSSPDATPEPKGPGDGAEEDEAASGGPGGRGSWSCENFNPLLVAGGVAVAAIALILGVAFLVRKK

SEQ ID NO: 1028507 - protein, 204 aa, Homo sapiens
GHSRALLRVRSRRHPAEERAAPGRPEDAPIECPGATNCPEPLWCSHLPVPYAPPTMESRGKSASSPKPDTKVPQVTTEAKVPPAADGKAPLTKPSKKEAPAEKQQPPAAPTTAPAKKTSAKADPALLNNHSNLKPAPTVPSSPDATPEPKGPGDGAEEDEAASGGPGGRGPWSCENFNPLLVAGGVAVAAIALILGVAFLVRKK

SEQ ID NO: 1028508 - protein, 204 aa, Homo sapiens; identical to SEQ ID NO: 1028507

SEQ ID NO: 1028509 - protein, 141 aa, Homo sapiens
MDPVCGPPTPGGWVILGPQGWSECRWGCRDGLGLGPALVGTLKGAVAPLAPFLLFAYPPGVCLGECSGTDLGWALTSAEPQCHLPTPPKPSWVGRRSPEACVWRGCCPRVAFPSLCSRGAPTPAGRQGCRGPLTAVPALPR

SEQ ID NO: 1028510 - protein, 149 aa, Homo sapiens; identical to SEQ ID NO: 1028506

SEQ ID NO: 1028511 - protein, 75 aa, Homo sapiens
QLYPVRPIWGLIGAAGPPAYTRATATRDPSYICNLHHSSQQHQILNPLSKARDRTRNLMVPSQIRYPLSHDRNSC

SEQ ID NO: 1028512 - protein, 67 aa, Homo sapiens
QLYPVRPIWGLIGAAGPPAYTRATATRDPSYICNLHHSSQQHQILNPLSKARDRTRNLMVPSQIHFC

SEQ ID NO: 1028513 - protein, 67 aa, Homo sapiens
QLYPVRPIWGLIGAAGLPAYTRATATRDPSYICNLHHSSQQHQILNPLSKARDRTCNLMVPSRIINH

SEQ ID NO: 1028514 - protein, 79 aa, Homo sapiens
QLYPVRPIWGLIGAAGLPAYTRATATRDPSYICNLHHSSQQHQILNPLSKARDRTCNLMVPSQIHFCCATMGTPISAIF

SEQ ID NO: 1028515 - protein, 624 aa, Homo sapiens
LKIKGIHPYHSLSYTSGDTATDSPVHVGRAGMPVKDSPRKESLLSYLTGSFPSLHNLLEGTPQRSSAAVKSSSLTRTGNTVATDMLSEHPLLSEPSSVSFYNWMSNAVGNRGSVLQESPVTKSGHNSLPTGVAPNLPTIPSASDFNTVLSSDQNTLDGTHSQHSTSQDDVAGVEEANQGFPAVQLADAQVVFKPLLSHTGIQSQDTMPFCYRMYFGEHLSFSGTLDCLRADIVDSDTAKERKGKRARRQGHVNLPPLEFKPALMLGTFSISAVVMEKSVCTPQNSTSALSFHDLSKRYYNTFHCNFTISCQSISQHVDMALVRLIHQFSTMIDDIKATQTDIKLSRYTAGSASPTPTFKTRKHRDFRSSDFSRSSRGSLNGGNRVNNAKNKRTNNENNKKESRNKNSLGRSERRTSKVSRKGSKDVVDHMTIHMDDSDSITVSEQSEPSAECWQNMYKLLNFYSLISDPTGILEKSSETFGPAGVRSPTEPTCKVVFENEQDNSSLTKTQRKRSLVTSEPQHVTLIVFGIGMVNRTHLEADIGGLTMESELKRIHGSFTLKEKMKDVLHQKMTETCATAHIGGVNIVLLEGITPNIQLEDFPTSPTSTAKQEFLYVILFFFMAL

SEQ ID NO: 1028516 - protein, 857 aa, Homo sapiens
LKIKGIHPYHSLSYTSGDTATDSPVHVGRAGMPVKDSPRKESLLSYLTGSFPSLHNLLEGTPQRSSAAVKSSSLTRTGNTVATDMLSEHPLLSEPSSVSFYNWMSNAVGNRGSVLQESPVTKSGHNSLPTGVAPNLPTIPSASDFNTVLSSDQNTLDGTHSQHSTSQDDVAGVEEANQGFPAVQLADAQVVFKPLLSHTGIQSQDTMPFCYRMYFGEHLSFSGTLDCLRADIVDSDTAKERKGKRARRQGHVNLPPLEFKPALMLGTFSISAVVMEKSVCTPQNSTSALSFHDLSKRYYNTFHCNFTISCQSISQHVDMALVRLIHQFSTMIDDIKATQTDIKLSRYTAGSASPTPTFKTRKHRDFRSSDFSRSSRGSLNGGNRVNNAKNKRTNNENNKKESRNKNSLGRSERRTSKVSRKGSKDVVDHMTIHMDDSDSITVSEQSEPSAECWQNMYKLLNFYSLISDPTGILEKSSETFGPAGVRSPTEPTCKVVFENEQDNSSLTKTQRKRSLVTSEPQHVTLIVFGIGMVNRTHLEADIGGLTMESELKRIHGSFTLKEKMKDVLHQKMTETCATAHIGGVNIVLLEGITPNIQLEDFLYISYKYSQTRVSTVVKCSIAKSQALYSAQRGLKTNNAAVFKVGAISINIPQHPATLHSMMVRSSHQLSKQISDLIRQPSTAPQPVKEDIATPLPSEKTPTSVNQTPVETNEFPQLPEGLEKKPIVLKFSAMLDGIAIGAALLPSLKAEYNDGKNEKSWNDRCTTRFTFELPNHRSRFTSKVSATDMSTIPPSASLNLPPVTMSGTYIMEEHDSHSDQVWSIDELASKQGYYLQGTLSAMCGSNVVPWNIILQLIF

SEQ ID NO: 1028517 - protein, 666 aa, Homo sapiens
LKIKGIHPYHSLSYTSGDTATDSPVHVGRAGMPVKDSPRKESLLSYLTGSFPSLHNLLEGTPQRSSAAVKSSSLTRTGNTVATDMLSEHPLLSEPSSVSFYNWMSNAVGNRGSVLQESPVTKSGHNSLPTGVAPNLPTIPSASDFNTVLSSDQNTLDGTHSQHSTSQDDVAGVEEANQGFPAVQLADAQVVFKPLLSHTGIQSQDTMPFCYRMYFGEHLSFSGTLDCLRADIVDSDTAKERKGKRARRQGHVNLPPLEFKPALMLGTFSISAVVMEKSVCTPQNSTSALSFHDLSKRYYNTFHCNFTISCQSISQHVDMALVRLIHQFSTMIDDIKATQTDIKLSRYTAGSASPTPTFKTRKHRDFRSSDFSRSSRGSLNGGNRVNNAKNKRTNNENNKKESRNKNSLGRSERRTSKVSRKGSKDVVDHMTIHMDDSDSITVSEQSEPSAECWQNMYKLLNFYSLISDPTGILEKSSETFGPAGVRSPTEPTCKVVFENEQDNSSLTKTQRKRSLVTSEPQHVTLIVFGIGMVNRTHLEADIGGLTMESELKRIHGSFTLKEKMKDVLHQKMTETCATAHIGGVNIVLLEGITPNIQTVVKCSIAKSQALYSAQRGLKTNNAAVFKVGAISINIPQHPATLHSMMVRSSHQLSKQISDLIRQPSTA

SEQ ID NO: 1028518 - protein, 840 aa, Homo sapiens
LKIKGIHPYHSLSYTSGDTATDSPVHVGRAGMPVKDSPRKESLLSYLTGSFPSLHNLLEGTPQRSSAAVKSSSLTRTGNTVATDMLSEHPLLSEPSSVSFYNWMSNAVGNRGSVLQESPVTKSGHNSLPTGVAPNLPTIPSASDFNTVLSSDQNTLDGTHSQHSTSQDDVAGVEEANQGFPAVQLADAQVVFKPLLSHTGIQSQDTMPFCYRMYFGEHLSFSGTLDCLRADIVDSDTAKERKGKRARRQGHVNLPPLEFKPALMLGTFSISAVVMEKSVCTPQNSTSALSFHDLSKRYYNTFHCNFTISCQSISQHVDMALVRLIHQFSTMIDDIKATQTDIKLSRYTAGSASPTPTFKTRKHRDFRSSDFSRSSRGSLNGGNRVNNAKNKRTNNENNKKESRNKNSLGRSERRTSKVSRKGSKDVVDHMTIHMDDSDSITVSEQSEPSAECWQNMYKLLNFYSLISDPTGILEKSSETFGPAGVRSPTEPTCKVVFENEQDNSSLTKTQRKRSLVTSEPQHVTLIVFGIGMVNRTHLEADIGGLTMESELKRIHGSFTLKEKMKDVLHQKMTETCATAHIGGVNIVLLEGITPNIQTVVKCSIAKSQALYSAQRGLKTNNAAVFKVGAISINIPQHPATLHSMMVRSSHQLSKQISDLIRQPSTAPQPVKEDIATPLPSEKTPTSVNQTPVETNEFPQLPEGLEKKPIVLKFSAMLDGIAIGAALLPSLKAEYNDGKNEKSWNDRCTTRFTFELPNHRSRFTSKVSATDMSTIPPSASLNLPPVTMSGTYIMEEHDSHSDQVWSIDELASKQGYYLQGTLSAMCGSNVVPWNIILQLIF

SEQ ID NO: 1028519 - protein, 332 aa, Homo sapiens
MVNRTHLEADIGGLTMESELKRIHGSFTLKEKMKDVLHQKMTETCATAHIGGVNIVLLEGITPNIQTVVKCSIAKSQALYSAQRGLKTNNAAVFKVGAISINIPQHPATLHSMMVRSSHQLSKQISDLIRQPSTAPQPVKEDIATPLPSEKTPTSVNQTPVETNEFPQLPEGLEKKPIVLKFSAMLDGIAIGAALLPSLKAEYNDGKNEKSWNDRCTTRFTFELPNHRSRFTSKVSATDMSTIPPSASLNLPPVTMSGTYIMEEHDSHSDQVWSIDELASKQGYYLQGTLSAMCGSNVVPWNIILQLIFYNHLVLVQKVFMKEVTEVCQKVS

SEQ ID NO: 1028520 - protein, 155 aa, Homo sapiens
SDGRYSDRERNITLIQAFGLTEQTVFLALPGLGHDPVVHAIDSGVGHERVLGQVVEQHVEAEDVVGHQQLSRRSGSLGCQARAQGVSLLVHGLLELQTHHAGVDHQGQSDQDHVMAGDAQCNRYTAMAQCPEDQQEEVIGFYWRGPVHLRSALGP

SEQ ID NO: 1028521 - protein, 40 aa, Homo sapiens
MCSEEIEKEGVPVVAQWLTNPTRNHEVAGSVHPVIQYEGI

SEQ ID NO: 1028522 - protein, 73 aa, Homo sapiens
TQKREEVENIAAVHNEVSTVELRGVDSEERGCGKERERGVPVVAQWLTNPTRNHEVAGSVPALAQWVNDPALP

SEQ ID NO: 1028523 - protein, 69 aa, Homo sapiens
LRIPPAYILVKKSELIFCSTSLPLLSGLRIRRCRELWCRLQTRLGSRAARIPRCCGSGVGRWLQLRFDP

SEQ ID NO: 1028524 - protein, 111 aa, Homo sapiens
GHKRALDHLYSDICSGDGGLTSYIPFWRNSQSAVHFTEQSGLNNMKNFLGTLHNRAMTTFTDAFSVLHQDCPRAPAHIPSLKRARLRETDRPDIPILYDWAVNRRARLNPR

SEQ ID NO: 1028525 - protein, 223 aa, Homo sapiens
MTRIVADDVRDVALRLLCPWPPMSGVVHFVGTQAGLVHTPRPVPPPAVFLLCDVCRTVDIVPPGRDMVATSYRGPRKRVVRQISEYHPPLLGAGAQCIEAGLQEAAMGEDWGVGNKGRVQRGTSLSHWSMVARKAFTRVEGAHKECTPKGMWNSRAFSPCVGPEVLATGLRGPWGATSFEVASIMQLATGAGVAKSYGNPAGPGLFTRTLAVAPHVARIGIVF

SEQ ID NO: 1028526 - protein, 256 aa, Homo sapiens
  misc_feature (256)..(256): Xaa can be any naturally occurring amino acid
MTSGMWLSDCCARGPRCPEWCIFSLARVMFAREALLRGVGGRIRAALLRVLQHHAAGQRVAVGLAMSNGGYSWAGVLVGCFKTPSTHGHSVAPAKGRGPPTIPRQTIVDDVAKKMRITMTLKLLGPGPSCMVVLSTVMFSKVTEGTGGAPPLQEWGKRPLASYRMWDFEHGGIVWARPLAPVRRKSGMGGNCHGERLRDQETRTYAGVEQPVPGKGYVVRAPEAKIGNARPVNNGTETRTGRSQRTSQKNGLACGX

SEQ ID NO: 1028527 - protein, 229 aa, Homo sapiens
MTSGMWLSDCCARGPRCPEWCILCRHTGRPRAHTQALPPPAVFLLCDVCRTVDIVPPGRDMVATQHKGQKESGAPDLRVYTLLFPVWARGGLQVHVKGGHTGKAWQGEKRGGGAHATGLGVCEVDTLTFPHVGPCGMCPGKPLREWRVRIRSARLEDVEQPAFSPCVGPEVLATGLRGPWGATSFEVASIMQLATGAGVAKSYGNPAGPGLFTRTLAVAPHVARIGIVF

SEQ ID NO: 1028528 - protein, 200 aa, Homo sapiens
  misc_feature (4)..(4): Xaa can be any naturally occurring amino acid
SGPXRCRVLTSGIFETKFQVDKVNFHMFDVGGQRDERRKWIQGFNDVTAIIFVVASSSYNMVIREDNQTNRLQEALNLFKSRLEQQMVRTISVILFLNKQDLLAEKVLAGKSKIEDYFPEFARYTTPEDATPEPGEDPRVTRAKYFIRDEFLRISTASGDGRHYCYPHFTCAVDTENIRRVFNDCRDIIQRMHLRQYELL

SEQ ID NO: 1028529 - protein, 200 aa, Homo sapiens; identical to SEQ ID NO: 1028528
  misc_feature (4)..(4): Xaa can be any naturally occurring amino acid

SEQ ID NO: 1028530 - protein, 200 aa, Homo sapiens; identical to SEQ ID NO: 1028528
  misc_feature (4)..(4): Xaa can be any naturally occurring amino acid

SEQ ID NO: 1028531 - protein, 192 aa, Homo sapiens
RPEPHNRSQRWLHPHVYVKHGEILRTEPVATGNWYMQLIPQQLLTPLVPLFRNSRLVQFHFTKDLETLKSLCRIMDNGFAGCVHFSYKASCEIRVLMLLYSSEKKIFIGLIPHDQGNFVNGIRRVIAQPASQGLQTEPGAGATDNAEDVGGNGYPAAGPLPEITDEAPARDCAWEPVARQPPLHPCPPVTRF

SEQ ID NO: 1028532 - protein, 148 aa, Homo sapiens
HGQWLLSPSVRWRRLDFGVSDTSHQIASRIMDNGFAGCVHFSYKASCEIRVLMLLYSSEKKIFIGLIPHDQGNFVNGIRRVIAQPASQGLQTEPGAGATDNAEDVGGNGYPAAGPLPEITDEAPARDCAWEPVARQPPLHPCPPVTRF

SEQ ID NO: 1028533 - protein, 237 aa, Homo sapiens
  misc_feature (11)..(11): Xaa can be any naturally occurring amino acid
  misc_feature (50)..(50): Xaa can be any naturally occurring amino acid
  misc_feature (104)..(104): Xaa can be any naturally occurring amino acid
  misc_feature (107)..(107): Xaa can be any naturally occurring amino acid
  misc_feature (114)..(114): Xaa can be any naturally occurring amino acid
  misc_feature (117)..(117): Xaa can be any naturally occurring amino acid
  misc_feature (143)..(144): Xaa can be any naturally occurring amino acid
  misc_feature (146)..(146): Xaa can be any naturally occurring amino acid
  misc_feature (186)..(186): Xaa can be any naturally occurring amino acid
TPAQFDADELXLPCKGLGTDEDTLIEILASRTNKEIRDINRVYREELKRXLAKDITSDTSGDFRNALLSLAKGDRSEDFGVNENLADSDARALYEAGERRKGTXVNXFNTYPYXQKXSTTSQSVSEITKYSKHNMIQSSVPGXXRXHLKIPHSYREVRHKQTSFLGTEAPSSHEEVLELPHKALIXDYRFPGPEIDMNDINSILIRTMYWYLPFAKPSLDETKGDYEKILVALCGGN

SEQ ID NO: 1028534 - protein, 88 aa, Homo sapiens
RPGCLVFPYALFLTLTTKLTNTNISDAQEIETALNLSCPPSILVLIGPSNPYGILYNNKTEVNGSLPFLQINWHQLVLILRVTRFGGL

SEQ ID NO: 1028535 - protein, 109 aa, Homo sapiens
MPVPALWLKSSLRIFKPSGWISWPSPSDYPCLHEGVLESLPEQRGGGGELGGVGIVMREVGGVLAIWAKQQLWTCLKATLAWSGMASDFQTPEPGQFLLKVCKIKLCAG

SEQ ID NO: 1028536 - protein, 251 aa, Homo sapiens
LRLPALGLAGGQCASCDPADHECVDRYMGEGSSVYHHVNSQPSGLVTVTLLISRLDVPLQDESWGRPRMVGAPLPPSCAGGGPALIPWQGFVSSCSGLRGESGAGPRLCLSTFQALTLCKTVCRSHLRRCCKTSLPGGVRHSESKTEIPAEGNAACVNPCVVQVSRRNGDELLRWKICPLQTPPFSKGDIIYSHSARFQDIGRLSTACAGGLYPCRWTPLGLARATVPGSTGHFRRASGPPFTLFPGAGTT

SEQ ID NO: 1028537 - protein, 69 aa, Homo sapiens
MRLGSGAQRLPGSHLALGSPEVLVRVWAASGSVGTAAWLVVSRIGKPTPNVFSFTQKADFGLKKPCVHW

SEQ ID NO: 1028538 - protein, 69 aa, Homo sapiens; identical to SEQ ID NO: 1028537

SEQ ID NO: 1028539 - protein, 123 aa, Homo sapiens
MLMGVMERAAKRTRRLQGATAMVRRQPIVQDIKDNLKEAIVTIVASMSDLVPPVELCNPENQFRVDYILSVMNVPDSDVPPEFYEHAKALWEDEWSACLLRRSNEYQLMTVPSTSWKIDLSSR

SEQ ID NO: 1028540 - protein, 70 aa, Homo sapiens
VTQDPVELDSSLAEAGSGRSRKRQKQEAAEAGSGRSRKRQKQEAGEGAEKKGKDQKPTMPQAEAEAGRAH

SEQ ID NO: 1028541 - protein, 131 aa, Homo sapiens
YWQKQEAGRSLPASAHPRLSNNRKRQKQEAAEAGSRQKQEAGRSRKQQKQEAAEAGSGRSRKRQKQEAAEAGSGRSRKRQKQEAAEAGSSRSRKRQKQEAAEAGSRRRGRKEGEGSKAHHAPGRSRSGPSS

SEQ ID NO: 1028542 - protein, 125 aa, Homo sapiens
SPDPATFDAYKKNDRKIQKRSRKRQKQEAGRSRKQAEAGSSRSRKRQKQEAAEAGSGRSRKQQKQEAAEAGSGRSRKRQKQEAAEAGSGRSRKRQKQEAGEGAEKKGKDQKPTMPQAEAEAGRAH

SEQ ID NO: 1028543 - protein, 116 aa, Homo sapiens
YWQKQEAGRSLPASAHPRLSNNRKRQKQEAAEAGSRQKQEAGRSRKQQKQEAAEAGSGRSRKRQKQEAAEAGSGRSRKQHFFWKKLVFYWKGKKEVVRTEAEAGAPLQKQKRKQKD

SEQ ID NO: 1028544 - protein, 77 aa, Homo sapiens
TLVIPLTKTLRMQEATPRPWPHLEGRSRKRQKQEAAEAGSGRSRKRQKQEAGEGAEKKGKDQKPTMPQAEAEAGRAH

SEQ ID NO: 1028545 - protein, 134 aa, Homo sapiens
PYKTCTEEGKRRGRRRRKEEKGEGDEEGRSRKRQKQEAGRSRKQAEAGSSRSRKRQKQEAAEAGSGRSRKQQKQEAAEAGSGRSRKRQKQEAAEAGSGRSRKRQKQEAGEGAEKKGKDQKPTMPQAEAEAGRAH

SEQ ID NO: 1028546 - protein, 50 aa, Homo sapiens
MSQRDTLVHLFAGGCGGTVGAILDMSTGSCKHHGWSQCHPIMASGPFHWL

SEQ ID NO: 1028547 - protein, 155 aa, Homo sapiens
MRISANNLQGPVDVSYTSGTGIDPEDIYKTALAKYKAKYPRFSKADIIELAEMELNKQLKDVDIFTHVEKQSGKKVNVNWGTIKKPLWEEIEVDYRPKRFGSSKKRTSAAPAEIQSPSKELNALGEYKDFKDLPEPEKIKNSIAFTPSEDGRLLA

SEQ ID NO: 1028548 - protein, 270 aa, Homo sapiens
  misc_feature (242)..(242): Xaa can be any naturally occurring amino acid
LSCTVVERKYTGNASALLMLTEQDKMEDVQAKLLPETLERGRDSMEFREIAGARYLPKFYISRDYNQNDILLQLGIEEAFTSKADLSGITGARNLAVSQVVHKAVLDVFEEGTEASAATAVIITLLSALVETGTIERLNRPFLKIIVPTDTLNIFFMSKVTNPSKPRACHQAVELSVGTWNASWMPESLCTDWPLCTPVAMACVALTAYPCKVTEIACVVLTCTVHMDSSVCSVLRLLTRIXYLDGLHNRMSIDHSRLDLYLCSLSHYVD

SEQ ID NO: 1028549 - protein, 141 aa, Homo sapiens
MEALGKLKQFDAYPKTLEDFRVKTCGGATVTIVSGLLMLLLFLSELQYYLTTEVHPELYVDKSRGDKLKINIDVLFPHMPCAYLSIDAMDVAGEQQLDVEHNLFKQRLDKDGIPVSSEAERAMSCGKVEVTGGVTRDSLGP

SEQ ID NO: 1028550 - protein, 78 aa, Homo sapiens
GGPVRPLSGPVPMEALGKLKQFDAYPKTLEDFRVKTCGGATVTIVSGLLMLLLFLSELQYYLTTEVHPELYVGQVAGR

SEQ ID NO: 1028551 - protein, 145 aa, Homo sapiens
MEALGKLKQFDAYPKTLEDFRVKTCGGATVTIVSGLLMLLLFLSELQYYLTTEVHPELYVDKSRGDKLKINIDVLFPHMPCAYLSIDAMDVAGEQQLDVEHNLFKQRLDKDGIPVSSEAERAMSLGNSPHGDACLTLISLDPDRL

SEQ ID NO: 1028552 - protein, 259 aa, Homo sapiens
MAENDVDNELLDYEDDEVETAAGGDGAEAPAKKDVKGSYVSIHSSGFRDFLLKPELLRAIVDCGFEHPSEVQHECIPQAILGMDVLCQAKSGMGKTAVFVLATLQQLEPVTGQVSVLVMCHTRELAFQISKEYERFSKYMPNVKVAVFGGLSIKKDEEVLKKNCPHIVVGTPGRILALGSEIRASASIHIKPLHFGLKCDTRCLEQVDHGVGDVPGKFFGMTTKEKQVMMVQGYLGAKRESVQSAEIHADPWRYFVVAQ

SEQ ID NO: 1028553 - protein, 147 aa, Homo sapiens
MAENDVDNELLDYEDDEVETAAGGDGAEAPAKKDVKGSYVSIHSSGFRDFLLKPELLRAIVDCGFEHPSEVQHECIPQAILGMDVLCQAKSGMGKTAVFVLATLQQLEPVTGQVSVLVMCHTRELAFQISKEYERFSKYMPNVKVAV

SEQ ID NO: 1028554 - protein, 313 aa, Homo sapiens
MALRICVTYTPALPIGLCTRCCLCLEQSPSWCHCLRGVSFLTFHLHQSVPLGDRDSLLMFTRQAGHFVEGSKAGRSRGRLCLSQALRVAVRGAFVSLWFAAGAGDRERNKGDKGAQTGAGLSQEAEDVDVSRARRVTDAPQGTLCGTGNRNSGSQSARAVGVAHLGEAFRVGVEQAISSCPEEVHGRHGLSMEIMWARMDVALRSPGRGLLAGAGALCVTLAESSCPDYERGRRACLTLHRHPTPHCSTWGLPLRVAGSWLTVVTVEALGGWRMGVRRTGQVGPTMHPPPVSGASPLLLHHLLLLLLIIILTC

SEQ ID NO: 1028555 - protein, 86 aa, Homo sapiens
ASCEGSFQVSTGEPGVMLASFILHASDDPVALSARPPGPLAHISDSDVLPHRMLQSDGGDRTAVPDGGGNAQSCGSHLAAVKHQWE

SEQ ID NO: 1028556 - protein, 313 aa, Homo sapiens
MALRICVTYTPALPIGLCTRCCLCLEQSPSWCHCLRGVSFLTFHLHQSVPLGDRDSLLMFTRQAGHFVEGSKAGRSRGRLCLSQALRVAVRGAFVSLWFAAGAGDRERNKGDKGAQTGAGLSQEAEDVDVSRARRVTDAPQGTLCGTGNRNSGSQSARAVGVAHLGEAFRVGVEQAISSCPEEVHGRHGLSMEIMWARMDVALRSPGRGLLAGAGALCMTLAESSCPDYERGRRACLTLHRHPTPHCSTWGLPLRVAGSWLTVVTVEALGGWRMGVRRTGQVGPTMHPPPVSGASPLLLHHLLLLLLIIILTC

SEQ ID NO: 1028557 - protein, 75 aa, Homo sapiens
VSVLSPGKWNFPPPRDVMMIDVTSSAQCLYRWRQCPELWQPPCSREAPVGMTVKRTTEMPAPGPTAAAPASRLRV

SEQ ID NO: 1028558 - protein, 255 aa, Homo sapiens [sequence omitted]

SEQ ID NO: 1028559 - protein, 394 aa, Homo sapiens
NAARGHGDPGTERRPLIFPMVKGVSAFPGWITDGSIFLLLRVHSGAGKFISDPKSSHVMPRLTPLTTSPGTWTASGSFPRLMALRICVTYTPALPIGLCTRCCLCLEQSPSWCHCLRGVSFLTFHLHQSVPLGDRDSLLMFTRQAGHFVEGSKAGRSRGRLCLSQALRVAVRGAFVSLWFAAGAGDRERNKGDKGAQTGAGLSQEAEDVDVSRARRVTDAPQGTLCGTGNRNSGSQSARAVGVAHLGEAFRVGVEQAISSCPEEVHGRHGLSMEIMWARMDVALRSPGRGLLAGAGALCMTLAESSCPDYERGRRACLTLHRHPTPHCSTWGLPLRVAGSWLTVVTVEALGGWRMGVRRTGQVGPTMHPPPVSGASPLLLHHLLLLLLIIILTC

SEQ ID NO: 1028560 - protein, 255 aa, Homo sapiens
MFTRQAGHFVEGSKAGRSRGRLCLSQALRVAVRGAFVSLWFAAGAGDRERNKGDKGAQTGAGLSQEAEDVDVSRARRVTDAPQGTLCGTGNRNSGSQSARAVGVAHLGEAFRVGVEQAISSCPEEVHGRHGLSMEIMWAQMDVALRSPGRGLLAGAGALCMTLAESSCPDYERGRRACLTLHRHPTPHCSTWGLPLRVAGSWLTVVTVEALGRWRMGVRRTGQVGPTMHPPPVSGASPLLLHHLLLLLLIIILTC

SEQ ID NO: 1028561 - protein, 313 aa, Homo sapiens; identical to SEQ ID NO: 1028554

SEQ ID NO: 1028562 - protein, 160 aa, Homo sapiens
MAGPGWLLGMARHGPWGLVLGAQLSARHSHHPRGLVILPCPRPGSKRAAPRPAGIRSGQVAGLGMSEDPRVVRGKDSSWGLAPRVEEGDCVCVCVCVGARARTSVLYGPGSLKALGAGCACFCVLFLWAWRLLEPRHPPNPRTKQTKSIKELSDCKKKKK

SEQ ID NO: 1028563 - protein, 197 aa, Homo sapiens
  misc_feature (179)..(179): Xaa can be any naturally occurring amino acid
AGRCHSREHEGPNPGAPHGKDSDDDDDVAVTVDRDRFMDEFFEQVEEIRGFIDKIAENVEEVKREAQVAILGIPQPRMRRRRRSWKNSCPDIKKTANKVRSKVKEHRSRSIGGKEGRGWNRLLPGWNLEGSGKTQALHGWSRKFVEVMSEYNATQSEFNREGACAKARFQKAAWRIHRXREPRNQLREAGDGALLGR

SEQ ID NO: 1028564 - protein, 109 aa, Homo sapiens
MKVLILKGERIEDECGQDPYIRELGLYETGSHYGSLVYQFEFMSLPSFSEKLSHPEDYGGLIYTSPRAVEAAELCLEQNNKTEVWERVSEKKNGHAKSVYVVGKCYCYL

SEQ ID NO: 1028565 - protein, 251 aa, Homo sapiens
MAPYSLLVTRLQKALGVRQYHVASVLCQRAKVAMSHFEPNEYIHYDLLEKNINIVRKRLNRPLTLSEKIVYGHLDDPASQEIELRQVVPAVCGRDRVAMPGCDWTRVAMLQFISQRACPSVAVPSTIHCDHLIECPGMGAMKDLRRSQGHQPGKFIISWQLQVPNMAWASGSLDLEIIHQIILENYAYPGVLLIGTDSHTTQVVAALGASALEVGGAECCGCQWLGSPARLKCPTVIGVKADGLSLREVLT

SEQ ID NO: 1028566 - protein, 247 aa, Homo sapiens
GAAETAPRASEQGVGRSEDSMYTAIPQSGLSIPRLRCTDPGLHVWRVEKLKPVPVAQENQAVFFSGDSYLDAAQVAPEEVSHLHLWIGQQSSRDEQGGRVPVLAVHLNTLRGESGHVQHLQVRALESDLFMSYFPRGPQYQEGGVESAFIKTSTGAQLPSRKLYLGEGEKKKIRGHRAGHVNVGQSSRPGDCFIVDLGQNIFAMVLVEKSTILERNSEARELARVIRDSERQVKAQVDDVPDGEGAW

SEQ ID NO: 1028567 - protein, 114 aa, Homo sapiens
LPDEGCLTQEFPSLGGKDIETKSAFEPENTCSSLLAFLLRYDDLFSTAIIFYHLLTLPHLHYLLLAPLEEEPIFLGSPLLNTCLRELHHDGRRTVTSGQVSADESRRSPAPAMG

SEQ ID NO: 1028568 - protein, 124 aa, Homo sapiens
  misc_feature (105)..(105): Xaa can be any naturally occurring amino acid
MSQIKPGAPGPKTSIETNIEVLYDANVKVAGKSKHLMWRHMGFWKSASGGMHVTGGTFFREWCSARHLAHKGPNSPGLRDSGRPARSLIRYYGTFLRGTRPPFTXSKVSSALGWFTGKAFGQTD

SEQ ID NO: 1028569 - protein, 32 aa, Homo sapiens
MQVYASAESGASCSISLLPLLSSVIIPPSPSV

SEQ ID NO: 1028570 - protein, 32 aa, Homo sapiens; identical to SEQ ID NO: 1028569

SEQ ID NO: 1028571 - protein, 100 aa, Homo sapiens
TNMVVPATWDSFQHCAPLPVQNPVDATDHLLWTLDLHKVDGLHEAVAGLVSTLGCSRQRLCLWGMILAPFRRWIGVAMQGDCRGRRKRTPRHVLLTQCAL

SEQ ID NO: 1028572 - protein, 412 aa, Homo sapiens
FGVKSRWPRHSARADKVVGVGVLVEERLDGAHVLVGEVAAYHTLVGNRVVGFADAGQQHQAHVMELEGAKNHQVSRLFTLAALGVDVGHAGGFLLGAVEVDLEHVGIGPQLEVGHLAQGRQDVHVRRSLGVHVAHVATAKPAEVARAHLRTVGVGVRPRRIGRRQVVRFVTYVGRRFLKQLGGDSIFLRLQRERVGAIRRVGVAATAFTDQLALDRPGLAGGAKDFFRIVEKRLQLFVADAEVLDGHVLGNEVLPVALFVMAAHAQLNRVDAKMHARPVQPRTTNAIARQERAQLTIGQGDVIHAVANGHRFFGDVLEQLLTHAVGQFVDDLGIVTQVVCTPPESPYTTRPGDGARAIPCLRGAFITSSNFISKITLVDADNRQSEGGDDRGYERVSDPSGGRGGPGEPRNG

SEQ ID NO: 1028573 - protein, 96 aa, Homo sapiens
IAIVSTTVETKDPEKEIRPALELLEPIEQKFVSISDLLVPKDLGTESQIFISRTYDANHSFETTCDDIKNIYKRMTGSEFDFEEMKRKKNDIYGED

SEQ ID NO: 1028574 - protein, 195 aa, Homo sapiens
SVTHTSNMFYSVVFIIFHVFHCNSLIYTVLQCRFPTNVFFSVTHSSNMFYSVVFIIFHVSHCNSLIYTVLQIPFPTNVFFSVTHSSNMFYSVVFIIFHVFHCNSLIYTVLQIPFPTNVFFIVTHTSKMFYSVVFIIFHVSHCNSLIYTVLQCQFPTNVFFSVTRSSNMFYSVVFIIFHVFHCNSVDAAAHLVVVG

SEQ ID NO: 1028575 - protein, 644 aa, Homo sapiens
LLRGSPCFGVLQLAAGFIPLPCLWSLLLLLGCSTPVRIRRGGTSLSAAANSRRVRLRTPGAESRVPPPPRGTHSPRSPGPRVLPPATLPHVVPPFPITWHFKNAGKMAVAAAAAAAGPAGAGGGRAQRSGLLEVLVRDRWHKVLVNLSEDALVLSSEEGAAAYNGIGTATNGSFCRGAGAGHPGAGGAQPPDSPAGVRTAFTDLPEQVPESISNQKRGVKVLKQELGGLGISIKGGKENKMPILISKIFKGLAADQTQALYVGDAILSVNGADLRDATHDEAVQALKRAGKEVLLEVKYMREATPYVKKGSPVSEIGWETPPPESPRLGGSTSDPPSSQSFSFHRDRKSIPLKMCYVTRSMALADPENRQLEIHSPDAKHTVILRSKDSATAQAWFSAIHSNVNDLLTRVIAEVREQLGKTGIAGSREIRHLGWLAEKVPGESKKQWKPALVVLTEKDLLIYDSMPRRKEAWFSPVHTYPLLATRLVHSGPGKGSPQAGVDLSFATRTGTRQGIETHLFRAETSRDLSHWTRSIVQGCHNSAELIAEISTACTYKNQECRLTIHYENGFSITTEPQEGAFPKTIIQSPYEKLKMSSDDGIRMLYLDFGGKDGEIQLDLHSCPKPIVFIIHSFLSAKITRLGLVA

SEQ ID NO: 1028576 - protein, 488 aa, Homo sapiens
LLRGSPCFGVLQLAAGFIPLPCLWSLLLLLGCSTPVRIRRGGTSLSAAANSRRVRLRTPGAESRVPPPPRGTHSPRSPGPRVLPPATLPHVVPPFPITWHFKNAGKMAVAAAAAAAGPAGAGGGRAQRSGLLEVLVRDRWHKVLVNLSEDALVLSSEEGAAAYNGIGTATNGSFCRGAGAGHPGAGGAQPPDSPAGVRTAFTDLPEQVPESISNQKRGVKVLKQELGGLGISIKGGKENKMPILISKIFKGLAADQTQALYVGDAILSVNGADLRDATHDEAVQALKRAGKEVLLEVKYMREATPYVKKGSPVSEIGWETPPPESPRLGGSTSDPPSSQSFSFHRDRKSIPLKMCYVTRSMALADPENRQLEIHSPDAKHTVILRSKDSATAQAWFSAIHSNVNDLLTRVIAEVREQLGKTGIAGSREIRHLGWLAEKVPGESKKQWKPALVVLTEKDLLIYDSMPRRKEAWFSPVHTYPLLATSPHP

SEQ ID NO: 1028577 - protein, 644 aa, Homo sapiens; identical to SEQ ID NO: 1028575

SEQ ID NO: 1028578 - protein, 696 aa, Homo sapiens
LLRGSPCFGVLQLAAGFIPLPCLWSLLLLLGCSTPVRIRRGGTSLSAAANSRRVRLRTPGAESRVPPPPRGTHSPRSPGPRVLPPATLPHVVPPFPITWHFKNAGKMAVAAAAAAAGPAGAGGGRAQRSGLLEVLVRDRWHKVLVNLSEDALVLSSEEGAAAYNGIGTATNGSFCRGAGAGHPGAGGAQPPDSPAGVRTAFTDLPEQVPESISNQKRGVKVLKQELGGLGISIKGGKENKMPILISKIFKGLAADQTQALYVGDAILSVNGADLRDATHDEAVQALKRAGKEVLLEVKYMREATPYVKKGSPVSEIGWETPPPESPRLGGSTSDPPSSQSFSFHRDRKSIPLKMCYVTRSMALADPENSHRNHRFEELKATIMTMWFEFSWIPRSCCKPARLHPPDYVSSVFSPESLGGERQLEIHSPDAKHTVILRSKDSATAQAWFSAIHSNVNDLLTRVIAEVREQLGKTGIAGSREIRHLGWLAEKVPGESKKQWKPALVVLTEKDLLIYDSMPRRKEAWFSPVHTYPLLATRLVHSGPGKGSPQAGVDLSFATRTGTRQGIETHLFRAETSRDLSHWTRSIVQGCHNSAELIAEISTACTYKNQECRLTIHYENGFSITTEPQEGAFPKTIIQSPYEKLKMSSDDGIRMLYLDFGGKDGEIQLDLHSCPKPIVFIIHSFLSAKITRLGLVA

SEQ ID NO: 1028579 - protein, 540 aa, Homo sapiens
LLRGSPCFGVLQLAAGFIPLPCLWSLLLLLGCSTPVRIRRGGTSLSAAANSRRVRLRTPGAESRVPPPPRGTHSPRSPGPRVLPPATLPHVVPPFPITWHFKNAGKMAVAAAAAAAGPAGAGGGRAQRSGLLEVLVRDRWHKVLVNLSEDALVLSSEEGAAAYNGIGTATNGSFCRGAGAGHPGAGGAQPPDSPAGVRTAFTDLPEQVPESISNQKRGVKVLKQELGGLGISIKGGKENKMPILISKIFKGLAADQTQALYVGDAILSVNGADLRDATHDEAVQALKRAGKEVLLEVKYMREATPYVKKGSPVSEIGWETPPPESPRLGGSTSDPPSSQSFSFHRDRKSIPLKMCYVTRSMALADPENSHRNHRFEELKATIMTMWFEFSWIPRSCCKPARLHPPDYVSSVFSPESLGGERQLEIHSPDAKHTVILRSKDSATAQAWFSAIHSNVNDLLTRVIAEVREQLGKTGIAGSREIRHLGWLAEKVPGESKKQWKPALVVLTEKDLLIYDSMPRRKEAWFSPVHTYPLLATSPHP

SEQ ID NO: 1028580 - protein, 610 aa, Homo sapiens
MGYVGISGLLWEGCSTPVRIRRGGTSLSAAANSRRVRLRTPGAESRVPPPPRGTHSPRSPGPRVLPPATLPHVVPPFPITWHFKNAGKGGRAQRSGLLEVLVRDRWHKVLVNLSEDALVLSSEEGAAAYNGIGTATNGSFCRGAGAGHPGAGGAQPPDSPAGVRTAFTDLPEQVPESISNQKRGVKVLKQELGGLGISIKGGKENKMPILISKIFKGLAADQTQALYVGDAILSVNGADLRDATHDEAVQALKRAGKEVLLEVKYMREATPYVKKGSPVSEIGWETPPPESPRLGGSTSDPPSSQSFSFHRDRKSIPLKMCYVTRSMALADPENRQLEIHSPDAKHTVILRSKDSATAQAWFSAIHSNVNDLLTRVIAEVREQLGKTGIAGSREIRHLGWLAEKVPGESKKQWKPALVVLTEKDLLIYDSMPRRKEAWFSPVHTYPLLATRLVHSGPGKGSPQAGVDLSFATRTGTRQGIETHLFRAETSRDLSHWTRSIVQGCHNSAELIAEISTACTYKNQECRLTIHYENGFSITTEPQEGAFPKTIIQSPYEKLKMSSDDGIRMLYLDFGGKDGEIQLDLHSCPKPIVFIIHSFLSAKITRLGLVA

SEQ ID NO: 1028581 - protein, 685 aa, Homo sapiens
LLRGSPCFGVLQLAAGFIPLPCLWSLLLLLGCSTPVRIRRGGTSLSAAANSRRVRLRTPGAESRVPPPPRGTHSPRSPGPRVLPPATLPHVVPPFPITWHFKNAGKMAVAAAAAAAGPAGAGGGRAQRSGLLEVLVRDRWHKVLVNLSEDALVLSSEEGAAAYNGIGTATNGSFCRGAGAGHPGAGGAQPPDSPAGVRTAFTDLPEQVPESISNQKRGVKVLKQELGGLGISIKGGKENKMPILISKIFKGLAADQTQALYVGDAILSVNGADLRDATHDEAVQALKRAGKEVLLEVKYMREATPYVKKGSPVSEIGWETPPPESPRLGGSTSDPPSSQSFSFHRDRKSIPLKMCYVTRSMALADPENRQLEIHSPDAKHTVILRSKDSATAQAWFSAIHSNVNDLLTRVIAEVREQLGKTGIAGSREIRHLGWLAEKVPGESKKQWKPALVVLTEKDLLIYDSMPRRKEAWFSPVHTYPLLATSRWSLTVSPSLECSGMILAHCNLRLPGQAVFCLSLPSSWNYRLVHSGPGKGSPQAGVDLSFATRTGTRQGIETHLFRAETSRDLSHWTRSIVQGCHNSAELIAEISTACTYKNQECRLTIHYENGFSITTEPQEGAFPKTIIQSPYEKLKMSSDDGIRMLYLDFGGKDGEIQLDLHSCPKPIVFIIHSFLSAKITRLGLVA

SEQ ID NO: 1028582 - protein, 102 aa, Homo sapiens
DKERRRDERERSTSKKKKSKDKEKDRERKSESDKDVKQVTRDYDEEEQGYDSEKEKKEEKKPIETGSPKTKECSVEKGTGDSLRESKVNGDDHHEEDMDMSD

SEQ ID NO: 1028583 - protein, 102 aa, Homo sapiens; identical to SEQ ID NO: 1028582

SEQ ID NO: 1028584 - protein, 169 aa, Homo sapiens
  misc_feature (11)..(11): Xaa can be any naturally occurring amino acid
  misc_feature (29)..(30): Xaa can be any naturally occurring amino acid
  misc_feature (33)..(33): Xaa can be any naturally occurring amino acid
  misc_feature (39)..(39): Xaa can be any naturally occurring amino acid
  misc_feature (46)..(46): Xaa can be any naturally occurring amino acid
  misc_feature (72)..(72): Xaa can be any naturally occurring amino acid
  misc_feature (83)..(83): Xaa can be any naturally occurring amino acid
  misc_feature (90)..(91): Xaa can be any naturally occurring amino acid
  misc_feature (95)..(95): Xaa can be any naturally occurring amino acid
  misc_feature (103)..(103): Xaa can be any naturally occurring amino acid
  misc_feature (105)..(105): Xaa can be any naturally occurring amino acid
  misc_feature (109)..(109): Xaa can be any naturally occurring amino acid
  misc_feature (113)..(114): Xaa can be any naturally occurring amino acid
  misc_feature (116)..(116): Xaa can be any naturally occurring amino acid
  misc_feature (120)..(120): Xaa can be any naturally occurring amino acid
QDAPFAPPPQXVPIRRGAAPPPGGAPSKXXSQXGEAAKXLGGFQVXPAPDGQFAFLIPNGAFANSGPVIPVXTSNSGTSREHXKKKKNQXXQANXEHHDGGRXGXKGEXATPXXKXPNPXIFPPNSKQEFKKWERRGFFFISGYFVVFNFLRRLLFEERAVLSDWPHAL

SEQ ID NO: 1028585 - protein, 34 aa, Homo sapiens
MTTFLTTKTVPLALCPGPLAFWTSSVLLWRKCNS

SEQ ID NO: 1028586 - protein, 88 aa, Homo sapiens
MAKRYELPDAAWDLVADIFTKNQRTGRPRADDRLMLNGILWVLCSGAAWRDMAEGFGPGSTIYQGFRGWRDCGALDQMLKGLHIRWNE

SEQ ID NO: 1028587 - protein, 80 aa, Homo sapiens
PVDLTLRKLYKLLSLFSHELFCPYPINKLGACCRGIGGLWPEVTSEAIGILFGFATSDLPPSWGKTATRGGCTGPELFLE

SEQ ID NO: 1028588 - protein, 176 aa, Homo sapiens
GSTDGNGAERLFAELRKMNARGLGSELKDSIPVTELSASGPFESHDLLRKGFSCVKNELLPSHPLELSEKNFQLNQDKMNFSTLRNIQGLFAPLKLPDGIQGSAAGSASSISFKLKSFTGCFEGNDETIGFEDILNDPSQRESHGEKQTWMGGIITLGFTCNSVLFIGNRGLTSGL

SEQ ID NO: 1028589 - protein, 107 aa, Homo sapiens
MAWLEKTVQCNRDVVTLSCCQPLKMQKKQGPYDVSGPTREVTLGAQNLSESAAVKEILKEQENRKGLIAAICAGPTALLAHEIGAGSKVTTYPLARDEMMTGGHSTP

SEQ ID NO: 1028590 - protein, 63 aa, Homo sapiens [sequence omitted]

SEQ ID NO: 1028591 - protein, 108 aa, Homo sapiens
MTPAPAPPPVPLRLGPFSDSISGRAARPAPSWAGVSQLEELVSRLLHLHFKDDKTKVSGDALQLMVELLKVFVVEAAVRGVRQAQAEDALRVDVDQLEKVLPQLLLDF

SEQ ID NO: 1028592 - protein, 195 aa, Homo sapiens
MVELLKVFVVGEPRPTLPPGTASGILRFSSGKTKTCFPVSHKGLNLGLLSLFVRSSSPRRAAGPGRRRAPCGRGPAGEGASAAAPGLLGISAVAEATPRGAPGPQKQALCFQRPLIRGREGPEGFGVDSNKISGSLQPVQKGQDCSALRALECPVGTLVWEGAAPGESLPLLPGTIVCMPPGVLQAGAGKGLASR

SEQ ID NO: 1028593 - protein, 235 aa, Homo sapiens
RGSCGARVEAAVMEGAGAGSGFRKELVSRLLHLHFKDDKTKRCGWGCGREVGPRVCPQGPFPATLQGQGLGRAGVCLEHPARAVGEESRITSPCLAVSGDALQLMVELLKVFVVGEPRPTLPPGTASGILRFSSGKTKTCFPVSHKGLNLGLLSLFVTGAVAWFWGLPVGVGGGTGPELRPSLGSGLRSPQHPPPLAFLTAEAAVRGVRQAQAEDALRVDVDQLEKVLPQLLLDF

SEQ ID NO: 1028594 - protein, 63 aa, Homo sapiens [sequence omitted]

SEQ ID NO: 1028595 - protein, 75 aa, Homo sapiens
RGSCGARVEAAVMEGAGAGSGFRKELVSRLLHLHFKDDKTKEAAVRGVRQAQAEDALRVDVDQLEKVLPQLLLDF

SEQ ID NO: 1028596 - protein, 93 aa, Homo sapiens
RGSCGARVEAAVMEGAGAGSGFRKELVSRLLHLHFKDDKTKVSGDALQLMVELLKVFVVEAAVRGVRQAQAEDALRVDVDQLEKVLPQLLLDF

SEQ ID NO: 1028597 - protein, 244 aa, Homo sapiens
RGSCGARVEAAVMEGAGAGSGFRKELVSRLLHLHFKDDKTKVSGDALQLMVELLKVFVVGEPRPTLPPGTASGILRFSSGKTKTCFPVSHKGLNLGLLSLFVRSSSPRRAAGPGRRRAPCGRGPAGEGASAAAPGLLGISAVAEATPRGAPGPQKQALCFQRPLIRGREGPEGFGVDSNKISGSLQPVQKGQDCSALRALECPVGTLVWEGAAPGESLPLLPGTIVCMPPGVLQAGAGKGLASR

SEQ ID NO: 1028598 - protein, 154 aa, Homo sapiens
LGAFCVDVDQLEKVPPQLVRELGRGASGGARLAGPKCFSSAAAPGLLGISAVAEATPRGAPGPQKQALCFQRPLIRGREGPEGFGVDSNKISGSLQPVQKGQDCSALRALECPVGTLVWEGAAPGESLPLLPGTIVCMPPGVLQAGAGKGLASR

SEQ ID NO: 1028599 - protein, 93 aa, Homo sapiens; identical to SEQ ID NO: 1028596

SEQ ID NO: 1028600 - protein, 63 aa, Homo sapiens [sequence omitted]

SEQ ID NO: 1028601 - protein, 63 aa, Homo sapiens [sequence omitted]

SEQ ID NO: 1028602 - protein, 127 aa, Homo sapiens [sequence omitted]

SEQ ID NO: 1028603 - protein, 37 aa, Homo sapiens
MKHYILKRNQSFCTTVNLDKLWTLVSEQTRVNASVEV

SEQ ID NO: 1028604 - protein, 47 aa, Homo sapiens
MCEVSDGEVSDGEVSDGEVSDAKFPMDETTQKEGTQASEGYLSQSHG

SEQ ID NO: 1028605 - protein, 224 aa, Homo sapiens
  misc_feature (2)..(2): Xaa can be any naturally occurring amino acid
  misc_feature (34)..(34): Xaa can be any naturally occurring amino acid
  misc_feature (60)..(60): Xaa can be any naturally occurring amino acid
SXDTQLNCSFSCSSKEEVLSIFHWEDFSSSFYFXVNLFSDLEGFVELPPQLSLGGVVGGXVHCQDLPALVTLVLHPQSARGFVADLPAHSPVIVAFSYEFCWRVLEGRAVEVDVHGLLSLMYDLEEGLEHGRGSPGARYGEKAIKLRTRRDIGKEEVRTSVGQIKAVSGRILRLPGCENQSWKRWSMMSERPEEVVSNTTRCAYVAVSFYKTEQIEDDHSCDRR

SEQ ID NO: 1028606 - protein, 113 aa, Homo sapiens
  misc_feature (3)..(6): Xaa can be any naturally occurring amino acid
  misc_feature (9)..(9): Xaa can be any naturally occurring amino acid
  misc_feature (23)..(24): Xaa can be any naturally occurring amino acid
  misc_feature (29)..(30): Xaa can be any naturally occurring amino acid
  misc_feature (44)..(45): Xaa can be any naturally occurring amino acid
  misc_feature (93)..(93): Xaa can be any naturally occurring amino acid
MKXXXXGGXKRITTHRLSGPHTXXGDGLXXTCRIGHPGCMRLCXXGILFSRVRDKKAVVSKQVFVVENEPALDHQVNEPTHCKPAQGQLPPSXQWDNLQHDLTTAMWSRLRPL

SEQ ID NO: 1028607 - protein, 283 aa, Homo sapiens
  misc_feature (3)..(3): Xaa can be any naturally occurring amino acid
RGXQYTLGEAGVNRPRAAAPNPADGTPKVLLLSGQPASAAGAPAGPGPAAHGASPERGQPGGSERGAAPGAASDSAVTHLSPEEKALRRKRKNRVAAQTARDRKKARMSELEQQVVDLEEENQKLLLENQLLREKTHGLVVENQELRQRLGDGCPGCVKRRRKPRGMKCGQWPGLLSPQHVRLRAPLQLVQAQLSPLQKISPVDSGGIDSSDSESDILVGILDNVDPVMFFKVPFPEPASVEELPEVYPEGPSSYQLLSLSVGAVISQAGGLNELIRFDAIFP

SEQ ID NO: 1028608 - protein, 283 aa, Homo sapiens
AGPCVPHEPCVLSDLNLAPRGSPRGRQPRFQNDYYLDLPPLKIFSICIKMGPQIFHKTSELGLHSYELPRADQTKTKKTLAKPNIMNVVVLDGVRTPFLLTGTAYKDLMPHDLARSSCLRLCCIGPVSLRKSLIISSLVQLFMKCKTSNVAREGCLGTGLLVTRLLLTLSPWLSISANQAMTTGVGLIASGQCDVIVAGGVESMSDVPIQSLKERMRHTDALISHKAQIYGPATVLQSLNSRFNFLSTWSSLRFLKFSSSETMAHSADRTGRALACSRVAPGC

SEQ ID NO: 1028609 - protein, 283 aa, Homo sapiens
AEDQHRLYQQIKAGAYDFPCVRNGTLSAPEAKDLINKMLTIKRHPKRITAAEALKHPWISHRSTVASCSAQTGDLELLKKFNARRKLKGAILTTMLATRNFSGGKSGGNKKSDGVKESSESTNTTIEDEDTKVRKQEIIKVTEQLIEAISNWRMYESYTKMCDPGMTAFEPEALGNLGRGPGLSIDSICENLVGPGTCKPDDTPPFLKSPKCTLMGQTEYSLALQYHPASRKITMRAARTGIPTANAHKSDGRPRVICQPPSERVKWAELGANLTEQNRREHT

SEQ ID NO: 1028610 - protein, 294 aa, Homo sapiens
AEDQHRLYQQIKAGAYDFPCVRNGTLSAPEAKDLINKMLTIKRHPKRITAAEALKHPWISHRSTVASCSAQTGDLELLKKFNARRKLKGAILTTMLATRNFSGGKSGGNKKSDGVKKRKSSSSVQLMESSESTNTTIEDEDTKVRKQEIIKVTEQLIEAISNWRMYESYTKMCDPGMTAFEPEALGNLGRGPGLSIDSICENLVGPGTCKPDDTPPFLKSPKCTLMGQTEYSLALQYNPESRKITMRAARTGIPTANAHKSDGRPRVICQPPSERVKWAELGANLTEQNRREHT

SEQ ID NO: 1028611 - protein, 219 aa, Homo sapiens
TSGTRTGRSLDPVIAGRTLGCGPAHGAGEVGRGSRSACVLFDMKGRQGSAEAVIKQLALDPHLITHAFFRLEGLATGVQATIGLERRGGVGKHADFRRELVEQAGALSEGVVGLAAIGVVAGEVVGALFEVFEARTDHAAQAVGEDDLVLQVECVAFGLFEEVGTGAYAVGFGLAVHRLVDVDGIVPCDRRHALFLCEYPRTRYRSTVHVANCPYRTPR

SEQ ID NO: 1028612 - protein, 239 aa, Homo sapiens
SKTRSCRFPVVNQAPECRFGGGILGPLGKRRDLARASEPRTEGARRAGPQPRPLADPAMDPFLVLLHSVSSSLSSSELTELKFLCLGRVGKRKLERVQSGLDLFSMLLEQNDLEPGHTELLRELLASLRRHDLLRRVDDFEAGAAAGAAPGEEDLCAAFNVICDNCGERLEKAGSSAQSLRHQDRQASRNRIPPANLTERVAGSPLKKSGQKHRERRTQTVGPPWWGALRVLARIEPGG

SEQ ID NO: 1028613 - protein, 337 aa, Homo sapiens
  misc_feature (161)..(161): Xaa can be any naturally occurring amino acid
  misc_feature (169)..(169): Xaa can be any naturally occurring amino acid
  misc_feature (171)..(171): Xaa can be any naturally occurring amino acid
  misc_feature (177)..(177): Xaa can be any naturally occurring amino acid
  misc_feature (180)..(180): Xaa can be any naturally occurring amino acid
  misc_feature (182)..(184): Xaa can be any naturally occurring amino acid
  misc_feature (186)..(186): Xaa can be any naturally occurring amino acid
  misc_feature (191)..(191): Xaa can be any naturally occurring amino acid
  misc_feature (195)..(195): Xaa can be any naturally occurring amino acid
  misc_feature (198)..(198): Xaa can be any naturally occurring amino acid
  misc_feature (205)..(207): Xaa can be any naturally occurring amino acid
  misc_feature (212)..(212): Xaa can be any naturally occurring amino acid
  misc_feature (214)..(214): Xaa can be any naturally occurring amino acid
  misc_feature (216)..(216): Xaa can be any naturally occurring amino acid
  misc_feature (218)..(218): Xaa can be any naturally occurring amino acid
  misc_feature (228)..(228): Xaa can be any naturally occurring amino acid
  misc_feature (235)..(235): Xaa can be any naturally occurring amino acid
  misc_feature (238)..(239): Xaa can be any naturally occurring amino acid
  misc_feature (241)..(241): Xaa can be any naturally occurring amino acid
  misc_feature (243)..(243): Xaa can be any naturally occurring amino acid
  misc_feature (247)..(247): Xaa can be any naturally occurring amino acid
  misc_feature (249)..(249): Xaa can be any naturally occurring amino acid
  misc_feature (251)..(252): Xaa can be any naturally occurring amino acid
  misc_feature (255)..(260): Xaa can be any naturally occurring amino acid
  misc_feature (264)..(264): Xaa can be any naturally occurring amino acid
  misc_feature (272)..(273): Xaa can be any naturally occurring amino acid
  misc_feature (276)..(276): Xaa can be any naturally occurring amino acid
  misc_feature (278)..(280): Xaa can be any naturally occurring amino acid
  misc_feature (283)..(284): Xaa can be any naturally occurring amino acid
  misc_feature (286)..(286): Xaa can be any naturally occurring amino acid
  misc_feature (291)..(291): Xaa can be any naturally occurring amino acid
  misc_feature (299)..(299): Xaa can be any naturally occurring amino acid
  misc_feature (302)..(303): Xaa can be any naturally occurring amino acid
  misc_feature (307)..(307): Xaa can be any naturally occurring amino acid
  misc_feature (313)..(314): Xaa can be any naturally occurring amino acid
  misc_feature (316)..(316): Xaa can be any naturally occurring amino acid
  misc_feature (336)..(336): Xaa can be any naturally occurring amino acid
SKTRSCRFPVVNQAPECRFGGGILGPLGKRRDLARASEPRTEGARRAGPQPRPLADPAMDPFLVLLHSVSSSLSSSELTELKFLCLGRVGKRKLERVQSGLDLFSMLLEQNDLEPGHTELLRELLASLRRHDLLRRVDDFEAGAAAGAAPGEEDLMIPPFXSSYLLLSXLXAKFIMXSLXLXXXDXATALXGMLXRSXLGAFVHXXXLRAPXPXRXGXVVGGERWWAXPVVGAVXTTXXAXGXVAPXLXRXXGLXXXXXXMSVXQSDAGGVXXVDXAXXXAQXXFXCVADXQGNVVPRXAGXXVREXPGGCYXXQXGSSWCGSAGRGLGVRPHWFXV

SEQ ID NO: 1028614 - protein, 109 aa, Homo sapiens
DRYKSSSVPVFPFVWFHPMGHYPVHRCSEMKLKASLVFSLDYSVVARKCSFVILNYFFETGSCSITQAGVQWHNHGSLQPQSPRLKQSFSLNILSTWDQRHTPPHPANF

SEQ ID NO: 1028615 - protein, 237 aa, Homo sapiens
AFSCCCCAPSPRGGQFQPAPASVPARLARAPAMGLTVSCALFCGSFGKKQMRILMVGLDAAGKTTILYKLKLGEIVTTIPTIGFNVETVEYKNICFTVWDVGGQDKIRALWRHYFQNTQGLIFVVDSNDREPGAKNLLMTSRRWTDELRDAALLVQATKQDLPTATARERADWQAGGYQHLHSPARREGPGTPGDHQKATGQEERARELADHNELNTEDKPAKGHGTLTARTDTMRT

SEQ ID NO: 1028616 - protein, 99 aa, Homo sapiens
AFSCCCCAPSPRGGQFQPAPASVPARLARAPAMGLTVSCALFCGSFGKKQMRILMVGLDAAGKTTILYKLKLGEIVTTIPTIGFNVETVEYKNICFTVW

SEQ ID NO: 1028617 - protein, 244 aa, Homo sapiens
MLGFVGRVAAAPASGALRRLTPSASLPPAQLLLRAAPTAVHPVRDYAAQTSPSPKAGAATGRIVAVIGAVVDVQFDEGLPPILNALEVQGRETRLVLEVAQHLGESTVRTIAMDGTEGLVRGQKVLDSGAPIKIPVGPETLGRIMNVIGEPIDERGPIKTKQFAPIHAEAPEFMEMSVEQEILVTGIKVVDLLAPYAKGGKTWAFGGAGVGKTVLIMEVNQQCRKGHGGYPGVGWMVVRGPEKG

SEQ ID NO: 1028618 - protein, 129 aa, Homo sapiens
  misc_feature (5)..(5): Xaa can be any naturally occurring amino acid
LWVYXPPGFGICLTHAARPRCRTAMLGFVGRVAAAPASGALRRLTPSASLPPAQLLLRAAPTAVHPVRDYAAQTSPSPKAGAASHNMHDIIHMHKLQMRENNRNVKKKSNHPIVAMKAPVTVYMQACCM

SEQ ID NO: 1028619 - protein, 378 aa, Homo sapiens
  misc_feature (299)..(299): Xaa can be any naturally occurring amino acid
SQSAPGCLDEETSRALSAPRADAKAYSDPSTGEPATYGELQQRCRPDQLTGLSLLPLSEKAARARQEELYSELQARETFEKTPVEVPVGGFKGRTVTVWELISSEYFTAEQRQELLRQFRTGKVTVEKVIKILITIVEEVETLRQERLSFSGLRAPVPASELLASGVLSRAQFEQLKDGKTTVKDLSELGSVRTLLQGSGCLAGIYLEDTKEKVSIYEAMRRGLLRATTAALLLEAQAATGFLVDPVRNQRLYVHEAVKAGVVGPELHEQLLSAEKAVTGYRDPYSGQHHLPSSKACRXALVLRQHGSGCWRAMIPRRVIEPVQAPVPVDVLQRVFVRVTVLRPGDRVLATGEPVRLAGGPKAPCRREGGPPSGEFDL

SEQ ID NO: 1028620 - protein, 261 aa, Homo sapiens
ALQEYLVWGEPTEYYTPEVKEIRCIVMSAVTCVRTHQTVHRVAGSAVPSMKYLYMNGSLKLDPYSYPNESPQCITPGCHTHAKIMADNPSWDGEKTIIITCSFTPGSCTLTAYKLTPSGYEWGRQNTDKGNNPKGYLPSHYERVQMLLSDRFLGFFMVPAQSSWNYNFMGVRHDPNMKYELQLANPKEFYPEVHRPSHFLNFAFLQEGEVYSADREDLYACPFPCLLLQPPEAEASAPPDRPLTFSSLASFPLSVLVLLTS

SEQ ID NO: 1028621 - protein, 212 aa, Homo sapiens
VIFAPSRWVAEPSEGEAPAPTGQPLVLEQGVLYLRRYREYERRLAIGLRRIAAARLPPAESAAVATVFAALFPQARAGQDRQASAAALALQRALLLVTGGPGTGKTTTIARLLLLRVAQARQQGQASLRIALAAPTGRAAERMAESLRAAAGYVSAAGGDAALFAALPSGASTVHRLLGVIPDTPRFRHCEDNPLPYDVIVVDEASMMFTSR

SEQ ID NO: 1028622 - protein, 160 aa, Homo sapiens
MRTIRSDHNVLSATDCLTPQAVTAQPGIVFDTAVPPAILPRLTPEQPHSVPPARTAQRALLSDWWVYSFTQLAHAKAEPAPDAGRRIAEPLTGGAGRTSLATGCHPTVPAWERSARRPPFLSASVLVWHLHEVFERTDFLAWSTWRANAPVPATERAVLL

SEQ ID NO: 1028623 - protein, 168 aa, Homo sapiens
PNSALWLATGTFYQTERTALWPLLGDPQAVTAQPGIVFDTAVPPAILPRLTPEQPHSVPPARTAQRALLSDWWVYSFTQLAHAKAEPAPDAGRRIAEPLTGGAGRTSLATGCHPTVPAWERSARRPPFLSASVLVWHLHEVFERTDFLAWSTWRANAPVPATERAVLL

SEQ ID NO: 1028624 - protein, 232 aa, Homo sapiens
PNSALWLATGTFYQTERTALWPLLGDPQAVTAQPGIVFDTAVPPAILPRLTPEQPHSVPPARTAQRALLSDWWVWLPPAESAAVATVFAALFPQARAGQDRQASAAALALQRALLLVTGGPGTGKTTTIARLLLLRVAQARQQGQASLRIALAAPTGRAAERMAESLRAAAGYVSAAGGDAALFAALPSGASTVHRLLGVIPDTPRFRHCEDNPLPYDVIVVDEASMMFTSR

SEQ ID NO: 1028625 - protein, 170 aa, Homo sapiens
PNSALWLATGTFYQTERTALWPLLGDPQAVTAQPGIVFDTAVPPAILPRLTPEQPHSVPPARTAQRALLSDWWVYSFTQLAQPKRSLLPLAAPTGRAAERMAESLRAAAGYVSAAGGDAALFAALPSGASTVHRLLGVIPDTPRFRHCEDNPLPYDVIVVDEASMMFTSR

SEQ ID NO: 1028626 - protein, 70 aa, Homo sapiens
MAESLRAAAGYVSAAGGDAALFAALPSGASTVHRLLGVIPDTPRFRHCEDNPLPYDVIVVDEASMMFTSR

SEQ ID NO: 1028627 - protein, 249 aa, Homo sapiens
MASRLLLNNGAKMPILGLGTWKSPPGQVTEAVKVAIDVGYRHIDCAHVYQNENEVGVAIQEKLREQVVKREELFIVSKLWCTYHEKGLVKGACQKTLSDLKLDYLDLYLIHWPTGFKPGKEFFPLDESGNVVPSDTNILDTWAAMEELVDEGLVKAIGISNFNHLQVEMILNKPGLKYKPAVNQIECHPYLTQEKLIQYCQSKGIVVTAYSPLGSPDRPWAKPEDPSLPGGSQDQGDRSQAQIKLQARS

SEQ ID NO: 1028628 - protein, 260 aa, Homo sapiens
GCEIAARSVKIVLIILICSGRLDVQYLRVRTWKSPPGQVTEAVKVAIDVGYRHIDCAHVYQNENEVGVAIQEKLREQVVKREELFIVSKLWCTYHEKGLVKGACQKTLSDLKLDYLDLYLIHWPTGFKPGKEFFPLDESGNVVPSDTNILDTWAAMEELVDEGLVKAIGISNFNHLQVEMILNKPGLKYKPAVNQIECHPYLTQEKLIQYCQSKGIVVTAYSPLGSPDRPWAKPEDPSLPGGSQDQGDRSQAQIKLQARS

SEQ ID NO: 1028629 - protein, 242 aa, Homo sapiens
MASRLLLNNGAKMPILGLGTWKSPPGQVTEAVKVAIDVGYRHIDCAHVYQNENEVGVAIQEKLREQVVKREELFIVSKLWCTYHEKGLVKGACQKTLSDLKLDYLDLYLIHWPTGFKPGKEFFPLDENEVGVAIQEKLRELVDEGLVKAIGISNFNHLQVEMILNKPGLKYKPAVNQIECHPYLTQEKLIQYCQSKGIVVTAYSPLGSPDRPWAKPEDPSLPGGSQDQGDRSQAQIKLQARS

SEQ ID NO: 1028630 - protein, 113 aa, Homo sapiens
MASRLLLNNGAKMPILGLGTWKSPPGQVTEAVKVAIDVGYRHIDCAHVYQNENEVGVAIQEKLREQVVKREELFIVSKLWLQRYPLEERGLVVNREALPRKTTPANPLKGLAP

SEQ ID NO: 1028631 - protein, 248 aa, Homo sapiens
MASRLLLNNGAKMPILGLGTWKSPPGQVTEAVKVAIDVGYRHIDCAHVYQNENEVGVAIQEKLREQVVKREELFIVSKLWCTYHEKGLVKGACQKTLSDLKLDYLDLYLIHWPTGFKPGKEFFPLDESGNVVPSDTNILDTWAAMEELVDEGLVKAIGISNFNHLQVEMILNKPGLKYKPAVNQIECHPYLTQEKLIQYCRPRILVDAKAPRFLEGLGQAEAFSGIQTRAGRKNNAGCRSLEKWGPFP

SEQ ID NO: 1028632 - protein, 256 aa, Homo sapiens
MASRLLLNNGAKMPILGLGTWKSPPGQVTEAVKVAIDVGYRHIDCAHVYQNENEVGVAIQEKLREQVVKREELFIVSKLWCTYHEKGLVKGACQKTLSDLKLDYLDLYLIHWPTGFKPGKEFFPLDESGNVVPSDTNILDTWAAMEELVDEGLVKAIGISNFNHLQVEMILNKPGLKYKPAVNQIECHPYLTQEKLIQYCQSKGIVVTAYSPLGSPDRPWAKPEDPSLPGGSQDQGDRSQAQFPKAVTPERIAENL

SEQ ID NO: 1028633 - protein, 236 aa, Homo sapiens
MASRLLLNNGAKMPILGLGTWKSPPGQVTEAVKVAIDVGYRHIDCAHVYQNENEVGVAIQEKLREQVVKREELFIVSKLWCTYHEKGLVKGACQKTLSDLKLDYLDLYLIHWPTGFKPGKEFFPLDESGNVVSHVYQNENEVGVAIQEKLREQVVKRENFKVFDFELSSQDMTTLLRYNRNWRVCALLSCTSTRITPSMKSFEAVVACSSQVDYTCVSWLIFFLANVGYAGAVISV

SEQ ID NO: 1028634 - protein, 148 aa, Homo sapiens
MRQLINPAWFVLMLLCGTDATFVPGFCPNLFVPEVCQLAAAILVLFHHFQPLQGLEDPAGHTLGASAEVAGLRRRFSALSPIDLGHGANPSATPGWYRCRSCGSSSLCKTSSHRREQALVCLCQLDGIHPFWWTYRFPGLLRGRLPKL

SEQ ID NO: 1028635 - protein, 174 aa, Homo sapiens
  misc_feature (158)..(159): Xaa can be any naturally occurring amino acid
  misc_feature (166)..(167): Xaa can be any naturally occurring amino acid
MVCSNASMWDRCHHRAGDYVQISIVPEVCQLAAAILVLFHHFQPLQGLEDPAGHTLGASAEVAGLRRRFSALSPIDLGHGANPSATLDGTGAAAVEAARCVEPVLIVGSKLLCCQLTDHHSGLQLPTFESCQSSDDSVFTLTDSASRSRCIQIDDTLXXNHSVGFXXVSPHKRA

SEQ ID NO: 1028636 - protein, 203 aa, Homo sapiens
STEGGRTAQLTAVLRKLLDPRLISTEENTQAAETMGPLSAPPCTQHITWKGLLLTASLLNFWNLPTTAQVTIEAQPPKVSEGKDVLLLVHNLPQNLAGYIWYKGQMTYLYHYITSYVVDGQRIIYGPAYSGRERVYSNASLLIQNVTQEDAGSYTLHIIKRGDGTRGVTGHFTFTLHLETPKPSISSSNLNPRGGHGGCDLNL

SEQ ID NO: 1028637 - protein, 306 aa, Homo sapiens
  misc_feature (132)..(132): Xaa can be any naturally occurring amino acid
  misc_feature (142)..(142): Xaa can be any naturally occurring amino acid
  misc_feature (155)..(155): Xaa can be any naturally occurring amino acid
  misc_feature (160)..(160): Xaa can be any naturally occurring amino acid
  misc_feature (162)..(162): Xaa can be any naturally occurring amino acid
STEGGRTAQLTAVLRKLLDPRLISTEENTQAAETMGPLSAPPCTQHITWKGLLLTASLLNFWNLPTTAQVTIEAQPPKVSEGKDVLLLVHNLPQNLAGYIWYKGQMTYLYHYITSYVVDGQRIIYGGGGGGXEEEEEGGGPXPGCIREMFTAGRXARDPXTXTTFIKGYASGDWEGVTGHFTFTLHLETPKPSISSSNLNPREAMEAVILTCDPATPAASYQWWMNGQSLPIFFTVLQLVQKPNRTLFSILVSQKYTCKDPIECEIRNPSECPAAVTQSPWNLLASSPKPYITINNLNPRENKDVL

SEQ ID NO: 1028638 - protein, 172 aa, Homo sapiens
  misc_feature (132)..(132): Xaa can be any naturally occurring amino acid
  misc_feature (140)..(140): Xaa can be any naturally occurring amino acid
  misc_feature (148)..(149): Xaa can be any naturally occurring amino acid
  misc_feature (156)..(156): Xaa can be any naturally occurring amino acid
  misc_feature (161)..(161): Xaa can be any naturally occurring amino acid
STEGGRTAQLTAVLRKLLDPRLISTEENTQAAETMGPLSAPPCTQHITWKGLLLTASLLNFWNLPTTAQVTIEAQPPKVSEGKDVLLLVHNLPQNLAGYIWYKGQMTYLYHYITSYVVDGQRIIYGCGPAIXVDGGNKYXFHIAFPRXXPAMFTPXEGRQXSLTTFTPSVKA

SEQ ID NO: 1028639 - protein, 307 aa, Homo sapiens
LTPGRREATELLGRRTRTLVPGAGARLGDTFLLALSNAVQAAGPTDYIGPGAGGDTWAMELKLISIHAHLLLAGAFADTRVDCAHTVTCGPRLKVPLDLNAFDVQASPNEGFVNQNITIFYRDRLGLYPRLRFCLEGLCMVVCHMNVSLWCSTEDDAARNVVEHYIRTQESAGLVVIDWEDWRPVVGCSNVAGAKMCIAGYHASYDGADTVTLDWPPDRIVKQAQYEFEVAAETVHAGRHMRLIVIGTCGPGDPLGLLPSFLTATIMIMCKNWESYSRSAALMLTRETAMTMSGLCCGLRARPLPVC

SEQ ID NO: 1028640 - protein, 73 aa, Homo sapiens
SPLYTFRSRLRDLVFFLIDHGFCFFVDLYFCSAFFLPRSEMWIVCKGDILLTPTSVLSYSVKLHVFLKGLRSN

SEQ ID NO: 1028641 - protein, 246 aa, Homo sapiens
  misc_feature (15)..(15): Xaa can be any naturally occurring amino acid
  misc_feature (92)..(96): Xaa can be any naturally occurring amino acid
  misc_feature (122)..(122): Xaa can be any naturally occurring amino acid
  misc_feature (128)..(128): Xaa can be any naturally occurring amino acid
QCVRLSKFNSERSIXFIPPDGEFELMRYRTTKNIILPFRVIPLVREVGRTKLEVKVVIKSNFKPSLLAKKIEVRIPTPLNTSGVQVICMKGXXXXXASENAIVWKIKRMAGMKESQISAEIXFFFFFXKKKWARPPISMNFEVPFAPSGLKVRYLKVFEPKLNYSDHDVIKCHCGQVYAHPFDDIMVVRYIGRSGIYENSLLAATRQLAHLPSHPPPQVQVPLPPPPHISVSSLLLCCLPFAPARV

SEQ ID NO: 1028642 - protein, 231 aa, Homo sapiens
  misc_feature (15)..(15): Xaa can be any naturally occurring amino acid
  misc_feature (92)..(96): Xaa can be any naturally occurring amino acid
  misc_feature (122)..(122): Xaa can be any naturally occurring amino acid
  misc_feature (128)..(128): Xaa can be any naturally occurring amino acid
QCVRLSKFNSERSIXFIPPDGEFELMRYRTTKNIILPFRVIPLVREVGRTKLEVKVVIKSNFKPSLLAKKIEVRIPTPLNTSGVQVICMKGXXXXXASENAIVWKIKRMAGMKESQISAEIXFFFFFXKKKWARPPISMNFEVPFAPSGLKVRYLKVFEPKLNYSDHDVIKWVRYIGRSGIYENSLLAATRQLAHLPSHPPPQVQVPLPPPPHISVSSLLLCCLPFAPARV

SEQ ID NO: 1028643 - protein, 74 aa, Homo sapiens
QSPNSAQSPNSAQSPNSAQSPNSAQSPNSAQSPNSAQSPNSAQSPNSAPAEKYSGGSTVHNSIIMRGTALNHSA

SEQ ID NO: 1028644 - protein, 66 aa, Homo sapiens
  misc_feature (65)..(65): Xaa can be any naturally occurring amino acid
ESKQCPESKHVPTSPNSAQSPNSAQSPNSAQSPNSAQSPNSAQSPNSAQSPNSAQSPNSALLEGXP

SEQ ID NO: 1028645 - protein, 83 aa, Homo sapiens
RGADIPVVLLCRGSSCCHEGRTGLPTAEPELRARAARCVAPSVRSSTRRSCGHQLTLQVLDFVQGPCFAQGDGLIKLYVKLYQ

SEQ ID NO: 1028646 - protein, 100 aa, Homo sapiens
  misc_feature (56)..(56): Xaa can be any naturally occurring amino acid
  misc_feature (60)..(60): Xaa can be any naturally occurring amino acid
  misc_feature (62)..(63): Xaa can be any naturally occurring amino acid
  misc_feature (69)..(69): Xaa can be any naturally occurring amino acid
  misc_feature (92)..(92): Xaa can be any naturally occurring amino acid
MSNPSSPPPYEDRLPLLTQALCAPGGYGAAICAARRSIRAYPGYPAGWLRVTLAGXPQPXLXXHPMPIXYGPGHGYYGEEETVSDIFEPEEXDDRKVQHT

SEQ ID NO: 1028647 - protein, 102 aa, Homo sapiens
SSLGNKSLTKDPVSLRYRTRRCSNLGLRARETSEGEKCPARTPLCVLCFVFETESSSYCPGWSSSYCPGWSSSYCPGWSSSYCPGWSSSYAQAGVALLARQM

SEQ ID NO: 1028648 - protein, 118 aa, Homo sapiens
SVPEDNDVREDHDVREDHDVREDHDVREDHDVREDHDVREDHDVREDHDVREDHDVREDHDVREDHDVREDHDVREDHDVREDHDVRGLSGLVGDHDVRVTIIHNNITPGRESLCKSP

SEQ ID NO: 1028649 - protein, 90 aa, Homo sapiens
SVPEDNDVREDHDVREDHDVREDHDVREDHDVREDHDVREDHDVREDHDVREDHDVREDHDVREDHDVREDHDVREDHDVREDHDVRVPY

SEQ ID NO: 1028650 - protein, 54 aa, Homo sapiens
SVPEDNDVREDHDVREDHDVREDHDVREDHDVREEKLPVLTAMCSSLSICKLLC

SEQ ID NO: 1028651 - protein, 76 aa, Homo sapiens
SAEHTVGLVALLLEAITSPLVSVRYCQRCIRVISDAGKSSPWSKIFPMIFRYCGGSTFSDLSLRLHTLRGYRAQCI

SEQ ID NO: 1028652 - protein, 446 aa, Homo sapiens
MREIVHIQAGQCGNQIGTKFWEVISDEHGIDPAGGYVGDSALQLERINVYYNESSSQKYVPRAALVDLEPGTMDSVRSGPFGQLFRPDNFIFGQTGAGNNWAKGHYTEGAELVDAVLDVVRKECEHCDCLQGFQLTHSLGGGTGSGMGTLLISKIREEFPDRIMNTFSVMPSPKVSDTVVEPYNATLSVHQLVENTDETYCIDNEALYDICFRTLKLTTPTYGDLNHLVSATMSGVTTSLRFPGQLNADLRKLAVNMVPFPRLHFFMPGFAPLTSRGSQQYRALTVPELTQQMFDARNMMAACDPRHGRYLTVATVFRGPMSMKEVDEQMLAIQSKNSSYFVEWIPNNVKVAVCDIPPRGLKMASTFIGNSTAIQELFKRISEQFSAMFRRKAFLHWFTGEGMDEMEFTEAESNMNDLVSEYQQYQDATANDGEEAFEDEEEEIDG

SEQ ID NO: 1028653 - protein, 362 aa, Homo sapiens
MREIVHIQAGQCGNQIGTKFWEVISDEHGIDPAGGYVGDSALQLERINVYYNESSSQKYVPRAALVDLEPGTMDSVRSGPFGQLFRPDNFIFGQTGAGNNWAKGHYTEGAELVDAVLDVVRKECEHCDCLQGFQLTHSLGGGTGSGMGTLLISKIREEFPDRIMNTFSVMPSPKVSDTVVEPYNATLSVHQLVENTDETYCIDNEALYDICFRTLKLTTPTYGDLNHLVSATMSGVTTSLRFPGQLNADLRKLAVNMVPFPRLHFFMPGFAPLTSRGSQQYRALTVPELTQQMFDARNMMAAGIRAKAELTRGTGVRASPTGGQPSAPKRHTSGTTKEGTAPEDTSPQRRAHTPHCEKRVTK

SEQ ID NO: 1028654 - protein, 446 aa, Homo sapiens; identical to SEQ ID NO: 1028652

SEQ ID NO: 1028655 - protein, 374 aa, Homo sapiens
MDSVRSGPFGQLFRPDNFIFGQTGAGNNWAKGHYTEGAELVDAVLDVVRKECEHCDCLQGFQLTHSLGGGTGSGMGTLLISKIREEFPDRIMNTFSVMPSPKVSDTVVEPYNATLSVHQLVENTDETYCIDNEALYDICFRTLKLTTPTYGDLNHLVSATMSGVTTSLRFPGQLNADLRKLAVNMVPFPRLHFFMPGFAPLTSRGSQQYRALTVPELTQQMFDARNMMAACDPRHGRYLTVATVFRGPMSMKEVDEQMLAIQSKNSSYFVEWIPNNVKVAVCDIPPRGLKMASTFIGNSTAIQELFKRISEQFSAMFRRKAFLHWFTGEGMDEMEFTEAESNMNDLVSEYQQYQDATANDGEEAFEDEEEEIDG

SEQ ID NO: 1028656 - protein, 409 aa, Homo sapiens
MREIVHIQAGQCGNQIGTKFWEVISDEHGIDPAGGYVGDSALQLERINVYYNESSCQTGAGNNWAKGHYTEGAELVDAVLDVVRKECEHCDCLQGFQLTHSLGGGTGSGMGTLLISKIREEFPDRIMNTFSVMPSPKVSDTVVEPYNATLSVHQLVENTDETYCIDNEALYDICFRTLKLTTPTYGDLNHLVSATMSGVTTSLRFPGQLNADLRKLAVNMVPFPRLHFFMPGFAPLTSRGSQQYRALTVPELTQQMFDARNMMAACDPRHGRYLTVATVFRGPMSMKEVDEQMLAIQSKNSSYFVEWIPNNVKVAVCDIPPRGLKMASTFIGNSTAIQELFKRISEQFSAMFRRKAFLHWFTGEGMDEMEFTEAESNMNDLVSEYQQYQDATANDGEEAFEDEEEEIDG

SEQ ID NO: 1028657 - protein, 308 aa, Homo sapiens
MREIVHIQAGQCGNQIGTKFWEVISDEHGIDPAGGYVGDSALQLERINVYYNESSSQKYVPRAALVDLEPGTMDSVRSGPFGQLFRPDNFIFGQTGAGNNWAKGHYTEGAELVDAVLDVVRKECEHFFMPGFAPLTSRGSQQYRALTVPELTQQMFDARNMMAACDPRHGRYLTVATVFRGPMSMKEVDEQMLAIQSKNSSYFVEWIPNNVKVAVCDIPPRGLKMASTFIGNSTAIQELFKRISEQFSAMFRRKAFLHWFTGEGMDEMEFTEAESNMNDLVSEYQQYQDATANDGEEAFEDEEEEIDG

SEQ ID NO: 1028658 - protein, 142 aa, Homo sapiens
MSGGPIKICLSKRPGLSSAGSRISGRLVPAKMTTFVVVLKPSISTSSWLSVFSCSLCPPKLPLPLFLPTASISSMKRMQGAFFRARANKSRTLAGPTPTNISKNSDPLTVMKGTLASPAVALASSVFPVPGGPVRTGTLWIL

SEQ ID NO: 1028659 - protein, 532 aa, Homo sapiens
MREIVHIQAGQCGNQIGTKFWEVISDEHGIDPAGGYVGDSALQLERINVYYNESSSQKYVPRAALVDLEPGTMDSVRSGPFGQLFRPDNFIFEFLFNMEQPGQNVYTSLKLTSSYFDLPKNVPVHLLSCTVGGCLFPRPLSLANSTSWNHFTPSLSVTKHGDGAALSCLNGTGLIFVAGQTGAGNNWAKGHYTEGAELVDAVLDVVRKECEHCDCLQGFQLTHSLGGGTGSGMGTLLISKIREEFPDRIMNTFSVMPSPKVSDTVVEPYNATLSVHQLVENTDETYCIDNEALYDICFRTLKLTTPTYGDLNHLVSATMSGVTTSLRFPGQLNADLRKLAVNMVPFPRLHFFMPGFAPLTSRGSQQYRALTVPELTQQMFDARNMMAACDPRHGRYLTVATVFRGPMSMKEVDEQMLAIQSKNSSYFVEWIPNNVKVAVCDIPPRGLKMASTFIGNSTAIQELFKRISEQFSAMFRRKAFLHWFTGEGMDEMEFTEAESNMNDLVSEYQQYQDATANDGEEAFEDEEEEIDG

SEQ ID NO: 1028660 - protein, 142 aa, Homo sapiens; identical to SEQ ID NO: 1028658

SEQ ID NO: 1028661 - protein, 114 aa, Homo sapiens
AGGSGAPGIRPPGRLGWARVAASRALGSERLSPRLALPKFWEVISDEHGIDPAGGYVGDSALQLERINVYYNESSSQKYVPRAALVDLEPGTMDSVRSGPFGQLFRPDNFIFGV

SEQ ID NO: 1028662 - protein, 126 aa, Homo sapiens
MKEHTGRLVIGDHKSTSHFRTGEEDKKINEELESQYQQSMDSKLSGRYRRHCGLGFSEVEDHDGEGDVAGDDDDDDDDSPDPESPDDSESDSESEKEESAEELQAAEHPDEVEDPKNKKDAKALLT

SEQ ID NO: 1028663 - protein, 126 aa, Homo sapiens; identical to SEQ ID NO: 1028662

SEQ ID NO: 1028664 - protein, 105 aa, Homo sapiens
  misc_feature (54)..(54): Xaa can be any naturally occurring amino acid
  misc_feature (59)..(59): Xaa can be any naturally occurring amino acid
  misc_feature (68)..(68): Xaa can be any naturally occurring amino acid
  misc_feature (77)..(77): Xaa can be any naturally occurring amino acid
  misc_feature (100)..(100): Xaa can be any naturally occurring amino acid
MAMAEVEAYYSLEYAGRWFERTRLSGLHGRAQEETRRMSGNASLNLYEGQKFEXAHTLXAGELRKKGXEEGNSEKVXEWSLVKGFYVLFGGPLLSRALYXIIETA

SEQ ID NO: 1028665 - protein, 31 aa, Homo sapiens
MASESFEWTEAWSLSTHILHILEKPTNRDGV

SEQ ID NO: 1028666 - protein, 204 aa, Homo sapiens
MRLYHIAESWPIPFQRRLVANRGLVANRGLVANRGLVANRGRTSPRLATSPRLATSPRLATSPRLATSPRLATSPRLATSPRLATSPRLATSPRLATSPRLATSPRLATSPRLATSLRWNGIEPTVEPTLDYVRQPWTSRANRGLVANRGLVANRGLVANRGLVANRGLVANRGLVANPGLVANRGLVANRGLVANRGLVPTVD

SEQ ID NO: 1028667 - protein, 127 aa, Homo sapiens
MRLYHIAESWPIPFQRRLVANRGLVANRGLVANRGLVANRGRTSPRLATSPRLATSPRLATSPRLATSPRLATSPRLATSPRLATSPRLATSPRLATSPRLATSPRLATSPRLATSLRWNGIEPTVD

SEQ ID NO: 1028668 - protein, 233 aa, Homo sapiens
MRLYHIAESWPIPFQRRLVANRGLVANRGLVANRGLVANRGRTSPRLATSPRLATSPRLATSPRLATSPRLATSPRLATSPRLATSPRLATSPRLATSPRLATSPRLATSPRLATSLRWNGIVHGWLLVHGWLLVHGWLLVHGWLLVHGWLLVHGWLLVHGWLLVHGWLLVHGWLLVHGWLHGWLLVHGWLCCCRFQVVGHLMASESFEWTEAWSLSTHILHILEKPTNRDGV

SEQ ID NO: 1028669 - protein, 186 aa, Homo sapiens
MRLYHIAESWPIPFQRRLVANRGLVANRGLVANRGLVANRGRTSPRLATSPRLATSPRLATSPRLATSPRLATSPRLATSPRLATSPRLATSPRLATSPRLATSPRLATSPRLATSLRWNGIVHGWLLVHGWLLVHGWLLVHGWLLVHGWLLVHGWLLVHGWLLVHGWLLVHGWLLVHGWLTPPGN

SEQ ID NO: 1028670 - protein, 250 aa, Homo sapiens
TSPRLAYEYGLYHIAESWPIPFQRRLVANRGLVANRGLVANRGLVANRGRTSPRLATSPRLATSPRLATSPRLATSPRLATSPRLATSPRLATSPRLATSPRLARLGLELLTSGDLPSSASQIAGITGMSHRARLATSPRLATSPRLATSPRLATSPRLATSLRWNGIEPTVEPTLDYVRQPWTSRANRGLVANRGLVANRGLVANRGLVANRGLVANRGLVANPGLVANRGLVANRGLVANRGLVPTVD

SEQ ID NO: 1028671 - protein, 210 aa, Homo sapiens
MRLYHIAESWPIPFQRRLVANRGLVANRGLVANRGLVANRGRTSPRLATSPRLATSPRLATSPRLATSPRLATSPRLATSPRLATSPRLATSPRLATSPRLATSPRLATSPRLATSPRLATSLRWNGIEPTVEPTLDYVRQPWTSRANRGLVANRGLVANRGLVANRGLVANRGLVANRGLVANPGLVANRGLVANRGLVANRGLVPTVD

SEQ ID NO: 1028672 - protein, 106 aa, Homo sapiens
MRLYHIAESWPIPFQRRLVANRGLVANRGLVANRGLVANRGRTSPRLATSPRLATSPRLATSPRLATSPRLATSPRLATSPRLATSPRLATSPRLARLWSRTPDLR

SEQ ID NO: 1028673 - protein, 176 aa, Homo sapiens
MRLYHIAESWPIPFQRRLVANRGLVANRGLVANRGLVANRGRTSPRLATSPRLATSPRLATSPRLATSPRLATSPRLATSPRLATSPRLATSPRLAGGPFPLYYSMTSDKLHISLFQPSNRGLVANRGLVANRGLVANRGLVANRGLVANPGLVANRGLVANRGLVANRGLVPTVD

SEQ ID NO: 1028674 - protein, 31 aa, Homo sapiens; identical to SEQ ID NO: 1028665

SEQ ID NO: 1028675 - protein, 149 aa, Homo sapiens
MGRQTQCLKTFQSPCASQPTSPRLATSPRLATSPRLATSPRLATSPRLATSPRLATSPRLATSPRLATSPRLATSPRLATSPRLATSPRLATSPRLAPRLATSPRLAVRCRFQVVDHLMASESFEWTEAWSLSTHILHILEKPTNRDGV

SEQ ID NO: 1028676 - protein, 146 aa, Homo sapiens
MRLYHIAESWPIPFQRRLVANRGLVANRGLVANRGLVANRGRTSPRLATSPRLATSPRLATSPRLATSPRLATSPRLATSPRLATSPRLATSPRLAGSYSTVGYRLRVIRSLALSPRLECSGMISAYSTHHSPGSSSSSASANRGL

SEQ ID NO: 1028677 - protein, 112 aa, Homo sapiens
LVHGWLMNMRLYHIAETWPIPFQRRLVANRGLVANRGLVANRGLVANRGRQPWTSSQPWTSSQPWTSSQPWTSSQPWTSSQPWTSSQPWTSSQPWTSSQPWTSTNRGLVEKT

SEQ ID NO: 1028678 - protein, 130 aa, Homo sapiens
MRLYHIAESWPIPFQRRLVANRGLVANRGLVANRGLVANRGRTSPRLATSPRLATSPRLATSPRLATSPRLATSPRLATSPRLATSPRLATSPRLATSPRLATSPRLALSVFSVLLLNSIPAELAYRGLV

SEQ ID NO: 1028679 - protein, 198 aa, Homo sapiens
MRLYHIAESWPIPFQRRLVANRGLVANRGLVANRGLVANRGRTSPRLATSPRLATSPRLATSPRLATSPRLATSPRLATSPRLATSPRLATSPRLATSPRLATSPRLATSPRLATSLRWNGIDEGTTGVSQPWTSSQPWTSSQPWTSSQPWTSSQPWTSSQPWTSSQPWTSSQPWTSSQPWTSSQPWTSTNRGLVEKT

SEQ ID NO: 1028680 - protein, 210 aa, Homo sapiens
MRLYHIAESWPIPFQRRLVANRGLVANRGLVANRGLVANRGRTSPRLATSPRLATSPRLATSPRLATSPRLATSPRLATSPRLATSPRLATSPRLATSPRLATSPRLATSPRLATSLRWNGIVHGWLLVHGWLLVHGWLLVHGWLLVHGWLLVHGWLLVHGWLLVHGWLLVHGWLLVHGWLTPCNPSTLGGTRQGRSPELGSSRPQHVTS

SEQ ID NO: 1028681 - protein, 191 aa, Homo sapiens
MRLYHIAESWPIPFQRRLVANRGLVANRGLVANRGLVANRGRTSPRLATSPRLATSPRLATSPRLATSPRLATSPRLATSPRLATSPRLATSPRLATSPRLATSPRLATSPRLATSLRWNGIVHGWLLVHGWLLVHGWLLVHGWLLVHGWLLVHGWLLVHGWLLVHGWLLVHGWLLVHGWLQSTVAQAGVQ

SEQ ID NO: 1028682 - protein, 139 aa, Homo sapiens
MRLYHIAESWPIPFQRRLVANRGLVANRGLVANRGLVANRGRTSPRLATSPRLATSPRLATSPRLATSPRLATSPRLATSPRLATSPRLATSPRLATSPRLATSPRLATSPRLATSPRLATSPRLATSLRWNGIEPTVD

SEQ ID NO: 1028683 - protein, 112 aa, Homo sapiens
MRLYHIAESWPIPFQRRLVANRGLVANRGLVANRGLVANRGRTSPRLATSPRLATSPRLATSPRLATSPRLATSPRLATSPRLATSPRLATSPRLAHACNPSTLGGLDGRIV

SEQ ID NO: 1028684 - protein, 177 aa, Homo sapiens
MRLYHIAESWPIPFQRRLVANRGLVANRGLVANRGLVANRGRTSPRLATSPRLATSPRLATSPRLATSPRLATSPRLATSPRLATSPRLATSPRLATSPRLATSPRLASQPWTSSQPWTSSQPWTSSQPWTSSQPWTSSQPWTSSQPWTSSQPWTSSQPWTSSQPWTSTNRGLVEKT

SEQ ID NO: 1028685 - protein, 191 aa, Homo sapiens
MRLYHIAESWPIPFQRRLVANRGLVANRGLVANRGLVANRGRTSPRLATSPRLATSPRLATSPRLATSPRLATSPRLATSLHGWLLVHGWLLVHGWLLVHGWLLVHGWLLVHGWLLVHGWLLVHGWLLVHGWLLVHGWLHGWLLVHGWLCCCRFQVVGHLMASESFEWTEAWSLSTHILHILEKPTNRDGV

SEQ ID NO: 1028686 - protein, 112 aa, Homo sapiens
  misc_feature (109)..(109): Xaa can be any naturally occurring amino acid
MRLYHIAESWPIPFQRRLVANRGLVANRGLVANRGLVANRGRTSPRLATSPRLATSPRLATSPRLATSPRLATSPRLATSPRLATSPRLATSPRLADYDQYALLYSQLXLVA

SEQ ID NO: 1028687 - protein, 128 aa, Homo sapiens
  misc_feature (117)..(117): Xaa can be any naturally occurring amino acid
MRLYHIAESWPIPFQRRLVANRGLVANRGLVANRGLVANRGRTSPRLATSPRLATSPRLATSPRLATSPRLATSPRLATSPRLATSPRLATSPRLAKEEVNRPRSGNGAGQNSRHTXVNDAPGKPTVT

SEQ ID NO: 1028688 - protein, 102 aa, Homo sapiens
MRLYHIAESWPIPFQRRLVANRGLVANRGLVANRGLVANRGRTSPRLATSPRLATSPRLATSPRLATSPRLATSPRLATSPRLATSPRLATSPLQPPPPGLK

SEQ ID NO: 1028689 - protein, 307 aa, Homo sapiens
QSSAQAKQASICTCSQSCSHHEPPACRVSSASYGGGFGGGSCQLGGGRGVSTCSTRFVSGGSAGGYGGGVSCGFGGGAGSGFGGGYGGGLGGGYGGGLGGGFGGGFAGGFVDFGACDGWLLTGNEKITMQNLNDLLASYLEKVRALEEANADLEVKIRDWHLKQSPGSPERDYRPYYKTIGMKLRDKDPETGTIENNRVILEIEQCHGWLVDRPYRRQVLRNELGLGAQSVEADINVAVPGLLDEVHLWSGEMTWENAETEDLNEELSLHLRKNHEREWRALAPVVGPGHCEFVPPGYTYRAANTGD

SEQ ID NO: 1028690 - protein, 356 aa, Homo sapiens
QSSAQAKQASICTCSQSCSHHEPPACRVSSASYGGGFGGGSCQLGGGRGVSTCSTRFVSGGSAGGYGGGVSCGFGGGAGSGFGGGYGGGLGGGYGGGQVNVEMDATPGIDLTRVLAEMREQYEAYMKKNHEEEMKEFSNQVVGQVNVGGGFGGGFAGGFVDFGACDGWLLTGNEKITMQNLNDCWLLYLEKVRALEEANADLEVKIRDWHLKQSPGSPERDYRPYYKTIGMKLRDKDPETGTIENNRVILEIEQCHGWLVDRPYRRQVLRIEAVPGAQSVEADINVAVPGLLDEVHLWSGEMTWENAETEDLNEELSLHLRKNHEREWRALAPVVGPGHCEFVPPGYTYRAANTGD

SEQ ID NO: 1028691 - protein, 289 aa, Homo sapiens
MSSPMYNASITDLEAKIAQLELSMAGQRDQGVARRVLSNQVRRTEKKLKDVLLQVDDERRNAEQYKDQADKASTRLKQLKRQLEEAEEEAQRANASRRKLQRELEDATETADAMNREVSSLKNKLRRGDLPFVVPRRMARKGAGDGSDEEVDGKADGAEANLPNKPLLLQPEMDGQTDTTASPFQTPTARLYPPSWDCCEHASSCPRRPHPVPPGVWGIGFLCCIPFQLPPLSNLIQRDRARAQAESDRAPQPLCQKAQDVRRAGSPGEGQVSMNLFLQTEAFGSRPAA

SEQ ID NO: 1028692 - protein, 353 aa, Homo sapiens
QPLTLSSLSLISCEPCASTSTTIRSHSSSRRGFTCQLSQAPWGQPLWLQQRLLCPAPGCSGGLGGACGGAGFGSRSLYGLGGSKRISIGGGSCAISGRLWQQSRSPSYGFGGAGSGFGFGGGAGIGFGLGGGAGLAGGFWGPLASLCCPPLEASKGGQPVNQSLLDSPQTLQFRIPTIPAVLRGLRSREPDSGPFNNKFCLLHRQGAVPGSSTTNGSGTTQRWTLCLQGRRGHQRLLRACTLKPLFPEAVHSATFRQPAWTSHLSVGNRRPAVGLRSSRRPLQGPGGQDFTDTNLCGIDIQQAAQKADRTGTFADLLATTGLVHCLAHPLKPGVELRQPEARPLITGTETTFM

SEQ ID NO: 1028693 - protein, 110 aa, Homo sapiens
VCHSTYLLILFLTLPLSIVPSPHSLGFSHISLLSVPHTFQDNFWLTALSPACSFLEYHSLQIFTRLLLLDNKMTSHTAIKMNEIMLFAATCMELEAIILSELTQKQKTKY

SEQ ID NO: 1028694 - protein, 279 aa, Homo sapiens
  misc_feature (152)..(152): Xaa can be any naturally occurring amino acid
MGVKASQTGFVVLVLLQCCSAYKLVCYYTSWSQYREGDGSCFPDALDRFLCTHIIYSLCQYKSTITSTPGSGTDVTLYGYAQGHLKNRNPKPEDSSRSVPEDGPSVVSKSLFQDMACQATQSRRTFIKSVPPFLRTHGFDGLDLAWLYPGRXDKQHFTTLIKEMKAEFIKEAQPGKKQLLLSAALSAGKVTIDSSYDIAKISQHLDFISIMTYDFMEPGVGPQAITAPVPGQEDASPDRFSNTDYAVGYMFEGWGLLPVSLLMGIPNFGRSFTLGSSET

SEQ ID NO: 1028695 - protein, 69 aa, Homo sapiens
PFEQLPVRKYIVNVYQIYEDGEQSLILSTSQTTAPDAPPDPTVDHVDDTSIVVRLEQTPGYLKNIEYRA

SEQ ID NO: 1028696 - protein, 73 aa, Homo sapiens
MVASRVPPQHSHVACLFHVKWWRPGFLSSTRMSPASSNARMDVYARMDVYARMDVYARMDVYARMDVYARMDV

SEQ ID NO: 1028697 - protein, 193 aa, Homo sapiens
  misc_feature (55)..(55): Xaa can be any naturally occurring amino acid
MPHYSLLNASASTGPFLSKHRGTQARGTKARGLRPPWPGMQVEACGLHLPFHHTXQHPSSRAVGPQARVQTSVLTEAYIEGCGPGHLASATHSGPCDKRSHRQMSGSDVTLLPHSLSATAPCSGPKPVGPRFVLLPFFSPLYKPLHQSPEPSASGVPSNAGVPLRRNPSSQGPIGYTVQVPGGRKEGPETRLG

SEQ ID NO: 1028698 - protein, 196 aa, Homo sapiens
SGTGISRRDLNKEYSNRTQTKGQEAHEEVLKITSHQENAYEIYNEISLNTHWDRYITSKCIISSVVERCKGSTFRQCSNGRIVCPNMLWCNGADDCGDGSDEIPCNKTACGVGEFRCRDGTCIGNSSRCNQFVDCEDASDEMNCSATDCSSYFRLGVKGVLFQPCERPSLCYAPSWVCDGANDCGDYSDERDCPGV

SEQ ID NO: 1028699 - protein, 100 aa, Homo sapiens
RAGDLEDPLNAYTSSTLILLNALYFSTLYTSQRFILLNALYFSTLYTSQRFILLNALYFSTLYTSQRFILLNALYFLNALYFLNALYFLNALYFSFHFPV

SEQ ID NO: 1028700 - protein, 95 aa, Homo sapiens
CVRVIRGPPQRLYFLNAYHTSQRFILLNALYFSTLYTSQRFILLNALYFLNALYFLNALYFLNALYFLNALYFLNALYFLNALYFPQRFSFHFPV

SEQ ID NO: 1028701 - protein, 171 aa, Homo sapiens
HASTLNALYTQRLTSQRFILLNALYFSTLYTSQRFILLNALYFSTLYTSQRFILLNALYFSTLYTSQRFILLNALYFLNALYFLNALYFLNALYFSTLYTSSTLYTSQRFILPQRFILLNALYFLNALYFLNALYFLNALYFLNALYFLNALYFLNALYFLNALYFIPEMK

SEQ ID NO: 1028702 - protein, 179 aa, Homo sapiens
HASTLNALYTQRLTSQRFILLNALYFSTLYTSQRFILLNALYFSTLYTSQRFILLNALYFSTLYTSQRFILLNALYFLNALYFLNALYFLNALYFSTLYTSSTLYTSQRFILPQRFILLNALYFLNALYFLNALYFLNALYFLNALYFLNALYFLNALYFRIEFKYNIKYACFISRYEV

SEQ ID NO: 1028703 - protein, 143 aa, Homo sapiens
HASTLNALYTQRLTFSTLYTSQRFILLNALYFSTLYTSQRFILLNALYFSTLYTSQRFILLNALYFSTLYTSQRFILPQRFILPQRFILPQRFILLNALYFLNALYFSTLYTSLAPEVHAYLILYLNSIRKYKALRDPLITQL

SEQ ID NO: 1028704 - protein, 131 aa, Homo sapiens
SRFNPQRFIFSTLNFLNALYFSTLYTSQRFILLNALYFSTLYTSQRFILLNALYFSTLYTSQRFILLNALYFSTLYTSSTLYTSSTLYTSSTLYTSQRFILPQRFILLNALYFSTLYTSKIKKNKNVKYKR

SEQ ID NO: 1028705 - protein, 119 aa, Homo sapiens
HASTLNALYTQRLTFSTLYTSQRFILLNALYFSTLYTSQRFILLNALYFSTLYTSQRFILLNALYFSTLYTSQRFILPQRFILPQRFILPQRFILLNALYFIPGNIELRKYKGILYIAA

SEQ ID NO: 1028706 - protein, 123 aa, Homo sapiens
HASTLNALYTQRLTFSTLYTSQRFILLNALYFSTLYTSQRFILLNALYFSTLYTSQRFILLNALYFSTLYTSQRFILPQRFILPQRFILPQRFILLNADTSQRLTSQRLYFAQRFDTMTGNEE

SEQ ID NO: 1028707 - protein, 171 aa, Homo sapiens; identical to SEQ ID NO: 1028701

SEQ ID NO: 1028708 - protein, 136 aa, Homo sapiens
HASTLNALYTQRLTFSTLYTSQRFILLNALYFSTLYTSQRFILLNALYFSTLYTSQRFILLNALYFSTLYTSQRFILPQRFILPQRFILPQRFILLISFPGMKYKALRKYKALRKYKALRKYKALRKYKALRSIKR

SEQ ID NO: 1028709 - protein, 170 aa, Homo sapiens
HASTLNALYTQRLTSQRFILLNALYFSTLYTSQRFILLNALYFSTLYTSQRFILLNALYFSTLYTSQRFILLNALYFLNALYFLNALYFLNALYFSTLYTSSTLYTSQRFILPQRFILLNALYFLNALYFLNALYFLNALYFLNALYFLNALYFLNALYFPQRFSFHFPV

SEQ ID NO: 1028710 - protein, 120 aa, Homo sapiens
HASTLNALYTQRLTFSTLYTSQRFILLNALYFSTLYTSQRFILLNALYFSTLYTSQRFILLNALYFSTLYTSQRFILPQRFILPQRFILPQRFILLNALYFLNALYFSTLYTSFISRYEV

SEQ ID NO: 1028711 - protein, 155 aa, Homo sapiens
HASTLNALYTQRLTFSTLYTSQRFILLNALYFSTLYTSQRFILLNALYFSTLYTSQRFILLNALYFSTLYTSQRFILPQRFILPQRFILPQRFILLTQRFILLNALYFLNALYFLNALYFLNALYFLNALYFLNALYFLNALYFLNALYFIPEMK

SEQ ID NO: 1028712 - protein, 154 aa, Homo sapiens
HASTLNALYTQRLTFSTLYTSQRFILLNALYFSTLYTSQRFILLNALYFSTLYTSQRFILLNALYFSTLYTSQRFILPQRFILPQRFILPQRFILLTQRFILLNALYFLNALYFLNALYFLNALYFLNALYFLNALYFLNALYFPQRFSFHFPV

SEQ ID NO: 1028713 - protein, 125 aa, Homo sapiens
SRFNPQRFIFSTLNFLNALSILLNAYTSQRFILLNALYLLLNALYFSTLYTSQRFILLNALYFSTLYTSQRFILLNALYFSTLYTSQRFILLNALYFLNALYFLNALYFLNALYFSTLYTSYREI

SEQ ID NO: 1028714 - protein, 324 aa, Homo sapiens
FSLLSWPSRPALTLRRAYVNEVVTGPRMTPSHHWELCTSAARRRRKEEDEKVATPSWYLQIQGYHEVYRGLWKPEKSLSCGKGITREAQMWKVNVRKMPSNQNVSPSQRDEVIQWLAKLKYQFNLYPETFALASSLLDRFLATVKAHPKYLSCIAISCFFLAAKMWRKMRDFQYKGMARDSFCGCSSSEILRMERIILDKLNWDLHTATPLDFLHIFHAIAVSTRPQLLFSLPKWSPSQHLAGPYQATTSLYGLQPTSAIQRIHACSAMLVWNWGTHSCWVLLPLTWFERTLVPRSPGGLVPHLLPGFRPNRGYRPQGLACQGS

SEQ ID NO: 1028715 - protein, 85 aa, Homo sapiens
FSLLSWPSRPALTLRRAYVNEVVTGPRMTPSHHWELCTSAARRRRKEEDEKVATPSWYLQIQGYHEVYRGLWKPEKSLSCGKGNH

SEQ ID NO: 1028716 - protein, 227 aa, Homo sapiens
MDSCTKHIDEMTTPQQTNPQTKQERHDANFRKVRGILNRLNSCKKCDKLCLAASINVGVETKLILKGVILLMWTQALEEPKYSITDAQLCLRWNKMHHQPDGPAGEGQTRTEAKHKIPEHHNTKIPKKRNRTTNVDEGKRTSAARRRVSKSRGRRSRATTTQRNGTNIRTENIRENGNKEREKRQERNNRPRSTLVCSLNKTKPIERVRQTKQRENTNSDTLVFLAP

SEQ ID NO: 1028717 - protein, 132 aa, Homo sapiens
RENNVSRVVENGLSCVSFSGQFFNHYRLGSVLPIYRNDMNMKFFVFHIGSMQPTSWRQEPQLCGMGTEQGCWIPVSSDKGSCPQVMERSFHMPSYGTQTLEGGVEKPHSLLSANPLWQQRALDPPHQMELTQ

SEQ ID NO: 1028718 - protein, 132 aa, Homo sapiens; identical to SEQ ID NO: 1028717

SEQ ID NO: 1028719 - protein, 132 aa, Homo sapiens; identical to SEQ ID NO: 1028717

SEQ ID NO: 1028720 - protein, 100 aa, Homo sapiens
  misc_feature (10)..(11): Xaa can be any naturally occurring amino acid
  misc_feature (18)..(18): Xaa can be any naturally occurring amino acid
GRGAAGETVXXWKGLAGXMPPTSWRQEPQLCGMGTEQGCWIPVSSDKGSCPQVMERSFHMPSYGTQTLEGGVEKPHSLLSANPLWQQRALDPPHQMELTQ

SEQ ID NO: 1028721 - protein, 132 aa, Homo sapiens; identical to SEQ ID NO: 1028717

SEQ ID NO: 1028722 - protein, 132 aa, Homo sapiens; identical to SEQ ID NO: 1028717

SEQ ID NO: 1028723 - protein, 120 aa, Homo sapiens
  misc_feature (3)..(3): Xaa can be any naturally occurring amino acid
  misc_feature (5)..(5): Xaa can be any naturally occurring amino acid
  misc_feature (24)..(24): Xaa can be any naturally occurring amino acid
  misc_feature (31)..(31): Xaa can be any naturally occurring amino acid
  misc_feature (45)..(45): Xaa can be any naturally occurring amino acid
  misc_feature (58)..(58): Xaa can be any naturally occurring amino acid
GGXVXSGKGKKREDFGREGIVQRXGGVLVFXGESQEGDWGGVSFXQGRVWTAEDGIVXGFPNSCRISDIRFFTGEMPGQTMAATSFIFMNTFPNNSSLADESQTLKEANLVNAVIVQRLT

SEQ ID NO: 1028724 - protein, 94 aa, Homo sapiens
GEVQLRESEQMTKTKKRPQRARSTVFAIVMHQSQIISEISEAFNMIDQNRDGFIDKEDLHDMLASLGKNSTDEYLDAMMNEAPGPINFTMFLTM

SEQ ID NO: 1028725 - protein, 72 aa, Homo sapiens
NDPHRMDRRLQALMIAGSCLGVSWTDALLLFWTSSMIGYQESAELLDLDPEVDCLKANTNEVLWAVVAAFTK

SEQ ID NO: 1028726 - protein, 104 aa, Homo sapiens
MYLSSSRPIGPIYHPIEVLMLVSVARIQSPPHKPRSQIEPRSQIEPRSQIEPRSQIEPRSQIEPRSQIEPRSQIEPRSQIEPRSQIEPRSQIEPRSQIEPRSQL

SEQ ID NO: 1028727 - protein, 66 aa, Homo sapiens
MLTGSSSRVVRSSRVVRSSRVVRSSRVVRSSRVVRSSRVVRSSRVVRSSRVVRSSRVVRSSRVVSS

SEQ ID NO: 1028728 - protein, 83 aa, Homo sapiens
MPRQRGKSLSLQNLLNLAKLGGVEPRSQIEPRSQIEPRSQIEPRSQIEPRSQIEPRSQIEPRSQIEPRSQIEPRSQIEPRSQL

SEQ ID NO: 1028729 - protein, 85 aa, Homo sapiens
RASYSRVISTIGFRSSMWGQDIPMVEPRSQIEPRSQIEPRSQIEPRSQIEPRSQIEPRSQIEPRSQIEPRSQIEPRSQIEPRSQL

SEQ ID NO: 1028730 - protein, 96 aa, Homo sapiens
DKQYEITKHDVTGPALDAGDTDGEERWAPACNVGNRAANRIPHLVEGPRKAPLVQPRSQIEPRSQIEPRSQIEPRSQIEPRSQIEPRSQIEPRSQL

SEQ ID NO: 1028731 - protein, 91 aa, Homo sapiens
SYYGLTAGQPRFGTSHTHTSGGYDSLLLVSHDSSYLLLIDGPHGHDRSGQPRSQIEPRSQIEPRSQIEPRSQIEPRSQIEPRSQIEPRSQL

SEQ ID NO: 1028732 - protein, 62 aa, Homo sapiens
MIEPRSQIEPRSQIEPRSQIEPRSQIEPRSQIEPRSQIEPRSQIEPRSQIEPRSQIEPRSQL

SEQ ID NO: 1028733 - protein, 101 aa, Homo sapiens
LCLRGYTKTAERNTHTVFYSSYTILHSPQQCTRFPIFPYPLEPRSQIEPRSQIEPRSQIEPRSQIEPRSQIEPRSQIEPRSQIEPRSQIEPRSQIEPRSQL

SEQ ID NO: 1028734 - protein, 87 aa, Homo sapiens
NYAAGRGRSRYIPALLGGRGRRIKKSIEPRSQIEPRSQIEPRSQIEPRSQIEPRSQIEPRSQIEPRSQIEPRSQIEPRSQIEPRSQL

SEQ ID NO: 1028735 - protein, 69 aa, Homo sapiens
DLTTRLARPLTGCSQRRAPAALKLAMRKPRSQIEPRSQIEPRSQIEPRSQIEPRSQIEPRSQIEPRSQL

SEQ ID NO: 1028736 - protein, 51 aa, Homo sapiens
MGGLPGPVHTGLLPAKSAFSAKENTFGVGFKLRRPPAKQQCPRSQRHCSGP

SEQ ID NO: 1028737 - protein, 210 aa, Homo sapiens
EAGTDSHHPHSHLHEFHRTVVRKRAGFRTTIGGLSVLEAPQGLMPSQSACPVLSTAPGTPCDLRKHLLNMVSEEKRSPQLSAKTWRRGLRLQKRRNALFLPEGDICVVGSTSGARALIPETSKLERSGTVIAYCNLELLASSDPPVWASQSTGMTGMSYRSQPQLGFKSTPPAHSSVFHHSVKAPKEDQAQEAASRPLTSQDGWNPNIKK

SEQ ID NO: 1028738 - protein, 98 aa, Homo sapiens
AGGTYYIALHIPDSCCYGNCCQRWRFSRSYLGTVPFEFPQAAGGKLRLRQEREGPTDKVALARGLFCLLVFMRWDIPMLPKLTLNSWAQAVYPPQPPV

SEQ ID NO: 1028739 - protein, 84 aa, Homo sapiens
GERRDDAWRTWGGTLVLLRLCDKSRVHNADMLLSYSSSAHDNQRCSTTSVIAGRTLVTPPRFALHEGRMKYAPRRGMYVAVPRE

SEQ ID NO: 1028740 - protein, 98 aa, Homo sapiens; identical to SEQ ID NO: 1028738

SEQ ID NO: 1028741 - protein, 81 aa, Homo sapiens
KSICSVTMSSFALSIMLARSREVRLGAEVRLGAEVRLGAEVRLGAEVRLGAEVRLGAEVRLGAEVRLGAEVRLGAEVRLLE

SEQ ID NO: 1028742 - protein, 103 aa, Homo sapiens
MSFLCQRTFSETHVIANTTMRRSQNKIVSFAYIPRGVQQGPIQKCAWVQKCAWVQKCAWVQKCAWVQKCAWVQKCAWVQKCAWVQKCAWVQKVRLGAEVRLVE

SEQ ID NO: 1028743 - protein, 78 aa, Homo sapiens
TGPVVHGCALYIAEACVQKCAWVQKCAWVQKCAWVQKCAWVQKCAWVQKCAWVQKCAWVQKCAWVQKVRLGAEVRLVE

SEQ ID NO: 1028744 - protein, 107 aa, Homo sapiens
GALLERPKLSNAMARTLHRHIMMERERKRQEEEEVDKMMEQKRAWVEKCAWVQKCAWVQKCAWVQKCAWVQKCAWVQKCAWVQKCAWVQKCAWVQKVRLGAEVRLVE

SEQ ID NO: 1028745 - protein, 67 aa, Homo sapiens
MGEATPKKCAWVQKCAWVQKCAWVQKCAWVQKCAWVQKCAWVQKCAWVQKCAWVQKVRLGAEVRLVE

SEQ ID NO: 1028746 - protein, 89 aa, Homo sapiens
  misc_feature (1)..(1): Xaa can be any naturally occurring amino acid
XNNNQEPVSGGGSIIHDGLTQMTIWPWGALCHLKEFYYYPPLRMPIIPFLLWALTPAEAQPLNPVAFWGRSGAHSSPAPGIKPACPSRK

SEQ ID NO: 1028747 - protein, 271 aa, Homo sapiens
MAQFAFESDLHSLLQSGCTHPQCTPCCAGMRKAKEAAGPAPVTPCGAGKLSPTRLPARDSVGLNSVAKSSSKGSDHFLANLAVTAYIPHRSAAQMEVASFLLSKENQPENSQTPTKKEHQKAWALNLNGFDVEEAKILRLSGKPQNAPEGYQNRLKVLYSQKATPGSSRKTCRYIPSLPDRILDAPEIRNDYYLNLVDWSSGNVLAVAWTTVCTCGVQLLVTSCSFAMEPLGNIYPLWLDQRGTTWFGPSVLVQFGFRANGSITDSADAPS

SEQ ID NO: 1028748 - protein, 186 aa, Homo sapiens
MAQFAFESDLHSLLQSGCTHPQCTPCCAGMRKAKEAAGPAPVTPCGAGKLSPTRLPARDSVGLNSVAKSSSKGSDHFLANLAVTAYIPHRSAAQMEVASFLLSKENQPENSQTPTKKEHQKAWALNLNGFDVEEAKILRLSGKPTKCARGLSEQTESTLQPKGHSWLQPEDLPLHSFPARPYPGCA

SEQ ID NO: 1028749 - protein, 90 aa, Homo sapiens
SAAVEQVNGNLNRRVRLSLELQQISRFPTPQIGNFEHESYNSIILLVQLQRRYLPGPRPGPVNSRIAVNSCIPTLRRPHVLATCGPLTPI

SEQ ID NO: 1028750 - protein, 105 aa, Homo sapiens
MAVPGLRYFQLSNLTVELNHNNSSIPRPFTITTKIPNITLRLTISNPFVFNMAYIFIALAPSKMAPSVIIFPTQSPIFTTSLCPIFPPLHPTPTSTRTRQFKNCR

SEQ ID NO: 1028751 - protein, 76 aa, Homo sapiens
HEADTGDTELKMSEHGLSQACMHGIRLATSCQAAGMVLLQLECTMETRWDSSSCVLMENPGDSWCKFRTEGSVCWD

SEQ ID NO: 1028752 - protein, 285 aa, Homo sapiens
MFLGHSRRCKFSEPTMTAAGGPPEPRFVTAERAVQVLRENWWPAAAPLVPIVVQGEAPAPPRPGARSVSACLAPADAWELRPRALRSSPGPAARAANPCPAMSRRKPASGGLAASSSAPARQAVLSRFFQSTGSLKSTSSSTGAADQVDPGAAAAAAAAAAAAPPAPPAPAFPPQLPPHVATEIEQKKEETMWKNDGPGENRQVKKVQQKGQEEVIMGNVVDSSEPTEMSEDQECFKVSGQMERILLQILPFLKVESRQNLCRRDLQFCQNVLILMISVFYTQQN

SEQ ID NO: 1028753 - protein, 103 aa, Homo sapiens
NSRMYLLNPGQTPKKKTLRVTNFPGFEFLVSANWDQTAGCHHQFEQHGALNHLQLKNELKGSFPPWMNRERKNTLSSHHLLLPSAKGKTSLTFTQATRLLSGS

SEQ ID NO: 1028754 - protein, 103 aa, Homo sapiens; identical to SEQ ID NO: 1028753

SEQ ID NO: 1028755 - protein, 106 aa, Homo sapiens
LTRLSARIGLSVGAGVKTLHFEEVDVITALGIILKALLVFLQAGKVELDEELGAAGLSSQWPRCSQTHVEAWSEVFESPFLEMTLGRYLHPRNVPTDGANGQPGAR

SEQ ID NO: 1028756 - protein, 62 aa, Homo sapiens
EPARLLDLLAYLDLLAYLDLLAYLDLLAYLDLLAYLDLLAYLDLLAYLDLLAYLDLLAYLTF

SEQ ID NO: 1028757 - protein, 315 aa, Homo sapiens
MRRLSQAVEGWAWGSQGLWAEVGRGAPKWACAPPSTQSLQAPPRVSTASMAHGSPTGRIEGFSNVKGSCMARSPRPSDLPTAEVMFCTPERPTKWTVDKAPGGPDRAGGLHLRPREGGSAQEGGRCSTSEDALRASPSQEHRGWHTPFIKRIKEGSVIDHIQLISVGDMIEAINGQSLLGCRHYEVARMLKELPEVVLQADSQGARRLRMIRQCKGGGRPGSGPQMGTGRVPWGTPIRGPARVGGFASAFEEKPLKAVYLREYLVQGHDWGTRGLEDKDLYGELKRGELPPKSIRMGPRTRGKEPTENALGPEMA

SEQ ID NO: 1028758 - protein, 314 aa, Homo sapiens
  misc_feature (36)..(36): Xaa can be any naturally occurring amino acid
  misc_feature (41)..(41): Xaa can be any naturally occurring amino acid
  misc_feature (59)..(59): Xaa can be any naturally occurring amino acid
MRRLSQAVEGWAWGSQGLWAEVGRGAPKWACAPPGXEGVGXGGGVAGGGVGGGSRGGGXGGLEEGEGVYGKIAEAFRLPTAEVMFCTPERPTKWTVDKAPGGPDRAGGLHLRPREGGSAQEGGRCSTSEDALRASPSQEHRGWHTPFIKRIKEGSVIDHIQLISVGDMIEAINGQSLLGCRHYEVARMLKELPEVVLQADSQGARRLRMIRQCKGGGRPGSGPQMGTGRVPWGTPIRGPARVGGFASAFEEKPLKAVYLREYLVQGHDWGTRGLEDKDLYGELKRGELPPKSIRMGPRTRGKEPTENALGPEMA

SEQ ID NO: 1028759 - protein, 230 aa, Homo sapiens
MFCTPERPTKWTVDKLLGGQIGLEDFIFAHVKGAAHRRWTVFNVGGCTSGITITGAPGLATPFIKRIKEGSVIDHIQLISVGDMIEAINGQSLLGCRHYEVARMLKELPEVVLQADSQGARRLRMIRQCKGGGRPGSGPQMGTGRVPWGTPIRGPARVGGFASAFEEKPLKAVYLREYLVQGHDWGTRGLEDKDLYGELKRGELPPKSIRMGPRTRGKEPTENALGPEMA

SEQ ID NO: 1028760 - protein, 377 aa, Homo sapiens
EDPCNTSLPWTRKVNELRAFVKMCKQDPSVLHTEEMRFLREWVESMGGKVPPATQKAKSEENTKEEKPDSKKVEEDLKADEPSSEESDLEIDKEGVIEPDTDAPQEMGDENAEITEEMMDQANDKKVAAIEALNDGELQKAIDLFTDAIKLNPRLAILYAKRASVFVKLQKPNAAIRDCDRAIEINPDSAQPYKWRGKAHRLLGHWEEAAHDLALACKLDYDEDASAMLKEVQPRAQKIAEHRRKYERKREEREIKERIERVKKAREEHERAQREEEARRQSGAQYGSFPGGFPGGMPGNFPGGMPGMGGGMPGMAGMPGLNEILSDPEVLAAMQDPEVMVAFQDVAQNPANMSKYQSNPKVMNLISKLSAKFGGQA

SEQ ID NO: 1028761 - protein, 377 aa, Homo sapiens; identical to SEQ ID NO: 1028760

SEQ ID NO: 1028762 - protein, 377 aa, Homo sapiens; identical to SEQ ID NO: 1028760

SEQ ID NO: 1028763 - protein, 178 aa, Homo sapiens
MPFPTPIILPSFFFCLQERGLIGLQFHVLGNPHIMADGKEEQVTSYMDGSSKEREIKERIERVKKAREEHERAQREEEARRQSGAQYGSFPGGFPGGMPGNFPGGMPGMGGGMPGMAGMPGLNEILSDPEVLAAMQDPEVMVAFQDVAQNPANMSKYQSNPKVMNLISKLSAKFGGQA

SEQ ID NO: 1028764 - protein, 147 aa, Homo sapiens
HAFSHPNYPPEFFFLFTRKRFNWTSVPRAGEPSHHARWQGGASHILHGCQQAKRESLEQGNSSFLKPSDLMRLISLSQEQYRKDLPPSFNDLPPVPPTHTEIQDEIRMGTQPNHIILPWPLPNLMISHFKTNHAFLTVPQSLNSFQH

SEQ ID NO: 1028765 - protein, 377 aa, Homo sapiens; identical to SEQ ID NO: 1028760

SEQ ID NO: 1028766 - protein, 81 aa, Homo sapiens
MVKDAGAEVGVWSAERLVAGKLKKDTLHPETLCIQRHFASRDTLHPETLCIQRHFASRDTLHPETLCIQRHFASRESSRSL

SEQ ID NO: 1028767 - protein, 46 aa, Homo sapiens
MPCASTSPPGLVNSIPAETSSTSPRLAENECEAYYTIANRGYRQPV

SEQ ID NO: 1028768 - protein, 111 aa, Homo sapiens
GPHAHFVPHAQFGPHAQFGPHAQFGPHAQFGPHAQFGPHAQFGPHAQFGPHAQFGPHAQFGRHAQLGRHAQRGRHAQFGPHAQFGPHAQFGPHAQFMAVRQQPECFTALEP

SEQ ID NO: 1028769 - protein, 127 aa, Homo sapiens
LSSQNDSCGGFSCFSFYLPSSSSSFPTISHSCNVASTPLWLCPGHFVPSTDPQLQTHITNFLVTAPAPITPDLGLEGRTEAQGVLSCSPLCPPRRVPSPNESRCFPRRQEKVPTPRAAEGCEEGRDE

SEQ ID NO: 1028770 - protein, 71 aa, Homo sapiens
GPYFSSSRYSSGYHRAVTTAPVTTAPVTTAPVTTAPVTTAPVTTAPVTTAPVTTAPVTTAPVTTAASYNSY

SEQ ID NO: 1028771 - protein, 82 aa, Homo sapiens
GPYFSSSRYSSGYHRAVTTAPVTTAPVTTAPVTTAPVTTAPVTTAPVTTAPVTTAPVTTAPVTTARPLCITTRQLIFGQWDA

SEQ ID NO: 1028772 - protein, 88 aa, Homo sapiens
GPYFSSSRYSSGYHRAVTTAPVTTAPVTTAPVTTAPVTTAPVTTAPVTTAPVTTAPVTTAPVTTALASASFISDAFRFISLHECLTVY

SEQ ID NO: 1028773 - protein, 97 aa, Homo sapiens
GPYFSSSRYSSGYHRQLQQLQLQQLQLQQLQLQQLQLQQLQLQQLQLQQLQLQQLQLQQLQLQQLQLQQLQLQQLQLQQLAVTTAVDNRSCSDKKRK

SEQ ID NO: 1028774 - protein, 68 aa, Homo sapiens
GPYFSSSRYSSGYHRAVTTAPVTTAPVTTAPVTTAPVTTAPVTTAPVTTAPVTTAPVTTAPVTTAPIR

SEQ ID NO: 1028775 - protein, 68 aa, Homo sapiens
  misc_feature (30)..(30): Xaa can be any naturally occurring amino acid
FKERNPEDSHFSRISCFLGKILIGLDALKXCAESLSSMDKRPKIMEEKSPSLLQCPKRLSSFPYGEVK

SEQ ID NO: 1028776 - protein, 136 aa, Homo sapiens
MASAGQDKSQSRERAGLMPRKSQASAEAEAVSEHVQGRAGARDRTEPGHSQDRVGQGNSMAGSVLGQGRAGQGDGSGRAGTGQCRAMSCRARTPPSRTSKDPLDKPGQRPGPGSGQVCARPAADEGLAKTRVKTYS

SEQ ID NO: 1028777 - protein, 181 aa, Homo sapiens
GQALKPGQALKPGQALKPGQALKPGQALKPGQALKPGQALKPGQALKPGQALKPGQALKPGQALKPGQALKPGQALKPGQALKPGQALKPGQALKPAQALKAAPGFIVFFVVSISFSPALILVISCLLLAFEFVCSCFSRSFNCDVRVLILDLSCFLLWAFSAINFPLHTALILKWSFAHL

SEQ ID NO: 1028778 - protein, 135 aa, Homo sapiens
GQALKPGQALKPGQALKPGQALKPGQALKPGQALKPGQALKPGQALKPGQALKPGQALKPGQALKPGQALKPGQALKPGQALKPGQALKPGQALKPGAACFWLYCMKALKPGKAKLLNQVAVNLPHISHAHTREQ

SEQ ID NO: 1028779 - protein, 136 aa, Homo sapiens
GQALKPGQALKPGQALKPGQALKPGQALKPGQALKPGQALKPGQALKPGQALKPGQALKPGQALKPGQALKPGQALKPGQALKPGQALKPGQASITLEAVMQESTACTLMLPSLDASSSFDEVSAFLASWLLSRLQ

SEQ ID NO: 1028780 - protein, 119 aa, Homo sapiens
GQALKPGQALKPGQALKPGQALKPGQALKPGQALKPGQALKPGQALKPGQALKPGQALKPGQALKPGQALKPGQALKPGQALKPGQALKPGQAPAAPGRSSSLAPVPILRGSQLANFLR

SEQ ID NO: 1028781 - protein, 153 aa, Homo sapiens
GQALKPGQALKPGQALKPGQALKPGQALKPGQALKPGQALKPGQALKPGQALKPGQALKPGQALKPGQALKPGQALKPGQALKPGQALKPGQALKPGQALKPGQALKPGQALKPGQALKPGQALKPPFFKDQSQVLFVISRKESINLLQMQAS

SEQ ID NO: 1028782 - protein, 97 aa, Homo sapiens
GQALKPGQALKPGQALKPGQALKPGQALKPGQALKPGQALKPGQALKPGQALKPGQALKPGQALKPGQALKPGQALKPGQALKPGQALKPGQALKPG

SEQ ID NO: 1028783 - protein, 97 aa, Homo sapiens; identical to SEQ ID NO: 1028782

SEQ ID NO: 1028784 - protein, 146 aa, Homo sapiens
GQALKPGQALKPGQALKPGQALKPGQALKPGQALKPGQALKPGQALKPGQALKPGQALKPGQALKPGQALKPGQALKPGQALKPGQALKPGQALKPGQALKPGQALKPGQALKPGQALKPGQALKPLPASTPCPHCIVAAAGITLE

SEQ ID NO: 1028785 - protein, 126 aa, Homo sapiens
GQALKPGQALKPGQALKPGQALKPGQALKPGQALKPGQALKPGQALKPGQALKPGQALKPGQALKPGQALKPGQALKPGQALKPGQALKPGQAEMGRGQQELHLYPEHSPSFDEGITSGWWVCRTS

SEQ ID NO: 1028786 - protein, 95 aa, Homo sapiens
GQALKPGQALKPGQALKPGQALKPGQALKPGQALKPGQALKPGQALKPGQALKPGQALKPGQALKPGQALKPGQALKPGQALKPGQALKPGQASC

SEQ ID NO: 1028787 - protein, 113 aa, Homo sapiens
GQALKPGQALKPGQALKPGQALKPGQALKPGQALKPGQALKPGQALKPGQALKPGQALKPGQALKPGQALKPGQALKPGQALKPGQALKPGQAAKQVGPGYIGWEPAWDTGAQ

SEQ ID NO: 1028788 - protein, 97 aa, Homo sapiens; identical to SEQ ID NO: 1028782

SEQ ID NO: 1028789 - protein, 97 aa, Homo sapiens; identical to SEQ ID NO: 1028782

SEQ ID NO: 1028790 - protein, 100 aa, Homo sapiens
GQALKPGQALKPGQALKPGQALKPGQALKPGQALKPGQALKPGQALKPGQALKPGQALKPGQALKPGQALKPGQALKPGQALKPGQALKPGQADLQSTLG

SEQ ID NO: 1028791 - protein, 97 aa, Homo sapiens; identical to SEQ ID NO: 1028782

SEQ ID NO: 1028792 - protein, 172 aa, Homo sapiens
ADPLGSTLSLGSTLFSRLYLVSRLYLVSRLYLVSRLYLVSRLYLVSRLYLVSRLYLVSRLYLVSRLYLVSRLYLVSRLYLVSRLYLVSRLYLVSRLYLVSRLYLVSRLYLVSRLYLVSRLYLVSRLYLVSRLYLVSRLYLVCVKSSRLPASHDNTEISLLPILRPKCGLIIL

SEQ ID NO: 1028793 - protein, 144 aa, Homo sapiens
RTPRLYLVSRLYLVLSALPCLSALPCLSALPCLSALPCLSALPCLSALPCLLYLVSRLYLVSRLYLVSRLYLVSRLYLVSRLYLVSRLYLVSRLYLVSRLYLVSRLYLVSRLYLVSRLYLVSHPSTNQARPCLASETDEIGRNK

SEQ ID NO: 1028794 - protein, 128 aa, Homo sapiens
ADPLGSTLSLGSTLFSRLYLVSRLYLVSRLYLVSRLYLVSRLYLVSRLYLVSRLYLVSRLYLVSRLYLVSRLYLVSRLYLVSRLYLVSRLYLVSRLYLVSRLYLVSLFLPSLYHSLLTSTPSCHRYLY

SEQ ID NO: 1028795 - protein, 123 aa, Homo sapiens
RTPRLYLVSRLYLVLSALPCLSALPCLSALPCLSALPCLSALPCLSALPCLLYLVSRLYLVSRLYLVSRLYLVSRLYLVSRLYLVSAGFEVLGSLCGICRRMKFGAGASFWCGGGSGGGRRAK

SEQ ID NO: 1028796 - protein, 152 aa, Homo sapiens
RTPRLYLVSRLYLVLSALPCLSALPCLSALPCLSALPCLSALPCLSALPCLLYLVSRLYLVSRLYLVSRLYLVSRLYLVSRLYLVSRLYLVSRLYLVSRLYLVSRLYLVSRLYLVSRLYLVCVKSSRLPASHDNTEISLLPILRPKCGLIIL

SEQ ID NO: 1028797 - protein, 148 aa, Homo sapiens
RTPRLYLVSRLYLVLSALPCLSALPCLSALPCLSALPCLSALPCLSALPCLLYLVSRLYLVSRLYLVSRLYLVSRLYLVSRLYLVSRLYLVSRLYLVSRLYLVSRLYLVSRLYLVSRLYLVSRLYLVSRLYLVSRLYLVSRLYLVSRL

SEQ ID NO: 1028798 - protein, 104 aa, Homo sapiens
RTPRLYLVSRLYLVLSALPCLSALPCLSALPCLSALPCLSALPCLSALPCLLYLVSRLYLVSRLYLVSRLYLVSRLYLVSRLYLVSLMTLTLFSPDLLGDPYKV

SEQ ID NO: 1028799 - protein, 138 aa, Homo sapiens
  misc_feature (137)..(137): Xaa can be any naturally occurring amino acid
RTPRLYLVSRLYLVSRLYLVSRLYLVSRLYLVSRLYLVSRLYLVSRLYLVSRLYLVSRLYLVSRLYLVSRLYLVSRLYLVSRLYLVSRLYLVSRLYLVSRLYLVSNILSCMGIVLMPVIPALREAEVGGSVSPEAEXQ

SEQ ID NO: 1028800 - protein, 118 aa, Homo sapiens
ADPLGSTLSLGSTLFSRLYLVSRLYLVSRLYLVSRLYLVSRLYLVSRLYLVSRLYLVSRLYLVSRLYLVSRLYLVSRLYLVSRLYLVSRLYLVSRLYLVSRLYLVSSHACRQDRAETR

SEQ ID NO: 1028801 - protein, 129 aa, Homo sapiens
ADPLGSTLSLGSTLFSRLYLVSRLYLVSRLYLVSRLYLVSRLYLVSRLYLVSRLYLVSRLYLVSRLYLVSRLYLVSRLYLVSRLYLVSRLYLVSRLYLVSRLYLVSRLYLVSSHACRQDRAEKGRAEAR

SEQ ID NO: 1028802 - protein, 166 aa, Homo sapiens
RTPRLYLVSRLYLVLSALPCLSALPCLSALPCLSALPCLSALPCLSALPCLLYLVSRLYLVSRLYLVSRLYLVSRLYLVSRLYLVSRLYLVSRLYLVSRLYLVSRLYLVSRLYLVSRLYLVSRLYLVSRLYLVSRLYLVSRLYLVSSHACRQDRAEKGRAEARKSR

SEQ ID NO: 1028803 - protein, 111 aa, Homo sapiens
RTPRLYLVSRLYLVLSALPCLSALPCLSALPCLSALPCLSALPCLSALPCLLYLVSRLYLVSRLYLVSRLYLVSRLYLVSRLYLVSLKLVAYLTVKYPVVKSRLCAKLVTY

SEQ ID NO: 1028804 - protein, 73 aa, Homo sapiens
GICGSLFETATLRSGYLLPDTKAYGDRIERMLRLSLNIDPDAKVEEEPEEEPEFDSRGHLLEDTRSIRRWRKE

SEQ ID NO: 1028805 - protein, 64 aa, Homo sapiens
SSDRSLRPSADTKAYGDRIERMLRLSLNIDPDAKVEEEPEEEPEFDSRGHLLEDTRSIRRWRKE

SEQ ID NO: 1028806 - protein, 134 aa, Homo sapiens
MASMGTLAFDEYGRPFLIIKDQDRKSRLMGLEALKSHIMAAKAVANTMRTSLGPNGLDKMMVDKDGDVTVTNDGATILSMMDVDHQIAKLMVELSKSQDDEFGDGTTGVGCPGVVMPTPPFWGGPAPLTRPPPS

SEQ ID NO: 1028807 - protein, 170 aa, Homo sapiens
MASMGTLAFDEYGRPFLIIKDQDRKSRLMGLEALKSHIMAAKAVANTMRTSLGPNGLDKMMVDKDGDVTVTNDGATILSMMDVDHQIAKLMVELSKSQDDEFGDGTTGVGCPGMVACVQKNRSNLLDRGIHPIKNKPMGYEARLLRVPMEHLDKDSAIAALVDIKGHRNP

SEQ ID NO: 1028808 - protein, 222 aa, Homo sapiens
  misc_feature (5)..(5): Xaa can be any naturally occurring amino acid
  misc_feature (99)..(99): Xaa can be any naturally occurring amino acid
  misc_feature (126)..(126): Xaa can be any naturally occurring amino acid
  misc_feature (132)..(132): Xaa can be any naturally occurring amino acid
  misc_feature (142)..(147): Xaa can be any naturally occurring amino acid
  misc_feature (150)..(150): Xaa can be any naturally occurring amino acid
  misc_feature (168)..(168): Xaa can be any naturally occurring amino acid
  misc_feature (171)..(171): Xaa can be any naturally occurring amino acid
  misc_feature (173)..(173): Xaa can be any naturally occurring amino acid
  misc_feature (175)..(175): Xaa can be any naturally occurring amino acid
  misc_feature (188)..(188): Xaa can be any naturally occurring amino acid
  misc_feature (196)..(197): Xaa can be any naturally occurring amino acid
  misc_feature (202)..(202): Xaa can be any naturally occurring amino acid
  misc_feature (222)..(222): Xaa can be any naturally occurring amino acid
SAVRXLGLRSRLGQPLTGRRAGLCEQARSCRFYSGSATLSKVEGTDVTGIEEVVIPKKKTWDKVAVLQALASTVNRDTTAVPYVFQDDPYLMPASSLEXRSFFTGKEIRENVAKFIINSYPKYFEXDISYPXIPCLMPEYFXXXXXXISXAALKERIELRKVKASVDXFFXLXQXGTTVSLETTNSLXDFLFYYGXXEPSTXYHFQQTGQSEALEEENDETX

SEQ ID NO: 1028809 - protein, 99 aa, Homo sapiens
PRGTGSGALPSGQKLEELKAEEPDNFSSKVVQRGREFFDSNGNFLYRFESGLGLWRCLVKHSWASITVHGTAWISGYGLATLEYEEVLSLDCVRKELCG

SEQ ID NO: 1028810 - protein, 397 aa, Homo sapiens
MVGQPQPRDDVWVSAARVIVGTIRPRVIVGTIRPRVNRSGLRVARPGTHERVTSLYTQIGWAEDVSLSSLDVIFGSAHGPWVIFGLCLLAPGDSVVISVARGGRSCLRDRWTPVVVPVAPSCSRDTPGAGDRRVSTAPRVADADPASVPSHVAALQGLQAWMNILAPVRRDRVLAGAAPVPEEGGRFARAQKTSTPASPAACQGATRTGTLWGFYGSPRVIVVGGPCRVREDLPQLVGSAKDTFGLGINNGHPFVTWTFDDGTDLRVLGIPLQFAALRIPLGQEQVTLHFINPIYRGAQAIIIGLHLNDVASLEHTKQCLSGCPERRMTPSRCASPPCRFHDGSEYPFSVCADEKDALPGGPEEIKAENGGGSISSRGKGRNSPRGERGTWPMAAGE

SEQ ID NO: 1028811 - protein, 61 aa, Homo sapiens
VRVSSHSDTAGVVFRAQAMELHEGCARGCVPFYGDSGLVANAISSPTLSLPNAISSNAISS

SEQ ID NO: 1028812 - protein, 247 aa, Homo sapiens
GRRCGRRFDSRAGGAQQPQSSRCHCSLYSRRHCRCPIPSPGACAAAPTPLGPCTRSAPACPKTCCRHQRAGGSRSRRPRGEKDGGHDGETLGPVPASQERPKEELGAAEGGRGLRSPPTPGKGADGPWRQNLGQGDRAYRRWNRTVAELVQFLLVKDKKKSPINAREMVKYVIGDLKILFPDIIAGAAEHLGYVFGFELKQFDRKHHTYILINKVKPLEEEEEEEDLEEMAQIGSVNDDPGPYLYER

SEQ ID NO: 1028813 - protein, 73 aa, Homo sapiens
PYRHSLSSALAIIGTLALEVHAYLILYLNSIRVPMNSEVPMNSEVPMNSEVPMNSEVPMNSEVPMNSEVPINS

SEQ ID NO: 1028814 - protein, 39 aa, Homo sapiens
MNSEVPMNSEVPMNSEVPMNSEVPMNSEVPMNSEVPINS

SEQ ID NO: 1028815 - protein, 83 aa, Homo sapiens
SLFIGTVDRIASIHRHFAYSSAPVLNSSIILSMHGPLELMVPMNSEVPMNSEVPMNSEVPMNSEVPMNSEVPMNSSLFIGTQA

SEQ ID NO: 1028816 - protein, 58 aa, Homo sapiens
MNSEVPMNSEVPMNSEVPMNSEVPMNSEVPMNSSLFIGTQPDQKSRIPDLSFQMVPDE

SEQ ID NO: 1028817 - protein, 80 aa, Homo sapiens
VIADSRGYTYSSGPTRVFLAAIAVKTQWCRPAPMNSEVPMNSEVPMNSEVPMNSEVPMNSEVPMNSEVPMNSSLFIGTQA

SEQ ID NO: 1028818 - protein, 70 aa, Homo sapiens
RYSSAPRYSSAPGKKMALIYDDVPSYHADGYQEKVSSVWVPMNSEVPMNSEVPMNSEVPMNSSLFIGTQA

SEQ ID NO: 1028819 - protein, 78 aa, Homo sapiens
RPPEAGARSKRTTIPDRGGRSSVKGADDSEVPMNSEVPMNSEVPMNSEVPMNSSLFIGPKPDQKSRIPDLSFQMVPDE

SEQ ID NO: 1028820 - protein, 75 aa, Homo sapiens
YSSAPPPECYSPPGSSARRIPVPMNSEVPMNSEVPMNSEVPMNSEVPMNSSLFIGTQPDQKSRIPDLSFQMVPDE

SEQ ID NO: 1028821 - protein, 91 aa, Homo sapiens
ESVPSLFIGTTTNTTTYQHHHQHTNTCTPTSTPTPAHQHPHRVPMNSELFIGTLSMSSYSVVSTGSLQCEDLADDTVADESEVPMNSERCR

SEQ ID NO: 1028822 - protein, 64 aa, Homo sapiens
MLTSGCLTNNSVYDLDVGSGHTEVPMNSEVPMNSEVPMNSEVPMNSEVPMNSEVPMNSEVPINS

SEQ ID NO: 1028823 - protein, 61 aa, Homo sapiens
MVPMNSEVPMNSEVPMNSEVPMNSEVPMNSEVPMNSSLFIGTQPDQKSRIPDLSFQMVPDE

SEQ ID NO: 1028824 - protein, 75 aa, Homo sapiens
PYRHSLSSALAIIGTLALEVHAYLILYLNSIRVPMNSEVPMNSEVPMNSEVPMNSEVPMNSEVPMNSSLFIGTQA

SEQ ID NO: 1028825 - protein, 82 aa, Homo sapiens
AIHRHRHKLHVDSIPVLISLFKVPMNSEVPMNSEVPMNSEVPMNSEVPMNSEVPMNSSLFIGTQPDQKSRIPDLSFQMVPDE

SEQ ID NO: 1028826 - protein, 83 aa, Homo sapiens
SLFIGTSLFIGTSLFIGTLCRLGMLARRSSIKLLVGVEFEVPMNSEVPMNSEVPMNSEVPMNSEVPMNSEVPMNSSLFIGTQA

SEQ ID NO: 1028827 - protein, 52 aa, Homo sapiens
MNSEVPMNSEVPMNSEVPMNSEVPMNSSLFIGTQPDQKSRIPDLSFQMVPDE

SEQ ID NO: 1028828 - protein, 158 aa, Homo sapiens
DGLASTGRSLCETQLVLYADVEELKRSVGELPSTGESLQKVQEQVHTLFSQDQAQGARLTAQDFLDRLSSLDNLKASVSQVEADLKMLRTAVDSLDAYSVKIETNENNLESAKGLLDDLTNDLDRLLVKVVKIHEKGSKNCVCQAPIAQFLLPIKGQL

SEQ ID NO: 1028829 - protein, 147 aa, Homo sapiens
DGLASTGRSLCETQLVLYADVEELKRSVGELPSTGESLQKVQEQVHTLFSQDQAQGARLTAQDFLDRLSSLDNLKASVSQVEADLKMLRTAVDSLDAYSVKIETNENNLESAKGLLDDLTNDLDRLLVKVVKIHEKGSKNCVCRARN

SEQ ID NO: 1028830 - protein, 212 aa, Homo sapiens
RDDYEKSKARVQPLRRRIPPPLFLYTAAYPAGTTAVGTPGNGTPCSQDTSFSSSRQGTPSSFGQFTPQSSQGTPYTSRGSTPYSQDSAYSSSTTSTSFKPRRSENSYQDAFSRRHFSASSASTTASTAIAATTAAIALRLPGVQWLPGLQWLPGVQWLAGVQWLAGVQWLAGVQWLAGVQWLAGVQWLECSGMIMAHCSLDHPGSSSSTSAS

SEQ ID NO: 1028831 - protein, 204 aa, Homo sapiens
RDDYEKSKARVQPLRRRIPPPLFLYTAAYPAGTTAVGTPGNGTPCSQDTSFSSSRQGTPSSFGQFTPQSSQGTPYTSRGSTPYSQDSAYSSSTTSTSFKPRRSENSYQDAFSRRHFSASSASTTASTAIAATTAAIALRLPGVQWLPGLQWLPGVQWLAGVMLCCQAGVQWQDLGSLQSSRFKLFSCLNLPSSSDYRARATTPG

SEQ ID NO: 1028832 - protein, 208 aa, Homo sapiens
RDDYEKSKARVQPLRRRIPPPLFLYTAAYPAGTTAVGTPGNGTPCSQDTSFSSSRQGTPSSFGQFTPQSSQGTPYTSRGSTPYSQDSAYSSSTTSTSFKPRRSENSYQDAFSRRHFSASSASTTASTAIAATTAAIAPPAAGSAMAARIAMAARSAMAGRSAMAGRSAMAGRSAMAGRSAMAGRSAMAGRSAMAGLGLGLESFVIFIF

SEQ ID NO: 1028833 - protein, 219 aa, Homo sapiens
RDDYEKSKARVQPLRRRIPPPLFLYTAAYPAGTTAVGTPGNGTPCSQDTSFSSSRQGTPSSFGQFTPQSSQGTPYTSRGSTPYSQDSAYSSSTTSTSFKPRRSENSYQDAFSRRHFSASSASTTASTAIAATTAAIALRLPECNGCPDCNGCPECNGWPECNGWPECNGWPECNGWPECNGWPECNGWPERNGWPECNGWPECNGWPECNGWPECNGSI

SEQ ID NO: 1028834 - protein, 104 aa, Homo sapiens
MPFPAATSLHLQPPQPPPRPSPPPLQPLRLRLPGVQWLPGLQWLPGVQWLAGVQWLAGVQWLAGVQWLAGVQWLAGVQWLECSGMIMAHCSLDHPGSSSSTSAS

SEQ ID NO: 1028835 - protein, 233 aa, Homo sapiens
RDDYEKSKARVQPLRRRIPPPLFLYTAAYPAGTTAVGTPGNGTPCSQDTSFSSSRQGTPSSFGQFTPQSSQGTPYTSRGSTPYSQDSAYSSSTTSTSFKPRRSENSYQDAFSRRHFSASSASTTASTAIAATTAAIAPPAAGSAMAARIAMAARSAMAGRSAMAGRSAMAGRSAMAGRSAMAGRSAMAGVMLCCQAGVQWQDLGSLQSSRFKLFSCLNLPSSSDYRARATTPG

SEQ ID NO: 1028836 - protein, 191 aa, Homo sapiens
RDDYEKSKARVQPLRRRIPPPLFLYTAAYPAGTTAVGTPGNGTPCSQDTSFSSSRQGTPSSFGQFTPQSSQGTPYTSRGSTPYSQDSAYSSSTTSTSFKPRRSENSYQDAFSRRHFSASSASTTASTAIAATTAAIAPPAAGSAMAARIAMAARSAMAGRSAMAGRSAMAGRSAMAGRSAMAGRSAMAGRY

SEQ ID NO: 1028837 - protein, 452 aa, Homo sapiens
MFATSGAVAAGKPYSCSECGKSFCYSSVLLRHERAHGGDGRFRCLECGERCARAADLRAHRRTHAGQTLYICSECGQSFRHSGRLDLHLGAHRQRCRTCPCRTCGRRFPHLPALLLHRRRQHLPERPRRCPLCARTFRQSALLFHQARAHPLGTTSDPAAPPHRCAQCPRAFRSGAGLRSHARIHVSRSPTRPRVSDAHQCGVCGKCFGKSSTLTRHLQTHSGEKPFKCPECGKGFLESATLVRHQRTHTGEKPYACGDCGRCFSESSTLLRHRRSHQGERPHACATCGKGFGQRSDLVVHQRIHTGEKPFACPECGRRFSDRSDLTKHRRTHTGEKPYRCELCGKRFTCVSNLNVHRRNHAGHKPHKCPECSKAFSVASKLALHRKTHLGERPAECAECGKCFSHSRSLSQHQRAHTRARTAAAVAIQSAVGTALVFEGPAEQEKPGFSVS

SEQ ID NO: 1028838 - protein, 143 aa, Homo sapiens
ARYQPCGFLTLGSLLTLFLRNVGMEVGGKAHFHEGCLHARSCLHPGRGGLLPFQFLLAALHVASCLASTPTTLSALLPCCPRITRILSSGVGAGSQGTLRLPCVHKARHCQVEHEVISKSWEPPAGRGQDGKSPGAGQLFAHG

SEQ ID NO: 1028839 - protein, 452 aa, Homo sapiens; identical to SEQ ID NO: 1028837

SEQ ID NO: 1028840 - protein, 452 aa, Homo sapiens; identical to SEQ ID NO: 1028837

SEQ ID NO: 1028841 - protein, 299 aa, Homo sapiens
MRLLLPTPPHRCAQCPRAFRSGAGLRSHARIHVSRSPTRPRVSDAHQCGVCGKCFGKSSTLTRHLQTHSGEKPFKCPECGKGFLESATLVRHQRTHTGEKPYACGDCGRCFSESSTLLRHRRSHQGERPHACATCGKGFGQRSDLVVHQRIHTGEKPFACPECGRRFSDRSDLTKHRRTHTGEKPYRCELCGKRFTCVSNLNVHRRNHAGHKPHKCPECSKAFSVASKLALHRKTHLGERPAECAECGKCFSHSRSLSQHQRAHTRARTAAAVAIQSAVGTALVFEGPAEQEKPGFSVS

SEQ ID NO: 1028842 - protein, 223 aa, Homo sapiens
MFATSGAVAAGKPYSCSECGKSFCYSSVLLRHERAHGGDGRFRCLECGERCARAADLRAHRRTHAGQTLYICSECGQSFRHSGRLDLHLGAHRQRCRTCPCRTCGRRFPHLPALLLHRRRQHLPERPLLPCCPRITRILSSGVGAGSQGTLRLPCVQEPRCWCVPLMLLCSLVFLIFLPLFCLLLSYLIPAHIFSFPDYFCCPASSGNGHRFGCRHVTSPVAS

SEQ ID NO: 1028843 - protein, 306 aa, Homo sapiens
MFATSGAVAAGKPYSCSECGKSFCYSSVLLRHERAHGGDGRFRCLECGERCARAADLRAHRRTHAGQTLYICSECARTFRQSALLFHQARAHPLGTTSDPAAPPHRCAQCPRAFRSGAGLRSHARIHVSRSPTRPRVSDAHQCGVCGKCFGKSSTLTRHLQTHSGEKPFKCPECGKGFLESATLVRHQRTHTGEKPYACGDCGRCFSESSTLLRHRRSHQGERPHACATCGKGFGQRSDLVVHQRIHTGEKPLVPEWGAVQDVGLTRPGRPGKTSVEWGTRPGATQYGQGASQRGSAGQLLNSGTG

SEQ ID NO: 1028844 - protein, 155 aa, Homo sapiens
  misc_feature (63)..(63): Xaa can be any naturally occurring amino acid
MLFPRAPRVNVPGCLSFPCGGPQMRPLWPTAPKHMCLLPWFAPGSVRPFLGFGFPGALSSHGXNGVHTRDFGRSLKDTRLSPRPPRLGLFSRTLFGFSRRVTLSRCSRRKNVVDNGKVVVGESLTSPHEKEWSSNGIRRAARAHPGTEGGAHSHR

SEQ ID NO: 1028845 - protein, 452 aa, Homo sapiens; identical to SEQ ID NO: 1028837

SEQ ID NO: 1028846 - protein, 182 aa, Homo sapiens
MWRLWTLLQREFHAAAPSAQPSGRAATCVRHLRQGFRAALRPGGAPAHPHGREALRVPRVRPPLQRPLGPHQAPAHAHGREALPLRTVRQAVHVRVQSQRASAQPCRPQATQMPRVQQGLQRRLQACTAPQDAPGRTASGVRRVRQVLQPQPLAVTASAGPHARPHRCRRCHPVRSGHCPRL

SEQ ID NO: 1028847 - protein, 175 aa, Homo sapiens
MFATSGAVAAGKPYSCSECGKSFCYSSVLLRHERAHGGDGRFRCLECGERCARAADLRAHRRTHAGQTLYICSECGQSFRHSGRLDLHLGAHRQRCRTCPCRTCGRRFPHLPALLLHRRRQHLPERPRRCPLCARTFRQSALLFHQARAHPLGTTSDPAAQTTVAQCRSFRRERV

SEQ ID NO: 1028848 - protein, 291 aa, Homo sapiens
GKGSRPRWLGRERQQRAGDPGAARARWDWGCGPGRVCGLLGHVTGAGELVPWRTGFRLGLGADPSERPPPRRPRLRSGSQRQPGAHGPSAHGSTMPALLERPKLSNAMARALHLAHSCMERERKLAGGKHSRWLTDDGNRMHEGETRSRRQDTRRWNERMSLAGRPRNKILKLEGEAFGSTRKRSPSFSCSSRKFYMRKKNRRRKEQSDLTTLTSAAYQQSLTVHTGTHLSACRGALEGHHRPRPPSWQPDRSPNQMFGTPKCFTTRHYRGAQPEAFAGTTEQWTIPGRLV

SEQ ID NO: 1028849 - protein, 243 aa, Homo sapiens
MSSALAGQGAAAASRGPRRRPRAGPRLRSGSQRQPGAHGPSAHGSTMPALLERPKLSNAMARALHLAHSCMERERKLAGGKHSRWLTDDGNRMHEGETRSRRQDTRRWNERMSLAGRPRNKILKLEGEAFGSTRKRSPSFSCSSRKFYMRKKNRRRKEQSDLTTLTSAAYQQSLTVHTGTHLSACRGALEGHHRPRPPSWQPDRSPNQMFGTPKCFTTRHYRGAQPEAFAGTTEQWTIPGRLV

SEQ ID NO: 1028850 - protein, 106 aa, Homo sapiens
  misc_feature (73)..(74): Xaa can be any naturally occurring amino acid
  misc_feature (79)..(79): Xaa can be any naturally occurring amino acid
MALELDHEFFLLIFHIKENKSQFVHLLREKNFLLDPIGGHRLAVGVQLACQGLLENFGICISKPEWEGKVGKXXYTDFXIENIVFMLLGIIFMMMFTLMAIILFIV

SEQ ID NO: 1028851 - protein, 490 aa, Homo sapiens
PEQEAAGGREAGAGQELLGWSGGAAMSDSEKLNLDSIIGRLLEVQGSRPGKNVQLTENEIRGLCLKSRGDFSEPAHSSGAGGTPSRSAVTYTASTTTFCDYLSMAVSLPRATTSFWGDYVDRGKQSLETICLLLAYKIKYPENFFLLRGNHECASINRIYGFYDECKRRYNIKLWKTFTDCFNCLPIAAIVDEKIFCCHGGLSPDLQSMEQIRRIMRPTDVPDQGLLCDLLWSDPDKDVQGWGENDRGVSFTFGAEVVAKFLHKHDLDLISPSTPGGRRRLRVPLPSRQLGDTLTQLPNYCGEFDNAGAMMSVDETLMCSFQILKPADKNKGKYGQFSGLNLEADHHPTRIPPKPENRPPQSNLWPQMIGWIVQNIMLHAAGGHPTPQATVGEHEPRRIPTSLNMNHSKGTPRMFLPPRVPDQDLGPAAPHRRQPGSTPCPGAPDGHPGRQGTPPKNNKGARHPAPAPKTRTTHDTPTSGHNDSRHHTPP

SEQ ID NO: 1028852 - protein, 211 aa, Homo sapiens
  misc_feature (129)..(129): Xaa can be any naturally occurring amino acid
RRTALAQRSAAGPDSTPQAVHKEELYGDFEDLETGDVHKGKSGPNTQNEDIEKEVKEEINPERRNDKCQDKSIWTKKRKLHGRCLMWKYDDRQKATYFVMDLERRKWRKRSSRLNHCSEFESIRDDVSXVVRCDVGVSPTLGMVRHRSCSIVKMFPCANIVVNNIGTPRCDPECIPWDGLWSKSDGMLDNSLRLSDARIAIVEQDIGSDLR

SEQ ID NO: 1028853 - protein, 150 aa, Homo sapiens
MVHEDVSSGPLCPGTGHVDYRADDKVVPGGILQSPGEGGIVIRGVLPEKYYHVAAASTRASEVLATQENSAVPGKRLFCYWSGLDFPQIGSQAFALVDEPDLLRTPKVADRPLPVKTSSVLWLEAHGGSGHADHRTTVSGIRPLTGQSCS

SEQ ID NO: 1028854 - protein, 129 aa, Homo sapiens
MKGIGSVAISCWAMHGILHENDETGHACDSSLWCLFVGPDRNLQHSILYSSYQWQEALMKFSWVVISLQLTAEKRVPPLIDWKDGDSVMVLPTIPEEEAKKLFPKGVFTKELPSGKKYLRYTPQPKSLT

SEQ ID NO: 1028855 - protein, 203 aa, Homo sapiens
DIGRYRRTGRDEDESVVDSGSNMCKVLIPKHDTIISGCFTLLQDNLAPLPDQKFLSGEPLADKPSASCISKSTKTQHSQQKGVNILPTPPVMKINCGPLAAQMKMNMYSHLSEDRITPVCKNEDHFNKLRSIGPHFYNSKFCYSKQRDSLSEPLQLSGVHIKSEYFCGLPLAAIKEPDYGLGSENLELSVGSGRGTRARFSLY

SEQ ID NO: 1028856 - protein, 264 aa, Homo sapiens
GRIVFYCLHMIKYSLQIKENKMELKKLMGHISIIPDYRQAWKMEHKLSDILLLTICAVISGAEGWEDIEDFGETHPDFLKQYGDFENGIPVHDTIARVVSCISPAKFHECFINWMRDCHSSDDKDVIAIDGKTLRHSYDKSRRKGAIHVISAFSTMYSLVIGQIKTDEKSNEITAIPELLNMLDIKGKIITTDAMGCQKDIAEKIQKQGGDYLFAVKGNQGRVNKAFEEKFPLKELNNPTHDSYAMSEKRHGREEIRLILFAMS

SEQ ID NO: 1028857 - protein, 189 aa, Homo sapiens
  misc_feature (128)..(128): Xaa can be any naturally occurring amino acid
  misc_feature (159)..(159): Xaa can be any naturally occurring amino acid
  misc_feature (172)..(172): Xaa can be any naturally occurring amino acid
MSVAEALLCNGQDDCGDSSDERGCHINECLSRKLSGCSQDCEDLKIGFKCRCRPGFRLKDDGRTCADCGRVQHHLPLQPALHQQPMASYKCLCVEGYAPRGGDPHSCKAVTDEEAVLIFANQYYLQQXNLDGSNYTLLKQGLNNAVALDFDYREQMIYXTDVTTQGSMIRSXTLTGAMCRSYTVQASAT

SEQ ID NO: 1028858 - protein, 200 aa, Homo sapiens
  misc_feature (139)..(139): Xaa can be any naturally occurring amino acid
  misc_feature (170)..(170): Xaa can be any naturally occurring amino acid
  misc_feature (183)..(183): Xaa can be any naturally occurring amino acid
CNASSQFLCSSGRCVAEALLCNGQDDCGDSSDERGCHINECLSRKLSGCSQDCEDLKIGFKCRCRPGFRLKDDGRTCADVDECSTTFPCSQRCINTHGSYKCLCVEGYAPRGGDPHSCKAVTDEEAVLIFANQYYLQQXNLDGSNYTLLKQGLNNAVALDFDYREQMIYXTDVTTQGSMIRSXTLTGAMCRSYTVQASAT

SEQ ID NO: 1028859 - protein, 83 aa, Homo sapiens
IAPPRHSATKAIAPTKAIAPTKAIAPTKAIAPTKAIAPTKAIAPTKAIAPTKAIAPTKAIAPTKARAPTKAIAPTKAIAPTGV

SEQ ID NO: 1028860 - protein, 83 aa, Homo sapiens
QSNIRGQSNIRGQSNIRGQSNILGQSNILGQSNILGSSDSPASASRVAGITGMHHKAWLILGSMSRDGVSLCGAGWSRTPDLR

SEQ ID NO: 1028861 - protein, 125 aa, Homo sapiens
QSNIRGQSNIRGQSNIRGQSNILGQSNILGQSNILGSSDSPASAYQVAGTICVRHHARLICGGDGFVPCGPNHHSFGCSDGPALGQCVCPQQSLSPSDGLSFHCCPVQRVPPLSTVWSLGVMSGL

SEQ ID NO: 1028862 - protein, 113 aa, Homo sapiens
MTGGGNNSSFVGVLFPPEVGLFSWEGGAPPGRLFPRPLGPPQRVGRQNPAPHAPQPPRPQKCVTRGPSLPQCSPNTPSALRRGPQGENGTQESVKTPPTVLGKPHGHTVVTFS

SEQ ID NO: 1028863 - protein, 113 aa, Homo sapiens; identical to SEQ ID NO: 1028862

SEQ ID NO: 1028864 - protein, 205 aa, Homo sapiens
SGLLMFSAFFVAHRPWRMATRALGYPPYLWGNWGYRGSRSPSCLPRPLLLPQLPVRRFSSSSLSRSAPKLRGRGCPQALPCVEALPLGLRMQVHRPLVPPPLGNMFCVFNHGHVLVTKGKGGHMLRSPKAASRTGPLLLQAWTPSICPTPARCRQPKFQKCFNREPPAPVPQPQAGSEAPNGKSSTRSVRRHHSWEPQSTLAHSR

SEQ ID NO: 1028865 - protein, 205 aa, Homo sapiens; identical to SEQ ID NO: 1028864

SEQ ID NO: 1028866 - protein, 137 aa, Homo sapiens
GLTVACGLTVACGLTVACGLTVACGLTVACGLTVACGLTVACGLTVACGLTVACGLTVACGLTVACGLTVACGLTVAYYESIQLYAFTKDDLKLELMFKREAEHKDLENLQPDYVVENKNPFSGEEFKPAAEMCISN

SEQ ID NO: 1028867 - protein, 86 aa, Homo sapiens
GLTVACGLTVACGLTVACGLTVACGLTVACGLTVACGLTVACGLTVACGLTVACGRSRRYKSVIDHPFPNKAKTLLTPASMTWVIR

SEQ ID NO: 1028868 - protein, 69 aa, Homo sapiens
GLTVACGLTVACGLTVACGLTVACGLTVACGLTVACGLTVACGLTVACGLTVACGIKTILANTVKSHLY

SEQ ID NO: 1028869 - protein, 92 aa, Homo sapiens
GLTVACGLTVACGLTVACGLTVACGLTVACGLTVACGLTVACGLTVACGLTVACGLTVACGLTVACGLTVACGLTVAYVILQDIDRGQLWIT

SEQ ID NO: 1028870 - protein, 69 aa, Homo sapiens
GLTVACGLTVACGLTVACGLTVACGLTVACGLTVACGLTVACGLTVACGLTVACGGIIVYPVSFSRFYP

SEQ ID NO: 1028871 - protein, 71 aa, Homo sapiens
GLTVACGLTVACGLTVACGLTVACGLTVACGLTVACGLTVACGLTVACGLTVACGFRHEVLANAYVLNGNA

SEQ ID NO: 1028872 - protein, 68 aa, Homo sapiens
GLTVACGLTVACGLTVACGLTVACGLTVACGLTVACGLTVACGLTVACGLTVACGSLHQGLLKMADIG

SEQ ID NO: 1028873 - protein, 131 aa, Homo sapiens
GLTVACGLTVACGLTVACGLTVACGLTVACGLTVACGLTVACGLTVACGLTVACGLTVACGLTVACGLTVACGLTVAYNFVFCFHIWVIRSPFNPIIPFPFKSGQLRDSFLGRGPDGYPFSRKYPHSIRII

SEQ ID NO: 1028874 - protein, 102 aa, Homo sapiens
GLTVACGLTVACGLTVACGLTVACGLTVACGLTVACGLTVACGLTVACGLTVACGFSPLLYFLGEIGNQGTAEGDHGGGGDGVLKRKKVFQDREEPGQLDPL

SEQ ID NO: 1028875 - protein, 90 aa, Homo sapiens
GLTVACGLTVACGLTVACGLTVACGLTVACGLTVACGLTVACGLTVACGLTVACGHGFFCGLPRPSLSPEGVAELLGPEAGPLDMYLQNN

SEQ ID NO: 1028876 - protein, 99 aa, Homo sapiens
MEGTKTYINSTMQESYVSQRCSQPLKLNTSFKILYRDTIQELTAPLLTTAQAKPGETQEEETNSGEEPFIETPRQDDVSRRFIPPVRMMSTGAQLHSVG

SEQ ID NO: 1028877 - protein, 124 aa, Homo sapiens
DTFCVQSSGHALSELHRMPHYADEETEAPRGLRVAQVTEPNLKDLMPGQVLPLLNPAPQGDPVCSTMSEEEAAQIPRSSVWEQDQQVRAASPMEQGQKVSCGTVPSRSVSGQVSRPNPLLAGKT

SEQ ID NO: 1028878 - protein, 133 aa, Homo sapiens
DRNLNTTFFDPPEEETPFYTNTYSDFSVTLKIDILIATRLRNNLPYCNYIYLRNKMKPVGYIGMVMSYDINWLPRVYRVSTPYIVLVGIDVDTTSIFHLRYSYIIAIPTGSKYLADSTHSTEAKDEMICMRVL

SEQ ID NO: 1028879 - protein, 255 aa, Homo sapiens
QTETSTPPSSIPPEEETPFYTNTYSDFSVTLKLIFFIATRLRNNLPYCNYIYLRNKMKPVGYIGMVMSYDINWLPRVYRVSTPYIVLVGIDVDTTSIFHLRYSSIIAIPTGSKYLADSTHSTEAKDEMICMRVLWALGIHLVLFTVGGLTGIVLANSSLDIVNYIDIVLIVVAQFHYVLSIGAVFAIIGGLHALIAPSSQAYILDQIYAKIHFTIIFIGVNLTFFPQHFLGYPECPDVTRTTPMHYIHYETSYHL

SEQ ID NO: 1028880 - protein, 526 aa, Homo sapiens
MTAEAGAPNAVLACCVAVKDRSVVKGPQWQRPGRRLVAHFGYRPRCGKLGQPVASLVVGDSEASALAAGEQPRRAPRAGRGGGVMRPVDADEAREPREEPGSPLSPAPRAGRENLASLERERALCAAAALCALPCERFALGRLHDALLCLPITDVTCATASRMLARALCAPHASPLLRCCWARARRDAAAWPRAFAAALTGLACTAPGLAVHGLGSPRICVPGLLHFGWAPPWPPLVPGHFAHVPWRQGCPALVTPLGRERPRRARRRPWGTPAQCPRARRATLASAARAWAHAARPCAALARPVRSVCRQVRGTCRPPGCLQRAPFFPRPVWQCYCRLLSRLCAVSSLLRFVRPPLSTRTAPVVVHTYSGTLPLALGTTGTHKRQGLPRFDAHNLLVSNTEYPLPPTACNPGLLATPHAAWGRIPHTLTGLCRAPRPRTAHATCRHHAAPAGVHSLRSAHHTPRFGYDNTGYLVNKRTAHFVQVQAQSGLLKLEHPSSPALPPARFRDHTPQLIVYDTHTTPTGC

SEQ ID NO: 1028881 - protein, 339 aa, Homo sapiens
MTAEAGAPNAVLACCVAVKDRSVVKGPQWQRPGRRLVAHFGYRPRCGKLGQPVASLVVGDSEASALAAGEQPRRAPRAGRGGGVMRPVDADEAREPREEPGSPLSPAPRAGRENLASLERERARAHWRARRKLLEIQSLLDAIKSEVEAEERGARAPAPRRVTEAEERVARLCAEAERKAAEAARMGRRIVDAAPADRRLRVLLSRRGRAGLERDAGGECPAWKALGVVANVTELCPPDKEIRGCLDRLKTKRAFRFVSPVFLDLRFSPPFEALNFPGNNPGENYTSALRWATGISTYIGRLRLDNKRLHYCPRKRTMGDKDSTADETRAGPRYSKSEY

SEQ ID NO: 1028882 - protein, 364 aa, Homo sapiens
RRTAEAGAPNAVLACCVAVKDRSVVKGPQWQRPGRRLVAHFGYRPRCGKLGQPVASLVVGDSEASALAAGEQPRRAPRAGRGGGVMRPVDADEAREPREEPGSPLSPAPRAGRENLASLERERARAHWRARRKLLEIQSLLDAIKSEVEAEERGARAPAPRRVTEAEERVARLCAEAERKAAEAARMGRRIVDAAPADRRLRVLLSRRGRAGLERDAGGECPAWKALGKAGEGDAQKPVPRFSRGELVFISFAVANVTELCPPDKEIRGCLDRLKTKRAFRFVSPVFLDLRFSPPFRHSIFQVTILARITLQHLDGPGYFDIHRAPSVGQQKASLMSPETNNGRQRQYRGRDKGGTKIFKERIH

SEQ ID NO: 1028883 - protein, 179 aa, Homo sapiens
MTAEAGAPNAVLACCVAVKDRSVVKGPQWQRPGRRLVAHFGYRPRCGKLGQPVASLVVGDSEASALAAGEQPRRAPRAGRGGGVMRPVDADEAREPREEPGSPLSPAPRAGRENLASLERERARAHWRARRKLLEIQSLLDAIKSEVEAEERGARALNTYGRVPEAEDDLGSTVPRKRG

SEQ ID NO: 1028884 - protein, 155 aa, Homo sapiens
YFHRETGIHWEKKVWVVSVVTPGCNQLPTWESGENYTRTINDDQGLLLSETVGGALRGLGDFVASWLGNLAEGTFFINKTEMEDFPGFPHRGLAVGYISPLPGHSASILGQLLDVMAYNKWNVFHGPRVDDPSFPYESFTFPELMRKGSYNPGEK

SEQ ID NO: 1028885 - protein, 199 aa, Homo sapiens
QYGCGWECGGHTCCVAMSGRIQARRAGLAGAGGTATGQRQSLWQEKAWRVGTRSPLGVHCIREGENWGVVGRGEQYLGRAGESSALALIQAATSTECVRQTHALANTPADPVHGCTVTQMWQHRCWSTGTHIHVHTVHTTHTRTDTQLQSPIHHANADTDTANHIRILTCPPSLCTGACKEYTLCIPTYVRRGSKQGDP

SEQ ID NO: 1028886 - protein, 87 aa, Homo sapiens
GTPASTYRKLLEGEECRLSGEGVGPVNISGVTSSVSSGYDSGSGYAVRSVEILAAASVEVWPEVAVDDTTPAAMGVSAVDGGRTCET

SEQ ID NO: 1028887 - protein, 144 aa, Homo sapiens
  misc_feature (1)..(2): Xaa can be any naturally occurring amino acid
  misc_feature (141)..(141): Xaa can be any naturally occurring amino acid
XXEDNVRVSRELPGHTGYLSCCRFLDDNQIITSSGDTTCALWDIETGQQTVGFAGHSGDVMSLSLAPDGRTFVSGACDASIKLWDVRDSMCRQTFIGHESDINAVAFFPNGYAFTTGSDDATWRLFDLRADQELLMYSHDXIIC

SEQ ID NO: 1028888 - protein, 256 aa, Homo sapiens
  misc_feature (253)..(253): Xaa can be any naturally occurring amino acid
MIIRDARKACGDSTLTQITAGLDPVGRIQMRTRRTLRGHLAKIYAMHWGTDSRLLVSASQDGKLIIWDSYTTNKVHAIPLRSSWVMTCAYAPSGNFVACGGLDNICSIYSLKTREDNVRVSRELPGHTGYLSCCRFLDDNQIITSSGDTTCALWDIETGQQTVGFAGHSGDVMSLSLAPDGRTFVSGACDASIKLWDVRDSMCRQTFIGHESDINAVAFFPNGYAFTTGSDDATWRLFDLRADQELLMYSHDXIIC

SEQ ID NO: 1028889 - protein, 99 aa, Homo sapiens
LRSGEAALAAGLGPLRKSIRAAAAAAAAAAASAAEEDSAARAPPATPAAESHRHRPRASGQELPPPVLGGGGNNEMEEIEEKVLEEKRRSVVSRLCDKI

SEQ ID NO: 1028890 - protein, 273 aa, Homo sapiens
  misc_feature (195)..(195): Xaa can be any naturally occurring amino acid
  misc_feature (197)..(197): Xaa can be any naturally occurring amino acid
  misc_feature (217)..(217): Xaa can be any naturally occurring amino acid
  misc_feature (233)..(233): Xaa can be any naturally occurring amino acid
AQFLSQTEAQPPSPVSITSAASMSDKLPYKVADIGLAAWGRKALDIAENEMPGLMRMLWSGTLASKPLNVAALQFSLAAAPCKQIEPGLGNETGGQVPIPNFEREPPPFRVQPPLGAEVQWPTCNIFSTQDHAAAAIAKAGIPVYAWKGETDEEYLWCIEQTLYFKDGPLNMILDDGGDLTNLIHTKYPHPPPGXPXTPEETTTGAHNPYNMMANGXLNVPPINANDSLTNTXPDNLYPSRESLIDGIKRATDVMIAGKVAVVAGYGDVGKGC

SEQ ID NO: 1028891 - protein, 255 aa, Homo sapiens
  misc_feature (177)..(177): Xaa can be any naturally occurring amino acid
  misc_feature (179)..(179): Xaa can be any naturally occurring amino acid
  misc_feature (199)..(199): Xaa can be any naturally occurring amino acid
  misc_feature (215)..(215): Xaa can be any naturally occurring amino acid
AQFLSQTEAQPPSPVSITSAASMSDKLPYKVADIGLAAWGRKALDIAENEMPGLMRMLWSGTLASKPLNVAALHRWLACTLTCVRLACPHLRPLVTLGAEVQWPTCNIFSTQDHAAAAIAKAGIPVYAWKGETDEEYLWCIEQTLYFKDGPPNMILDDGGDLTNLIHTKYPHPPPGXPXTPEETTTGAHNPYNMMANGXLNVPPINANDSLTNTXPDNLYPSRESLIDGIKRATDVMIAGKVAVVAGYGDVGKGC

SEQ ID NO: 1028892 - protein, 188 aa, Homo sapiens
SIRKQTLILLTNLLQEEFVKWKGSLFFRFVSTLIDSHPDIASFGEFCLAHLLLKRNPVMFFQHFIECISHFNNYEKHEKYNKFPQSEREKRLFSLNGKVKHKRDDMTHLQISSRSHSTGLNQRNSTIQLPKSGLQYSGPCLADWHPTPWTWTPVSYSQTRLEVLSSKEITLSAMRSKPDKDLLMAHER

SEQ ID NO: 1028893 - protein, 209 aa, Homo sapiens
  misc_feature (13)..(13): Xaa can be any naturally occurring amino acid
  misc_feature (28)..(28): Xaa can be any naturally occurring amino acid
WVQAINPSYNPPXTHPSESPISPTSGNXAHLRAAPAAGPVQGVGPAPAPHSLPEPGPQQQTFAVPRPPHQPLQMPKMMPENQYPSEQRFQRQLSEPCHPFPPQPGVPGDNRPSYHRQMSEPIVPAAPPPPQGFKQEYHDPLYEHGVPGMPGPPAHGFQSPMGIKQEPRDYCVDSEVPNCQSSYMRGGYFSSSHEGRLLGAGASRRTGQP

SEQ ID NO: 1028894 - protein, 381 aa, Homo sapiens
  misc_feature (13)..(13): Xaa can be any naturally occurring amino acid
  misc_feature (28)..(28): Xaa can be any naturally occurring amino acid
WVQAINPSYNPPXTHPSESPISPTSGNXAHLRAAPAAGPVQGVGPAPAPHSLPEPGPQQQTFAVPRPPHQPLQMPKMMPENQYPSEQRFQRQLSEPCHPFPPQPGVPGDNRPSYHRQMSEPIVPAAPPPPQGFKQEYHDPLYEHGVPGMPGPPAHGFQSPMGIKQEPRDYCVDSEVPNCQSSYMRGGYFSSSHEGFSYEKDPRLYFDDTCVVPERLEGKVKQEPTMYREGPPYQRRGSLQLWQFLVTLLDDPANAHFIAWTGRGMEFKLIEPEEVARRWGIQKNRPAMNYDKLSRSLRYYYEKGIMQKVAGERYVYKFVCDPDALFSMAFPDNQRPFLKAESECHLSEEDTLPLTHFEDSPAYLLDMDRCSSLPYAEGFAY

SEQ ID NO: 1028895 - protein, 381 aa, Homo sapiens; identical to SEQ ID NO: 1028894
  misc_feature (13)..(13): Xaa can be any naturally occurring amino acid
  misc_feature (28)..(28): Xaa can be any naturally occurring amino acid

SEQ ID NO: 1028896 - protein, 217 aa, Homo sapiens
  misc_feature (13)..(13): Xaa can be any naturally occurring amino acid
  misc_feature (28)..(28): Xaa can be any naturally occurring amino acid
WVQAINPSYNPPXTHPSESPISPTSGNXAHLRAAPAAGPVQGVGPAPAPHSLPEPGPQQQTFAVPRPPHQPLQMPKMMPENQYPSEQRFQRQLSEPCHPFPPQPGVPGDNRPSYHRQMSEPIVPAAPPPPQGFKQEYHDPLYEHGVPGMPGPPAHGFQSPMGIKQEPRDYCVDSEVPNCQSSYMRGGYFSSSHEGKEPAFLSSSLLSPLLSSFLSLG

SEQ ID NO: 1028897 - protein, 235 aa, Homo sapiens
DHRAAVDRCAVSAAETIDRIVSTFAFLSEVPNCQSSYMRGGYFSSSHEGFSYEKDPRLYFDDTCVVPERLEGKVKQEPTMYREGPPYQRRGSLQLWQFLVTLLDDPANAHFIAWTGRGMEFKLIEPEEVARRWGIQKNRPAMNYDKLSRSLRYYYEKGIMQKVAGERYVYKFVCDPDALFSMAFPDNQRPFLKAESECHLSEEDTLPLTHFEDSPAYLLDMDRCSSLPYAEGFAY

SEQ ID NO: 1028898 - protein, 256 aa, Homo sapiens
VDVGSEQTLGFGSWTKSPKLRVSRTPRSLSQGHGEPEAAGTGAKRGGERSSTDSARFEELLLQASKELQQAQTTRPESTQIQPQPGFCIKTNSSEGTGFHQNLPLPHLSLAPRRRDRGRSCFRCYEEDPTLGSHPHEIWEQPHAEMDANGQDCSAYDVNCKQATFLPGGMPENHADYPSARGATVDLTNYGGDKGQSGANITTLAPEFCTLRACHERNRANNRSSHRRRYTSAPTQALPQGTGGLNSTPRETDKAD

SEQ ID NO: 1028899 - protein, 139 aa, Homo sapiens
MADLSGGERRRAALVSIMLGDHDLLVLDEPTNHLDVEAVAWLAGHLRHLQERGVAMLVVSHDRWFLDEICTDIWEVHNATVEAYQGGYSAYTLARVERARVAATNEAKRQNLARKELAWLRRGALPVAPNRVPSRAKCW

SEQ ID NO: 1028900 - protein, 238 aa, Homo sapiens
MINRIPSSGTPNIGLDGSEAHAAVLLWHGQAHETQLSHLAPGLLGVATFLDDAAPALEAIGLVDPLAHRVAQLFFVAAAVDRRLAHVEVGRGQCWFDRAMADLSGGERRRAALVSIMLGDHDLLVLDEPTNHLDVEAVAWLAGHLRHLQERGVAMLVVSHDRWFLDEICTDIWEVHNATVEAYQGGYSAYTLARVERARVAATNEAKRQNLARKELAWLRRGALPVAPNRVPSRAKCW

SEQ ID NO: 1028901 - protein, 84 aa, Homo sapiens
MLVVSHDRWFLDEICTDIWEVHNATVEAYQGGYSAYTLARVERARVAATNEAKRQNLARKELAWLRRGALPVAPNRVPSRAKCW

SEQ ID NO: 1028902 - protein, 139 aa, Homo sapiens; identical to SEQ ID NO: 1028899

SEQ ID NO: 1028903 - protein, 230 aa, Homo sapiens
MWDLEPVQIRFLSGTSSRTLKASSFWSHYMTRIGSKNLLMISRRCFSEDDLRDPVLLVFAHSAGHAPYCHAPDRSVLTSSGLQHLSHSHLVFPGPLCQPTGTGLYDGLDWLSHELSKRYPTRGRPLMPRKLLRAYPGMTQTPRTSSGQCPFPPTFSSPTSPTASAPAPACMFSLFLGAWRPCFSGQHRRGPPTPCLLGAYGRGFLAQAPSSTRRTTGSVVSFFFSVLGVL

SEQ ID NO: 1028904 - protein, 230 aa, Homo sapiens; identical to SEQ ID NO: 1028903

SEQ ID NO: 1028905 - protein, 543 aa, Homo sapiens
RAEPGAGRGARAGRAPGGALGCLLVPARTKTTIALLYDEESENAYDIRLKLTKEVLTIQKQDVVCVGGSHQGRNRRTVTLRRQPVGGLGLSIKGGSEHNVPVVISKIFEDQAADQTGMLFVGDAVLQVNGIHVENATHEEVVHLLRNAGDEVTITVEYLREAPAFLKLPLGSPGPSSDHSSGASSPLFDSGLHLNGNSSTTAPSSPSSPIAKDPRYEKRWLDTLSVPLSMARISRYKAGTEKLRWNAFEVLALDGVSSGILRFYTAQDGTDWLRAVSANIRELTLQNMKMANKCCSPSDQVVHMGWVNEKLQGADSSQTFRPKFLALKGPSFYVFSTPPVSTFDWVRAERTYHLCEVLFKVHKFWLTEDCWLQANLYLGLQDFDFEDQRPYCFSIVAGHGKSHVFNVELGSELAMWEKSFQRATFMEVQRTGSRTYMCSWQGEMLCFTVDFALGFTCFESKTKNVLWRFKFSQLKGSSDDGKTRVKLLFQNLDTKQIEMKELEFQDLRAVLHCIHSFIAAKVASVDPGFMDSQSLARKYMYSS

SEQ ID NO: 1028906 - protein, 308 aa, Homo sapiens
TSRAGAGRGARAGRAPGGALGCLLVPARTKTTIALLYDEESENAYDIRLKLTKEVLTIQKQDVVCVGGSHQGRNRRTVTLRRQPVGGLGLSIKGGSEHNVPVVISKIFEDQAADQTGMLFVGDAVLQVNGIHVENATHEEVVHLLRNAGDEVTITVEYLREAPAFLKLPLGSPGPSSDHSSGASSPLFDSGLHLNGNSSTTAPSSPSSPIAKDPRYEKRWLDTLSVPLSMARISRYKAGTEKLRWNAFEVLALDGVSSGILRFYTAQDGTDWLRAVSANIRELTLQNMKMANKCCSPSDLGCAYGVGK

SEQ ID NO: 1028907 - protein, 439 aa, Homo sapiens
RAEPGAGRGARAGRAPGGALGCLLVPARTKTTIALLYDEESENAYDIRLKLTKEVLTIQKQDVVCVGGSHQGRNRRTVTLRRQPVGGLGLSIKGGSEHNVPVVISKIFEDQAADQTGMLFVGDAVLQVNGIHVENATHEEVVHLLRNAGDEVTITVEYLREAPAFLKLPLGSPGPSSDHSSGASSPLFDSGLHLNGNSSTTAPSSPSSPIAKDPRYEKRWLDTLSVPLSMARISRYKAGTEKLRWNAFEVLALDGVSSGILRFYTAQDGTDWLRAVSANIRELTLQNMKMANKCCSPSDQVVHMGWVNEKLQGADSSQTFRPKFLALKGPSFYVFSTPPVSTFDWVRAERTYHLCEVLFKVHKFWLTEDCWLQANLYLGLQDFDFEDQRPYCFSIVAGHGKSHVFNVELGSELAMWEKSFQRATFMEVQRTGQIHHSQI

SEQ ID NO: 1028908 - protein, 214 aa, Homo sapiens
MAYASRCLTVDGKPLTLNFSAQDFQSYQHTAIHKFWLTEDCWLQANLYLGLQDFDFEDQRPYCFSIVAGHGKSHVFNVELGSELAMWEKSFQRATFMEVQRTGSRTYMCSWQGEMLCFTVDFALGFTCFESKTKNVLWRFKFSQLKGSSDDGKTRVKLLFQNLDTKQIEMKELEFQDLRAVLHCIHSFIAAKVASVDPGFMDSQSLARKYMYSS

SEQ ID NO: 1028909 - protein, 138 aa, Homo sapiens
MSWTFTFTHSSLMASPRTTSSPEGSIHVLMGQESGSSRLVLCLGSHQAETKVSAGLCSHLQGSLRVAGRIQSLDFIGLSSPPLSAKGCSPPPETTMFIDMVTLCPQASSRHSPYFRRRRQMGSIVVIMETDLLQISRF

SEQ ID NO: 1028910 - protein, 539 aa, Homo sapiens
MGTEGPPPPAASRGRQGCLLVPARTKTTIALLYDEESENAYDIRLKLTKEVLTIQKQDVVCVGGSHQGRNRRTVTLRRQPVGGLGLSIKGGSEHNVPVVISKIFEDQAADQTGMLFVGDAVLQVNGIHVENATHEEVVHLLRNAGDEVTITVEYLREAPAFLKLPLGSPGPSSDHSSGASSPLFDSGLHLNGNSSTTAPSSPSSPIAKDPRYEKRWLDTLSVPLSMARISRYKAGTEKLRWNAFEVLALDGVSSGILRFYTAQDGTDWLRAVSANIRELTLQNMKMANKCCSPSDQVVHMGWVNEKLQGADSSQTFRPKFLALKGPSFYVFSTPPVSTFDWVRAERTYHLCEVLFKVHKFWLTEDCWLQANLYLGLQDFDFEDQRPYCFSIVAGHGKSHVFNVELGSELAMWEKSFQRATFMEVQRTGSRTYMCSWQGEMLCFTVDFALGFTCFESKTKNVLWRFKFSQLKGSSDDGKTRVKLLFQNLDTKQIEMKELEFQDLRAVLHCIHSFIAAKVASVDPGFMDSQSLARKYMYSS

SEQ ID NO: 1028911 - protein, 140 aa, Homo sapiens
MPKEGMAGGGGHGGRVWARAPGGGPARAGPWGGRRWGSLGGGEVGEGNRAGHGGVRGEGRGRGSGGGGGSGARGGGPGGEGVGGMARGAAGGPGAPRGAAGGSSGETVEARGTRRRAGGARPCVPAPGGGRAGVPCEGRG

SEQ ID NO: 1028912 - protein, 101 aa, Homo sapiens
GEVSPGQRRGEAALSYSSAVSDKHLEEGRLYPPLNTITDVALGVAEKIVKDAYQEKTATVYPEPQNKEAFVRSQMYSTDYDQILPDCYSWPEEGGENTDQS

SEQ ID NO: 1028913 - protein, 101 aa, Homo sapiens; identical to SEQ ID NO: 1028912

SEQ ID NO: 1028914 - protein, 534 aa, Homo sapiens
MNNPLSHYWISSSHNTYLTGDQLRSESSPEAYIRCLRMGCRCIELDCWDGPDGKPVIYHGWTRTTKIKFDDVVQAIKDHAFVTSSFPVILSIEEHCSVEQQRHMAKAFKEVFGDLLLTKPTEASADQLPSPSQLREKIIIKHKKLGPRGDVDVNMEDKKDEHKQQGELYMWDSIDQKWTRHYCAIADAKLSFSDDIEQTMEEEVPQDIPPTELHLEEKWFHKKVEKRTSAEKLLQEYCMETGGKDGTFLVRESETFPNDYTLSFWRSGRVQHCRIRSTMEGGTLKYYLTDNLTFSSIYALIQHYRETHLRCAEFELRLTDPVPNPNPHESKPWYYDSLSRGEAEDMLMRIPRDGAFLIRKREGSDSYAITFRARGKVKHCRINRDGRHFVLGTSAYFESLVELVSYYEKHSLYRKMRLRYPVTPELLERYNMERDINSLYDVSRMYVDPSEINPSMPQRTVKALYDYKAKRSDELSFCRGALIHNVSKEPGGWWTGPFGPDPAYFASLRCGLSTRPPRPQRRFVRPLGFGGIGP

SEQ ID NO: 1028915 - protein, 868 aa, Homo sapiens
METSKIRQGMVEHVQQEEETPQSSEEVEEGLASPASGLQGSHCVFSAPASAGFHRPGVSLPSTTSHSRMSLACHQPPPVGKAPTPVDIMEIKEIRPGKNSKDFERAKAVRQKEDCCFTILYGTQFVLSTLSLAADSKEDAVNWLSGLKILHQEAMNASTPTIIESWLRKQIYSVDQTRRNSISLRELKTILPLINFKVSSAKFLKDKFVEIGAHKDELSFEQFHLFYKKLMFEQQKSILDEFKKDSSVFILGNTDRPDASAVYLHDFQRFLIHEQQEHWAQDLNKVRERMTKFIDDTMRETAEPFLFVDEFLTYLFSRENSIWDEKYDAVDMQDMNNPLSHYWISSSHNTYLTGDQLRSESSPEAYIRCLRMGCRCIELDCWDGPDGKPVIYHGWTRTTKIKFDDVVQAIKDHAFVTSSFPVILSIEEHCSVEQQRHMAKAFKEVFGDLLLTKPTEASADQLPSPSQLREKIIIKHKKLGPRGDVDVNMEDKKDEHKQQGELYMWDSIDQKWTRHYCAIADAKLSFSDDIEQTMEEEVPQDIPPTELHLEEKWFHKKVEKRTSAEKLLQEYCMETGGKDGTFLVRESETFPNDYTLSFWRSGRVQHCRIRSTMEGGTLKYYLTDNLTFSSIYALIQHYRETHLRCAEFELRLTDPVPNPNPHESKPWYYDSLSRGEAEDMLMRIPRDGAFLIRKREGSDSYAITFRARGKVKHCRINRDGRHFVLGTSAYFESLVELVSYYEKHSLYRKMRLRYPVTPELLERYNMERDINSLYDVSRMYVDPSEINPSMPQRTVKALYDYKAKRSDELSFCRGALIHNVSKEPGGWWTGPFGPDPAYFASLRCGLSTRPPRPQRRFVRPLGFGGIGP

SEQ ID NO: 1028916 - protein, 847 aa, Homo sapiens
MSTTVNVDSLAEYEKSQIKRALELGTVMTVFSFRKSTPERRTVQVIMETRQVAWSKTADKIEGFLDIMEIKEIRPGKNSKDFERAKAVRQKEDCCFTILYGTQFVLSTLSLAADSKEDAVNWLSGLKILHQEAMNASTPTIIESWLRKQIYSVDQTRRNSISLRELKTILPLINFKVSSAKFLKDKFVEIGAHKDELSFEQFHLFYKKLMFEQQKSILDEFKKDSSVFILGNTDRPDASAVYLHDFQRFLIHEQQEHWAQDLNKVRERMTKFIDDTMRETAEPFLFVDEFLTYLFSRENSIWDEKYDAVDMQDMNNPLSHYWISSSHNTYLTGDQLRSESSPEAYIRCLRMGCRCIELDCWDGPDGKPVIYHGWTRTTKIKFDDVVQAIKDHAFVTSSFPVILSIEEHCSVEQQRHMAKAFKEVFGDLLLTKPTEASADQLPSPSQLREKIIIKHKKLGPRGDVDVNMEDKKDEHKQQGELYMWDSIDQKWTRHYCAIADAKLSFSDDIEQTMEEEVPQDIPPTELHLEEKWFHKKVEKRTSAEKLLQEYCMETGGKDGTFLVRESETFPNDYTLSFWRSGRVQHCRIRSTMEGGTLKYYLTDNLTFSSIYALIQHYRETHLRCAEFELRLTDPVPNPNPHESKPWYYDSLSRGEAEDMLMRIPRDGAFLIRKREGSDSYAITFRARGKVKHCRINRDGRHFVLGTSAYFESLVELVSYYEKHSLYRKMRLRYPVTPELLERYNMERDINSLYDVSRMYVDPSEINPSMPQRTVKALYDYKAKRSDELSFCRGALIHNVSKEPGGWWTGPFGPDPAYFASLRCGLSTRPPRPQRRFVRPLGFGGIGP

SEQ ID NO: 1028917 - protein, 87 aa, Homo sapiens
VVGRLSRSPSDLGLYSLASLGCLVSPICVSFCHTGHICAVQSSGEVQIFRRGPIFRRGPIFRRGPIFRRGPIFRRGPIFRRVQSSGP

SEQ ID NO: 1028918 - protein, 368 aa, Homo sapiens
SIDRLRSEHVRKFLLTFREPDLEKKYSKQVDDRFGAYVACASLVFLFICFVQITIVPHSIFMLSFYLTCSLLLTLVVFVSVIYSCVKLFPSPLQTLSRKIVRSKMNSTLVGVFTITLVFLAAFVNMFTCNSRDLLGCLAQEHNISASQVNACHVAESAVNYSLGDEQGFCGSPWPNCNFPEYFTYSVLLSLLACSVFLQISCIGKLVLMLAIELIYVLIVEVPGVTLFDNADLLVTANAIDFFNNGTSQCPEHATKVALKVVTPIIISVFVLALYLHAQQVESTARLDFLWKLQATEEKEEMEELQAYNRRLLHNILPKDVAAHLLAREAHMMSSTISPVSVLAVMFASIATFSEFYVELEANNEGIE

SEQ ID NO: 1028919 - protein, 311 aa, Homo sapiens
SIDRLRSEHVRKFLLTFREPDLEKKYSKQVDDRFGAYVACASLVFLFICFVQITIVPHSIFMLSFYLTCSLLLTLVVFVSVIYSCVKLFPSPLQTLSRKIVRSKMNSTLVGVFTITLVFLAAFVNMFTCNSRDLLGCLAQEHNISASQVNACHVAESAVNYSLGDEQGFCGSPWPNCNFPEYFTYSVLLSLLACSVFLQISCIGKLVLMLAIELIYVLIVEVPGVTLFDNADLLVTANAIDFFNNGTSQCPEHATKVALKVVTPIIISVFVLCRCSASSSFPLKGVHSFYSYSCKNRYDYDFPWKLKSLFK

SEQ ID NO: 1028920 - protein, 250 aa, Homo sapiens
SIDRLRSEHVRKFLLTFREPDLEKKYSKQVDDRFGAYVACASLVFLFICFVQITIVPHSIFMLSFYLTCSLLLTLVVFVSVIYSCVKLFPSPLQTLSRKIVRSKMNSTLVGVFTITLVFLAAFVNMFTCNSRDLLGCLAQEHNISASQVNACHVAESAVNYSLGDEQGFCGSPWPNCNFPEYFTYSVLLSLLACSVFLQISCIGKLVLMLAIELIYVLIVEVPGVTLFDNADLLVTANAIDFFNNGTSQW

SEQ ID NO: 1028921 - protein, 148 aa, Homo sapiens
GPAVAGVGSSEPVVRSHGGPPGLSTTCPTAPEHATKVALKVVTPIIISVFVLALYLHAQQVESTARLDFLWKLQATEEKEEMEELQAYNRRLLHNILPKGRGRSLTGPRGAHDELYYQSCECVAVMFASIATFSEFYVELEANNEGIE

SEQ ID NO: 1028922 - protein, 56 aa, Homo sapiens
MATQAAKTQIETPTWEKESYSNFSEASEEGRLENARPGLRGALCSWIGPPGSMSVS

SEQ ID NO: 1028923 - protein, 81 aa, Homo sapiens
WHEAKILARGQDPGTRPRSWHEAKIRHEAKIRHEAKILWHEAKIPPDYVVADSAVINIKSTLFNHVLEDAYVGTKGADCIC

SEQ ID NO: 1028924 - protein, 223 aa, Homo sapiens
MCCLSSTILEEEKAQQEERMRMESRRQATVSWDSGGSDEAPPKPSRPGYPSPRSSEGFYPSPQHMVRTNHDQVTGYPGTHGITAMAGSIYPGQAISSWNKQIPGSHRPQADSNVAAQCGGLLPVLNMQEDSGHAVATPRTHEPQHPAQPHETATTKYRAGMATQRQHVTKPRKCATTRQENNTRSRMTCHRQQPSDKTRTEPRGELPAIRRTSIRRREPRHQQ

SEQ ID NO: 1028925 - protein, 722 aa, Homo sapiens
EERHLRRSYWEMRGNALEKKSNYEVLEKDVGLKRFFPKSLLDSVKAKTLRKLIQQTFRQFANLNREESILKFFEILSPVYRFDKECFKCALGSSWIISVELAIGPEEGISYLTDKGCNPTHLADFTQVQTIQYSNSEDKDRKGMLQLKIAGAPEPLTVTAPSLTIAENMADLIDGYCRLVNGTSQSFIIRPQKEGERALPSIPKLANSEKQGMRTHAVSVSETDDYAEIIDEEDTYTMPSTRDYEIQRERIELGRCIGEGQFGDVHQGIYMSPENPALAVAIKTCKNCTSDSVREKFLQEALTMRQFDHPHIVKLIGVITENPVWIIMELCTLGELRSFLQVRKYSLDLASLILYAYQLSTALAYLESKRFVHRDIAARNVLVSSNDCVKLGDFGLSRYMEDSTYYKASKGKLPIKWMAPESINFRRFTSASDVWMFGVCMWEILMHGVKPFQGVKNNDVIGRIENGERLPMPPNCPPTLYSLMTKCWAYDPSRRPRFTELKAQLSTILEEEKAQQEERMRMESRRQATVSWDSGGSDEAPPKPSRPGYPSPRSSEGFYPSPQHMVLTNHDQVTGYPGTQGITAMAGSIYPGQAISLGTNRFLEVIDLRQIALWQPNVEDYYQYEHARGLGARGGHPTDSRTAAPRTAPRNCDDKIQGRDGNTATARHETQEMCDHTQENNTRSRMTCHRQQPSDKTRTEPRGELPAIRRTSIRRREPRHQQ

SEQ ID NO: 1028926 - protein, 326 aa, Homo sapiens
EERHLRRSYWEMRGNALEKKSNYEVLEKDVGLKRFFPKSLLDSVKAKTLRKLIQQTFRQFANLNREESILKFFEILSPVYRFDKECFKCALGSSWIISVELAIGPEEGISYLTDKGCNPTHLADFTQVQTIQYSNSEDKDRKGMLQLKIAGAPEPLTVTAPSLTIAENMADLIDGYCRLVNGTSQSFIIRPQKEGERALPSIPKLANSEKQGMRTHAVSVSETDDYAEIIDEEDTYTMPSTRDYEIQRERIELGRCIGEGQFGDVHQGIYMSPENPALAVAIKTCKNCTSDSVREKFLQEACKCLEISVELPFDFLSVKSKLSLKK

SEQ ID NO: 1028927 - protein, 485 aa, Homo sapiens
MPSTRDYEIQRERIELGRCIGEGQFGDVHQGIYMSPENPALAVAIKTCKNCTSDSVREKFLQEALTMRQFDHPHIVKLIGVITENPVWIIMELCTLGELRSFLQVRKYSLDLASLILYAYQLSTALAYLESKRFVHRDIAARNVLVSSNDCVKLGDFGLSRYMEDSTYYKASKGKLPIKWMAPESINFRRFTSASDVWMFGVCMWEILMHGVKPFQGVKNNDVIGRIENGERLPMPPNCPPTLYSLMTKCWAYDPSRRPRFTELKAQLSTILEEEKAQQEERMRMESRRQATVSWDSGGSDEAPPKPSRPGYPSPRSSEGFYPSPSTWYLLYHDQVTGYPGTQGITAMAGSIYPGQAISLGTNRFLEVIDLRQIALWQPNVEDYYQYEHARGLGARGGHPTDSRTAAPRTAPRNCDDKIQGRDGNTATARHETQEMCDHTQENNTRSRMTCHRQQPSDKTRTEPRGELPAIRRTSIRRREPRHQQ

SEQ ID NO: 1028928 - protein, 311 aa, Homo sapiens
SQVNTVESSTLGCHIASPEVYDSMNLFGPKEILMHGVKPFQGVKNNDVIGRIENGERLPMPPNCPPTLYSLMTKCWAYDPSRRPRFTELKAQLSTILEEEKAQQEERMRMESRRQATVSWDSGGSDEAPPKPSRPGYPSPRSSEGFYPSPQHMVRTNHDQVTGYPGTHGITAMAGSIYPGQAISSWNKQIPGSHRPQADSTVAAQCGGLLPVLNMQEDSGHAVATPRTHEPQHPAQPHETATTKYRAGMATQRQHVTKPRKCATTRQENNTRSRMTCHRQQPSDKTRTEPRGELPAIRRTSIRRREPRHQQ

SEQ ID NO: 1028929 - protein, 245 aa, Homo sapiens
MKKLPEQSLQRLQRYVGLQIASEYVKQCTILEEEKAQQEERMRMESRRQATVSWDSGGSDEAPPKPSRPGYPSPRSSEGFYPSPQHMVRTNHDQVTGYPGTHGITAMAGSIYPGQAISSWNKQIPGSHRPQADSTVAAQCGGLLPVLNMQEDSGHAVATPRTHEPQHPAQPHETATTKYRAGMATQRQHVTKPRKCATTRQENNTRSRMTCHRQQPSDKTRTEPRGELPAIRRTSIRRREPRHQQ

SEQ ID NO: 1028930 - protein, 506 aa, Homo sapiens
EERHLRRSYWEMRGNALEKKSNYEVLEKDVGLKRFFPKSLLDSVKAKTLRKLIQQTFRQFANLNREESILKFFEILSPVYRFDKECFKCALGSSWIISVELAIGPEEGISYLTDKGCNPTHLADFTQVQTIQYSNSEDKDRKGMLQLKIAGAPEPLTVTAPSLTIAENMADLIDGYCRLVNGTSQSFIIRPQKEGERALPSIPKLANSEKQGMRTHAVSVSETDDYAEIIDEEDTYTMPSTRDYEIQRERIELGRCIGEGQFGDVHQGIYMSPENPALAVAIKTCKNCTSDSVREKFLQEALTMRQFDHPHIVKLIGVITENPVWIIMELCTLGELRSFLQVRKYSLDLASLILYAYQLSTALAYLESKRFVHRDIAARNVLVSSNDCVKLGDFGLSRYMEDSTYYKASKGKLPIKWMAPESINFRRFTSASDVWMFGVCMWEILMHGVKPFQGVKNNDVIGRIENGERLPMPPNCPPTLYSLMTKCWAYDPSRRPRFTELKAQLR

SEQ ID NO: 1028931 - protein, 121 aa, Homo sapiens
KLGAGWRHFFVDARAEPRENPFYCHIYRGGAYFLPTTLSRPIRNAPTLLGLPRCIHHMKHPIICRLIHFSNSSNINNFHDLRSLRFEAKSPNSRRTLHKPGVTIWMPPTLPHIRRTRIHKI

SEQ ID NO: 1028932 - protein, 119 aa, Homo sapiens
LAVVLDQESVIRVIPASWGVGIPNDIVFTPSRCLLYLRGHQFHHNNYQYKTPCHNPIPNAPLRLIRPNHSSPTSPISPSPSCWHHYTTNRPQPQHHLLRPRRRRRPHSIPTPILIFRSP

SEQ ID NO: 1028933 - protein, 176 aa, Homo sapiens
MICCSALSPRIHLSFHRRWPDWHCISKLITRHRTTRHVLRCSSLPLCPINRSCICHHRRLHSLISPILRLHPRPNLRQNPFHYHIHRRKSNFLPTTLSRPIRNAPTLLGLPRCIHHMKHPIICRLIHFSNSSNINNFHDLRSLRFEAKSPNSRRTLHKPGVTIWMPPTLPHIRRTP

SEQ ID NO: 1028934 - protein, 122 aa, Homo sapiens
MLERPHILQRHTLVPTYILCQFTLSYPFVPGSNVCHSLIKSILRTIRTCAAGRSDYPVLDCHMKHPIICRLIHFSNSSNINNFHDLRSLRFEAKSPNSRRTLHKPGVTIWMPPTLPHIRRTP

SEQ ID NO: 1028935 - protein, 180 aa, Homo sapiens
MICCSALSPRIHLSFHRRWPDWHCISKLITRHRTTRHVLRCSSLPLCPINRSCICHHRRLHSLISPILRLHPRPNLRQNPFHYHIHRRKSNFLPTTLSRPIRNAPTLLGLPRCIHHMKHPIICRLIHFSNSSNINNFHDLRSLRFEAKSPNSRRTLHKPGVTIWMPPTLPHIRRTRIHKI

SEQ ID NO: 1028936 - protein, 180 aa, Homo sapiens; identical to SEQ ID NO: 1028935

SEQ ID NO: 1028937 - protein, 180 aa, Homo sapiens; identical to SEQ ID NO: 1028935

SEQ ID NO: 1028938 - protein, 137 aa, Homo sapiens
MGPCHTPLGPTRHLLYHLCRHTHHSAKLALIFYLSRPRNKHASFYSSSNQKNKPSFHRSCHQVFPHASNRIHNPSNSYPLQQYTLRTMNHNQYYQSILIINNHNGYSNKTRNSPPFTSESQRLPKATPLTSGLLLLT

SEQ ID NO: 1028939 - protein, 137 aa, Homo sapiens; identical to SEQ ID NO: 1028938

SEQ ID NO: 1028940 - protein, 137 aa, Homo sapiens; identical to SEQ ID NO: 1028938

SEQ ID NO: 1028941 - protein, 138 aa, Homo sapiens
RWVHAILPVGPTRHLLYHLCRHTHHSAKLALIFYLSRPRNKHASFYSSSNQKNKPSFHRSCHQVFPHASNRIHNPSNSYPLQQYTLRTMNHNQYYQSILIINNHNGYSNKTRNSPPFTSESQRLPKATPLTSGLLLLT

SEQ ID NO: 1028942 - protein, 158 aa, Homo sapiens
RSDPASRSPPLARSAGPALLRAQRVSAAVAAGAAVATLDLGKDFRFGLCSVSAVLLPAEAGPGSRASKDAAGSCGGQCALPRPGPSARRRRDQGGGGRGRDPTWRWPWIPEASPRMSTRHSPVLLTWGCTPHLGPGSSPGAGPVTWGPDLSPGGRTSH

SEQ ID NO: 1028943 - protein, 488 aa, Homo sapiens
MAGKGSSGRRPLLLGLLVAVATVHLVICPYTKVEESFNLQATHDLLYHWQDLEQYDHLEFPGVVPRTFLGPVVIAVFSSPAVYVLSLLEMSKFYSQLIVRGVLGLGVIFGLWTLQKEVRRHFGAMVATMFCWVTAMQFHLMFYCTRTLPNVLALPVVLLALAAWLRHEWARFIWLSAFAIIVFRVELCLFLGLLLLLALGNRKVSVVRALRHAVPAGILCLGLTVAVDSYFWRQLTWPEGKVLWYNTVLNKSSNWGTSPLLWYFYSALPRGLGCSLLFIPLGLVDRRTHAPTVLALGFMALYSLLPHKELRFIIYAFPMLNITAARGCSYLLNNYKKSWLYKAGSLLVIGHLVVNAAYSATALYVSHFNYPGGVAMQRLHQLVPPQTDVLLHIDVAAAQTGVSRFLQVNSAWRYDKREDVQPGTGMLAYTHILMEAAPGLLALYRDTHRVLASVVGTTGVSLNLTQLPPFNVHLQTKLVLLERLPRPS

SEQ ID NO: 1028944 - protein, 525 aa, Homo sapiens
MAGKGSSGRRPLLLGLLVAVATVHLVICPYTKVEESFNLQATHDLLYHWQDLEQYDHLEFPGVVPRTFLGPVVIAVFSSPAVYVLSLLEMSKFYSQLIVRGVLGLGVIFGLWTLQKEVRRHFGAMVATMFCWVTAMQFHLMFYCTRTLPNVLALPVVLLALAAWLRHEWARFIWLSAFAIIVFRVELCLFLGLLLLLALGNRKVSVVRALRHAVPAGILCLGLTVAVDSYFWRQLTWPEGKVLWYNTVLNKSSNWGTSPLLWYFYSALPRGLGCSLLFIPLGLVDRRTHAPTVLALGFMALYSLLPHKELRFIIYAFPMLNITAARGCSYLLNNYKKSWLYKAGSLLVIGHLVVNAAYSATALYVSHFNYPGGVAMQRLHQLVPPQTDVLLHIDVAAAQTGVSRFLQVNSAWRRIHTQHGPPRGHVRAPWGRGTGRCGGPGQDHQLSSHRYDKREDVQPGTGMLAYTHILMEAAPGLLALYRDTHRVLASVVGTTGVSLNLTQLPPFNVHLQTKLVLLERLPRPS

SEQ ID NO: 1028945 - protein, 488 aa, Homo sapiens; identical to SEQ ID NO: 1028943

SEQ ID NO: 1028946 - protein, 167 aa, Homo sapiens
  misc_feature (125)..(125): Xaa can be any naturally occurring amino acid
  misc_feature (137)..(137): Xaa can be any naturally occurring amino acid
AARHFFFFCFRDSLALSPRMECSGMIMAHCNVELLGSSNLPTLPNLFYMKAACSFCSDGGCIVAGCLLMAVFATKKLYFILSGLTVAVDSYFWRQLTWPEGKVLWYNTVLNKSSNWGVSFSVRAXGRWVGPAATSPXPPWAVEAAASPFSAAWLQGQDGAPPSHLLL

SEQ ID NO: 1028947 - protein, 488 aa, Homo sapiens; identical to SEQ ID NO: 1028943

SEQ ID NO: 1028948 - protein, 142 aa, Homo sapiens
MAGKGSSGRRPLLLGLLVAVATVHLVICPYTKVEESFNLQATHDLLYHWQDLEQYDHLEFPGVVPRTFLGPVVIAVFSSPAVYVLSLLEMSKFYSQLIVRGVLGLGVIFGLWTLQKEVRRHFGAMVATMFCWVTVAQTRCHS

SEQ ID NO: 1028949 - protein, 488 aa, Homo sapiens; identical to SEQ ID NO: 1028943

SEQ ID NO: 1028950 - protein, 212 aa, Homo sapiens
ILACRNMARASEAVSRILEEWHKAKVETMTLDLALLRSVQHFAEAFKAKNVPLHVLVCNAATFALPWSLTKDGLETTFQVNHLGHFYLVQLLQDVLCRSAPARVIVVSSESHRFTDINDSLGKLDFSRLSPTKNDYWAMLAYNRSKLCNILFSNELHRRLSPRGVTSNAVHPGNMMYSNIHRSWWVYTLLFTLARPFTKSMVSDCLVEGGHF

SEQ ID NO: 1028951 - protein, 195 aa, Homo sapiens
LARGVVAAGAPSLEMQNDAGEFVDLYVPRKCSASNRIIGAKDHGSIQMNVAEVDKVTRQGLMASLKLMLSAGAIRRMGEIKMIPFSDLADRPDCAIDRQEVRLWGSQFECHDVEMVLGSVSQKRRWIVKALVSVFPHVDSLQRYIFGTRARRKINRSICFGHSSFLVRLLYYIIKVGQLSMKEDTQNPLIPGGND

SEQ ID NO: 1028952 - protein, 223 aa, Homo sapiens
MTPAAKICIHYATLQDPWGRAQEPADEWAWNGRVTVRGVENSLLKGRSPSPPPSRLRSGQTLPACLAAAAGAHLAQPCQAQATDAREDSLSADAKEEIRAGLESSEGGGGPERPGARGQRQTTRLEECRPDDACSTWRAVYSLVLIPKAKPLTLLWAYFCFLLAALGVTAGAHRLDGSHRSYRAKLTLRIFLAVATPWLPEGHLRNGPGPPSHKKYSETDAEP

SEQ ID NO: 1028953 - protein, 108 aa, Homo sapiens
SEQLGNSTEYQALDSHKEYTTKIPRMHTSQQLCFYENNAAADLTGHGAQVVMQAMGGARNTDEVSLHSPAAHLQLCGPVVGDRCSSAFERNHPTPFFRVIFTAAVVNL

SEQ ID NO: 1028954 - protein, 403 aa, Homo sapiens
  misc_feature (6)..(6): Xaa can be any naturally occurring amino acid
  misc_feature (8)..(8): Xaa can be any naturally occurring amino acid
PPRRRXLXFSGPTPSAALVNRTLGNVLPVGTMPEGTIVCCLEEKPGDRGKLARASGNYATVISHNPETKKTRVKLPSGSKKVISSANRAVVGVVAGGGRIDKPILKAGRAYHKYKAKRNCWPRVRGVAMNPVEHPFGGGNHQHIGKPSTIRRDAPAGRKVGLIAARRTGRLRGTKTVQEKRTSAEGLNKVCVYAKKKQKTKENKKKKKKKAEKKKEKPKQKEEKRKKEKEEEEAERRTRGRTTHSQRGQTPPHGDNNRQRERPTLTQAEREGRAEKKKPQKTANTRNEATTHKAEENTEKPKKEEARHPATGGDNGAPTTHDRAEHQAAEGGATIDSHQTHSRGTRQTHHPQARRSIENTRDKHHSDGGAEEAHDTSNEGKNETQSKTGHRQKQSVTPAPHTS

SEQ ID NO: 1028955 - protein, 264 aa, Homo sapiens
  misc_feature (32)..(32): Xaa can be any naturally occurring amino acid
  misc_feature (40)..(41): Xaa can be any naturally occurring amino acid
  misc_feature (48)..(48): Xaa can be any naturally occurring amino acid
  misc_feature (50)..(50): Xaa can be any naturally occurring amino acid
  misc_feature (67)..(67): Xaa can be any naturally occurring amino acid
  misc_feature (69)..(69): Xaa can be any naturally occurring amino acid
  misc_feature (73)..(73): Xaa can be any naturally occurring amino acid
  misc_feature (76)..(77): Xaa can be any naturally occurring amino acid
  misc_feature (136)..(136): Xaa can be any naturally occurring amino acid
  misc_feature (141)..(141): Xaa can be any naturally occurring amino acid
  misc_feature (148)..(148): Xaa can be any naturally occurring amino acid
  misc_feature (153)..(153): Xaa can be any naturally occurring amino acid
  misc_feature (156)..(156): Xaa can be any naturally occurring amino acid
  misc_feature (178)..(178): Xaa can be any naturally occurring amino acid
  misc_feature (180)..(180): Xaa can be any naturally occurring amino acid
  misc_feature (191)..(192): Xaa can be any naturally occurring amino acid
  misc_feature (194)..(194): Xaa can be any naturally occurring amino acid
  misc_feature (196)..(196): Xaa can be any naturally occurring amino acid
  misc_feature (211)..(212): Xaa can be any naturally occurring amino acid
  misc_feature (254)..(254): Xaa can be any naturally occurring amino acid
MRASILLLFLLHSLGSPETSSPAGSNDTHFAXSRGISADXXGLADVLXVXTSKTILHRIYGHTPYCXQXSLFXLYXXYARPAFKMGLSIRPPPATTPTTALLAEEITFLEPEGSFTRVFLVSGLWEKTVAEFPDAXASLPXSPGFSSXHHTIXPSXMVPTGSTLPMLSWAFLPQYTNXPXSIPSAAINTSXXFXNXYGSRKTTYGEGRAAXXVVDEVLDDALDVAVPLSEIHGAQAAAFYGCFTCARNTDPAPXLCSRITRPMA

SEQ ID NO: 1028956 - protein, 259 aa, Homo sapiens
MGRVIRGQRKGAGSVFRAHVKHRKGAARLRAVDFAERHGYIKGIVKDIIHDPGRGAPLAKVVFRDPYRFKKRTELFIAAEGIHTGQFVYCGKKAQLNIGNVLPVGTMPEGTIVCCLEEKPGDRGKLARASGNYATVISHNPETKKTRVKLPSGSKKVISSANRAVVGVVAGGGRIDKPILKAGRAYHKYKAKRNCWPRVRGVAMNPVEHPFGGGNHQHIGKPSTIRRDAPAGRKVGLIAARRTGRLRGTKTVQEKRTSA

SEQ ID NO: 1028957 - protein, 300 aa, Homo sapiens
MWQYLPPSSSCEALLRPWTGPPESDAGAGCPRKRDPVAMGRVIRGQRKGAGSVFRAHVKHRKGAARLRAVDFAERHGYIKGIVKDIIHDPGRGAPLAKVVFRDPYRFKKRTELFIAAEGIHTGQFVYCGKKAQLNIGNVLPVGTMPEGTIVCCLEEKPGDRGKLARASGNYATVISHNPETKKTRVKLPSGSKKVISSANRAVVGVVAGGGRIDKPILKAGRAYHKYKAKRNCWPRVRGVAMNPVEHPFGGGNHQHIGKPSTIRRDAPAGRKVGLIAARRTGRLRGTKTVQEKRTSAEGL

SEQ ID NO: 1028958 - protein, 288 aa, Homo sapiens
MGRVIRGQRKGAGSVFRAHVKHRKGAARLRAVDFAERHGYIKGIVKDIIHDPGLLAAGPFCQKGFGVSLFPGGFHGNSGYLKEKDGIREDCFHFGPPEGGKFCNIGAKVLVANVTGPKKRSPRRQLVGNVLPVGTMPEGTIVCCLEEKPGDRGKLARASGNYATVISHNPETKKTRVKLPSGSKKVISSANRAVVGVVAGGGRIDKPILKAGRAYHKYKAKRNCWPRVRGVAMNPVEHPFGGGNHQHIGKPSTIRRDAPAGRKVGLIAARRTGRLRGTKTVQEKRTSA

SEQ ID NO: 1028959 - protein, 242 aa, Homo sapiens
MGRVIRGQRKGAGSVFRAHVKHRKGAARLRAVDFAERHGYIKGIVKDIIHDPGRGAPLAKVVFRDPYRFKKRTELFIAAEGIHTGQFVYCGKKAQLNRASGNYATVISHNPETKKTRVKLPSGSKKVISSANRAVVGVVAGGGRIDKPILKAGRAYHKYKAKRNCWPRVRGVAMNPVEHPFGGGNHQHIGKPSTIRRDAPAGRKVGLIAARRTGRLRGTKTVQEKRTSAEGLNKVCVYAKKK

SEQ ID NO: 1028960 - protein, 85 aa, Homo sapiens
  misc_feature (2)..(2): Xaa can be any naturally occurring amino acid
AXDSEDPNDLPKPPVFAGRRKSWHAPCYMLSTKTITSFVQDNKNKTNRLTHNKNNTAEAQLTDSFGEALHLGLAPQPGREQQKLP

SEQ ID NO: 1028961 - protein, 212 aa, Homo sapiens
MGRVIRGQRKGAGSVFRAHVKHRKGAARLRAVDFAERHGYIILEGAVSAKGIISTHCIPGGFGAAAGPCLLTGVATLPGESRYSSYTDSVRSLSQCAMRVVGEGPKRARDVSVVYRAGANSTRLRKRMRKLMWATYVRVTLRFVGPQIAHVTGYTKCRGGLGTGDVHEMALGDAHTGCDQKGLGAHWELIDGDTSEFAQPRMYSAHKRRHHE

SEQ ID NO: 1028962 - protein, 269 aa, Homo sapiens
MGRVIRGQRKGAGSVFRAHVKHRKGAARLRAVDFAERHGYIKGIVKDIIHDPGRGAPLAKVVFRDPYRFKKRTELFIAAEGIHTGQFVYCGKKAQLNIGNVLPVGTMPEGTIVCCLEEKPGDRGKLARASGNYATVISHNPETKKTRVKLPSGSKKVISSANRAVVGVVAGGGRIDKPILKAGRAYHKYKAKRNCWPRVRGVAMNPVEHPFGGGNHQQLERSTSGKCPVGRKGSKRRGMEPETTTGARNSAATGGSEHKKKIAARKNTG

SEQ ID NO: 1028963 - protein, 272 aa, Homo sapiens
MGRVIRGQRKGAGSVFRAHVKHRKGAARLRAVDFAERHGYIKGIVKDIIHDPGRGAPLAKVVFRDPYRFKKRTELFIAAEGIHTGQFVYCGKKAQLNIGNVLPVGTMPEGTIVCCLEEKPGDRGKLARASGNYATVISHNPETKKTRVKLPSGSKKVISSANRAVVGVVAGGGRIDKPILKAGRAYHKYKAKRNCWPRVRGVAMNPVEHPFGGGNHQHIGKPSTIRRDAPAGRKVGLIAARRTGRLRGTKTVQEKRTSAEGLNKVCVYAKKK

SEQ ID NO: 1028964 - protein, 304 aa, Homo sapiens
  misc_feature (7)..(7): Xaa can be any naturally occurring amino acid
ARGEEYXSGGRGGSGAGSRKAGLAGVPGRPRANRESPPGPVAMGRVIRGQRKGAGSVFRAHVKHRKGAARLRAVDFAERHGYIKGIVKDIIHDPGRGAPLAKVVFRDPYRFKKRTELFIAAEGIHTGQFVYCGKKAQLNIGNVLPVGTMPEGTIVCCLEEKPGDRGKLARASGNYATVISHNPETKKTRVKLPSGSKKVISSANRAVVGVVAGGGRIDKPILKAGRAYHKYKAKRNCWPRVRGVAMNPVEHPFGGGNHQHIGKPSTIRRDAPAGRKVGLIAARRTGRLRGTKTVQEKRTSAEGL

SEQ ID NO: 1028965 - protein, 173 aa, Homo sapiens
MGRVIRGQRKGAGSVFRAHVKHRKGAARLRAVDFAERHGYIRASGNYATVISHNPETKKTRVKLPSGSKKVISSANRAVVGVVAGGGRIDKPILKAGRAYHKYKAKRNCWPRVRGVAMNPVEHPFGGGNHQHIGKPSTIRRDAPAGRKVGLIAARRTGRLRGTKTVQEKRTSA

SEQ ID NO: 1028966 - protein, 255 aa, Homo sapiens
MGRVIRGQRKGAGSVFRAHVKHRKGAVVACCADVIICLKRDGVHQGASVIGIIQSTEPGLAGRAPLQSQTGVVLSLGESREYGACTRKVVIGSLVSYGADTKGVDFNNGWPCFSSYFGWARVHEAPMSPSYIARMCDLHASVVGQLDCPRRKVLPESARLTGLVDGEGIGPLGGNTVAPKGLGRSGRQSSDVGQLFSVPNAGYNTCSQIHRPLKEALGWKRTTRVGSNKVRSPHAERFAEQGRGGLKFFHTPMCP

SEQ ID NO: 1028967 - protein, 207 aa, Homo sapiens
MGRVIRGQRKGAGSVFRAHVKHRKGAARLRAVDFAERHGYIRASSKDKSSTYLVDGECCSLRLKAGLPGIRIAFDMKATIFKRLASSSVPVGGYQCLEWYESWCCPWKGERAGEDTVSDELVPGHSRGYLVPTGNISRTNAEIQERSRVNCCPPAPSKVISSDATVACALWSLDGPGSDAPELSKPPSCKGLAGTVTRKDFKRSRRN

SEQ ID NO: 1028968 - protein, 362 aa, Homo sapiens
SGIRGCAELKTDCGEPSGRELGRTLGPCRGGGQARCQPRHRRDALLPPQGGRMPPPAKEGGRKGPRERSGKSAPGTAQGEERAKGAPATEPPKPGWALTPQGLAAMLPAQRHRHLLFGDLLEDVGAAASTFPCGSVEPGYRMPDPRPWTQSLELPAERQNRLLGVLKAAEARGRVRALRLRYTRMRAEEIALLIQRQKSARAAIRLELFLPPQLKPARIPDPLDRQEVQTSPGRGGERGGALPASAHAGPQPLSPAAEARGDHPGGERGWHKLPGVTATESVRRAPAFPHKRYNSPKNTLNPSSPILHPSLHSPNKIQPTIIIKPLLPYHTTHAAASSQFLISPGDISIIHLTDTSHNTPLL

SEQ ID NO: 1028969 - protein, 333 aa, Homo sapiens
SGIRGCAELKTDCGEPSGRELGRTLGPCRGGGQARCQPRHRRDALLPPQGGRMPPPAKEGGRKGPRERSGKSAPGTAQGEERAKGAPATEPPKPGWALTPQGLAAMLPAQRHRHLLFGDLLEDVGAAASTFPCGSVEPGYRMPDPRPWTQSLELPAERQNRLLGVLKAAEARGRVRALRLRYTRMRAEEIALLIQRQKSARAAIRLELFLPPQLKPARIPDPLDRQERRRVETILEENVDGTIFPGLTATESVRRAPAFPHKRYNSPKNTLNPSSPILHPSLHSPNKIQPTIIIKPLLPYHTTHAAASSQFLISPGDISIIHLTDTSHNTPLL

SEQ ID NO: 1028970 - protein, 88 aa, Homo sapiens
RCCSGVLEDPEHDPSMHACPAGRRVFTTCGACLPVQVPSTREHRADLQISLSWSLVDFRGSSSTTSIAMHCLAAVDVYSPTCPVHAHP

SEQ ID NO: 1028971 - protein, 88 aa, Homo sapiens; identical to SEQ ID NO: 1028970

SEQ ID NO: 1028972 - protein, 77 aa, Homo sapiens
TPHVPTTQFMAPARRVFTTAVHASLYKFLGHVSSVLTSQSRKHGAWFRGSSSTTSIAMHCLAAVDVYSPTCPVHAHP

SEQ ID NO: 1028973 - protein, 88 aa, Homo sapiens; identical to SEQ ID NO: 1028970

SEQ ID NO: 1028974 - protein, 162 aa, Homo sapiens
MEPGRRVFTTGGACLPVQVPSTREHRADLQISLSWSLVDFRGSSSTTSIAMHCLAAPHLFTTAMHTFLYMLLEYMSSALMTQACIHACRGRRVFTYVPGACASLVYIVPVQIYSRAIQLLTLPISLTTIILLIDKWSHGQTCILPIVVRCMPCHMYKFRRHQ

SEQ ID NO: 1028975 - protein, 85 aa, Homo sapiens
IASDAGSRSTCIHLRARCMRIPSVHSSCADLQLSNPVADSPNIVKNNHTAYRQMEPWSDVYSTHRRQVHAMPPVQVPSTSVSIQC

SEQ ID NO: 1028976 - protein, 88 aa, Homo sapiens; identical to SEQ ID NO: 1028970

SEQ ID NO: 1028977 - protein, 88 aa, Homo sapiens; identical to SEQ ID NO: 1028970

SEQ ID NO: 1028978 - protein, 180 aa, Homo sapiens
RCCSGVLEDPEHDPSMHACPAGRRVFTTCGACLPVQVPSTREHRADLQISLSWSLVDFRGSSSTTSIAMHCLAAPHLFTTAMHTFLYMLLEYMSSALMTQACIHACRGRRVFTYVPGACASLVYIVPVQIYSRAIQLLTLPISLTTIILLIDKWSHGQTCILPIVVRCMPCHMYKFRRHQ

SEQ ID NO: 1028979 - protein, 107 aa, Homo sapiens
STTPGQTSRDKLRQHGRTALTTRDRKHGAWSTCIHLRARCMRIPSVHSSCADLQLSNPVADSPNIVKNNHTAYRQMEPWSDVYSTHRRQVHAMPPVQVPSTSVSIQC

SEQ ID NO: 1028980 - protein, 95 aa, Homo sapiens
LEDPEHGASHRTSVSVSWSTCIHLRARCMRIPSVHSSCADLQLSNPVADSPNIVKNNHTAYRQMEPWSDVYSTHRRQVHAMPPVQVPSTSVSIQC

SEQ ID NO: 1028981 - protein, 74 aa, Homo sapiens
PPRSNHPIHASSSTCIHHCGAYLPVQVPWTRELRADLPITQTWSLVDVYSPLAVHASLYKFRRHVSTVLTSKYR

SEQ ID NO: 1028982 - protein, 283 aa, Homo sapiens
  misc_feature (6)..(6): Xaa can be any naturally occurring amino acid
VESSKXRVQMKLCGTEAGASTYLPKQKPSKQPCKQKMLFLRVDVADTSGHVWAKAPGFSPHPLNWVPENGSSLNIWNSSTNKKGLIETNVSVLSLCFPELEYQHVLYLPTAPEEGPFTFPNGEAVEHGEESKDRTIMLMGVSSQKISLRLKRAVAHKATQTESQPWIGSEGPSGPFVLSSPRKTAQDTLYVLPSPTSPCPSPVLVRKRAFVKWENKDSLIKSKEELRHLRLPTYQELEQEINTLKADNDALKIQLKYAQKKIESLQLEKSNHVLAQMEQGDCS

SEQ ID NO: 1028983 - protein, 331 aa, Homo sapiens
ETTYLKPTFCDNCAGFLWGVIKQGYRCKDIRILLLMLRFTDKGYIKSVSSGLHQVRRMLASLGMLSVLAPEDRTDMCDKKALHEFGCETPGEERKVKDFLTQDVLSTDCGMNCHKQCKDLVVFECKKRAKNPVAPTENNTSVGPVSNLCSLGAKDLLHAPEEGPFTFPNGEAVEHGEESKDRTIMLMGVSSQKISLRLKRAVAHKATQTESQPWIGSEGPSGPFVLSSPRKTAQDTLYVLPSPTSPCPSPVLVRKRAFVKWENKDSLIKSKEELRHLRLPTYQELEQEINTLKADNDALKIQLKYAQKKIESLQLEKSNHVLAQMEQGDCS

SEQ ID NO: 1028984 - protein, 215 aa, Homo sapiens
  misc_feature (104)..(104): Xaa can be any naturally occurring amino acid
LIEPARVDTPWIRSLIDRDVSRTDRTNKFYEGPENPGLGLLNDILLTYCMYHFDLGYVQGMSDLLSPILYVIQNEVDAFWCFCGFMELVQGNFEESQETMKRQXGRLLLLLRVLDPLLCDFLDSQDSGSLCFCFRWLLIWFKREFPFPDVLRLWEVLWTGLPGPNLHLLVACAILDMERDTLMLCGFGSNEILKHEAQSGRSGGGGGMPTELNNT

SEQ ID NO: 1028985 - protein, 94 aa, Homo sapiens
MDSQDSGSLCFCFRWLLIWFKREFPFPDVLRLWEVLWTGLPGPNLHLLVACAILDMERDTLMLCGFGSNEILKHEAQSGRSGGGGGMPTELNNT

SEQ ID NO: 1028986 - protein, 172 aa, Homo sapiens
  misc_feature (137)..(137): Xaa can be any naturally occurring amino acid
  misc_feature (140)..(140): Xaa can be any naturally occurring amino acid
GLQTQLVPLSSPVASLDNFSNLFGADLHVEKGQVPSSDQHLSQRCHFPKAPPWSVCKALLPRSNPATSLSGTSKPNSGGDFNSVTKSQPHCELNSFVLTGHSPVLWMMSEHDLADVVQIAVEDLSPDHPGTELWDIXLEXHVVTDEDEPALKRQRLEINCQVPSIKSFLYSI

SEQ ID NO: 1028987 - protein, 137 aa, Homo sapiens
GLQTQLVPLSSPVASLDNFSNLFGADLHVEKGQVPSSDQHLSQRCHFPKAPPWSVCKALLPRSNPATSLSGTSKPNSGGDFNSVTKSQPHCELNSFVLTGHSPVLWMMSEHDLADVVQIAVEDLSPDHPGTELWDSR

SEQ ID NO: 1028988 - protein, 128 aa, Homo sapiens
  misc_feature (5)..(5): Xaa can be any naturally occurring amino acid
  misc_feature (39)..(39): Xaa can be any naturally occurring amino acid
  misc_feature (47)..(47): Xaa can be any naturally occurring amino acid
  misc_feature (56)..(56): Xaa can be any naturally occurring amino acid
  misc_feature (60)..(61): Xaa can be any naturally occurring amino acid
  misc_feature (78)..(78): Xaa can be any naturally occurring amino acid
SSSDXHPQISRVGACRCFLFWRAFRFLILLLWEKESFPXMPLRLWGXPSFPLPLTXLGVXXALGLGLGFFFSFLYGLXFLTILYDFFFSNCHSHYRHHLPLGNLHRCRNLSPGMVPHPPLLSSSRKRI

SEQ ID NO: 1028989 - protein, 152 aa, Homo sapiens
  misc_feature (5)..(5): Xaa can be any naturally occurring amino acid
  misc_feature (39)..(39): Xaa can be any naturally occurring amino acid
  misc_feature (47)..(47): Xaa can be any naturally occurring amino acid
  misc_feature (56)..(56): Xaa can be any naturally occurring amino acid
  misc_feature (60)..(61): Xaa can be any naturally occurring amino acid
  misc_feature (78)..(78): Xaa can be any naturally occurring amino acid
SSSDXHPQISRVGACRCFLFWRAFRFLILLLWEKESFPXMPLRLWGXPSFPLPLTXLGVXXALGLGLGFFFSFLYGLXFLTILYDFFFSNCHSHYRHHLPLGNLHRCRNLSPGMVPHPPLLVLPSLPTSSMSISLCLEAALDAACRCWRTFL

SEQ ID NO: 1028990 - protein, 55 aa, Homo sapiens
  misc_feature (26)..(26): Xaa can be any naturally occurring amino acid
RAEPGTLEVSHRYPQRRHFCPNPVKXTSAFSVVFSIVIPFLYVSGHSLARTLLLY

SEQ ID NO: 1028991 - protein, 138 aa, Homo sapiens
  misc_feature (3)..(3): Xaa can be any naturally occurring amino acid
RPXDTACEKPDRKGILPLSTTLSPQRFFFLGLILTAVMACPLEKALDVMVSTFHKYSGKEGDKFKLNKSELKELLTRELPSFLGKRTDEAAFQKLMSNLDSNRDNEVDFQEYCVFLSCIAMMCNEFFEGFPDKQPRKK

SEQ ID NO: 1028992 - protein, 138 aa, Homo sapiens; identical to SEQ ID NO: 1028991
  misc_feature (3)..(3): Xaa can be any naturally occurring amino acid

SEQ ID NO: 1028993 - protein, 138 aa, Homo sapiens; identical to SEQ ID NO: 1028991
  misc_feature (3)..(3): Xaa can be any naturally occurring amino acid

SEQ ID NO: 1028994 - protein, 113 aa, Homo sapiens
  misc_feature (3)..(3): Xaa can be any naturally occurring amino acid
RPXDTACEKPDRKGILPLSTTLSPQRFFFLGLILTAVMACPLEKALDVMVSTFHKYSGKEGDKFKLNKSELKELLTRELPSFLGKRTDEATWTATGTTRWTSKSTVSSCPASP

SEQ ID NO: 1028995 - protein, 104 aa, Homo sapiens
MLKASVDRIPPEAENILFIEMFTRRQVAIQNRVASNIGISQSTFSVKVLNLFSRSRRKTNKRKSKHSAMLRNKETRHRMFIGLLNTTRKLGRRGREFSSSSWRP

SEQ ID NO: 1028996 - protein, 311 aa, Homo sapiens
RVARTRLPWLLDADLRGRRAEWGASVCWTSTMQRLELGFGPVAATRGSGCGLSAVGPTTVLCPIAHAMCGVSPCHEPGGWNVFHLLMMLLLLVASDQPVPNEKSPCQPNPCHGAAPCRVLPEGGAQCECPLGREGTFCQTASGQDGSGPFLADFNGFSHLELRGLHTFARDLGEKMALEVRVPGTRPQRPPALTNGAEDGRQGGLRVAGHCGDLRLEFPLRPGPGGSGHQEQGRQSPWEPGPGSHWRRNGAWCLRVGRGPRVWGSPGSAHRPKPEGSRLRRGRSDPRSWPCCCRVSGFDGANHGGRRPWRY

SEQ ID NO: 1028997 - protein, 225 aa, Homo sapiens
MLEWLFIKFTGARLVELSEKLMKEAFVSNLNGTTVLEITQGWCFPAFCILCRGFLIIFSQYLCSFSPTWKTRFLTDFVVLIVPMVATLTIWASFILLELLGVIIFGAGLLYQIYRRRTCYARLPFLKILEKFLNISLESEYNPAISCFRVITSAFTAIAILAVDFPLFPRRFAKTELYGTGAMDFEQVVLWFWGCNGLSRGQEEKIYGRGQIALLYKLNVLWFGH

SEQ ID NO: 1028998 - protein, 277 aa, Homo sapiens
MTVDTKAAGKGRSDVHQWCIALMDSRGVTVARGARNDATGTFDIFYTGPPAGLIRSSVMRFGVASTCPISPFQVTGLWLGTYSPRVQPPLRSQLRGPDRYTYAQGGQPDLRAPDRPLVGCQMGLDVTSLRPFDLVIPFTIKKGEITGEVLAALHGRGVRRARTYLADKQKIGSRDRGGMHPARLACTRWTSGYDNMHIPGSPLQFYVDYVNCGHVTAYGPGLTHGVVNKPATFTVKTKDAGEGGLSLAIEGPSKQKSGALTTGWDMQRVLPACACRG

SEQ ID NO: 1028999 - protein, 267 aa, Homo sapiens
MLVPPVDGALLLGASSLSGRCWAGSLWLFKDPCAAPNEGFCSAGVQTEAGVADLTWVGERGILVASDSGAVELWELDENETLIVSKFCKYEHDDIVSTVSVLSSGTQAVSGSKDICIKGLGPCSAGGTEFIPSSCCSGHLCCCLSSTRTLCYFHAARTIEFTLGYRCTKPASQIGCSGPGIHHTSLVGYSGKWRCGLVMKWAGPVTQITLGWGHESQLMGVFPRAYWPQNRQWANYDLRTQLESGLILNGKVQDTPVVYTALSGVLA

SEQ ID NO: 1029000 - protein, 302 aa, Homo sapiens
MRKETPLIWEFGSAESRGLPANDRAYLCHVELGGIALDTRVDGALLLGASSLSGRCWAGSLWLFKDPCAAPNEGFCSAGVQTEAGVADLTWVGERGILVASDSGAVELWELDENETLIVSKFCKYEHDDIVSTVSVLSSGTQAVSGSKDICIKGLGPCSAGGTEFIPSSCCSGHLCCCLSSTRTLCYFHAARTIEFTLGYRCTKPASQIGCSGPGIHHTSLVGYSGKWRCGLVMKWAGPVTQITLGWGHESQLMGVFPRAYWPQNRQWANYDLRTQLESGLILNGKVQDTPVVYTALSGVLA

SEQ ID NO: 1029001 - protein, 367 aa, Homo sapiens
SQVTLRAYRMRATAGKQDGAIEAFSREVELRFPRERGGGSEVHHVGFAAGAESPAGVSLSLGWSWNRGDAEGNPTCPSVPRGPGVESSPKCARLHGTAVEAARYRSDGALLLGASSLSGRCWAGSLWLFKDPCAAPNEGFCSAGVQTEAGVADLTWVGERGILVASDSGAVELWELDENETLIVSKFCKYEHDDIVSTVSVLSSGTQAVSGSKDICIKGLGPCSAGGTEFIPSSCCSGHLCCCLSSTRTLCYFHAARTIEFTLGYRCTKPASQIGCSGPGIHHTSLVGYSGKWRCGLVMKWAGPVTQITLGWGHESQLMGVFPRAYWPQNRQWANYDLRTQLESGLILNGKVQDTPVVYTALSGVLA

SEQ ID NO: 1029002 - protein, 259 aa, Homo sapiens
  misc_feature (232)..(232): Xaa can be any naturally occurring amino acid
  misc_feature (259)..(259): Xaa can be any naturally occurring amino acid
SQVTLRAYRMRATAGKQDGAIEAFSREVELRFPRERGGGSEVHHVGFAAGAESPAGVSLSLGWSWNRGDAEGNPTCPSVPRGPGVESSPKCARLHGTAVEAARYRSDGALLLGASSLSGRCWAGSLWLFKDPCAAPNEGFCSAGVQTEAGVADLTWVGERGILVASDSGAVELWELDENETLIVSKFCKYEHDDIVSTVSVLSSGTQAVSGSKDICIKGLGPCSAGGTEFIXTLFFFFFFFFFKRRESESAGGRQHAHX

SEQ ID NO: 1029003 - protein, 292 aa, Homo sapiens
MRKETPRAYARGRWRNAMTVVRSWRLRVSGADGALLLGASSLSGRCWAGSLWLFKDPCAAPNEGFCSAGVQTEAGVADLTWVGERGILVASDSGAVELWELDENETLIVSKFCKYEHDDIVSTVSVLSSGTQAVSGSKDICIKGLGPCSAGGTEFIPSSCCSGHLCCCLSSTRTLCYFHAARTIEFTLGYRCTKPASQIGCSGPGIHHTSLVGYSGKWRCGLVMKWAGPVTQITLGWGHESQLMGVFPRAYWPQNRQWANYDLRTQLESGLILNGKVQDTPVVYTALSGVLA

SEQ ID NO: 1029004 - protein, 35 aa, Homo sapiens
WRRRNSHHPADERLHHEVVLEVADGIADLGPTLVD

SEQ ID NO: 1029005 - protein, 261 aa, Homo sapiens
MAAVGRVGSFGSSPPGLSSTYTGGPLGKEIASGNGGAAAGTTRTGRTFGACILSEVSTRSRSKLPAGKNRATAGLKMEPGKNKLNSDDSNIPGDISRTSFQDKGKQALGNYSATLTLCQCLQDQGMNQNKDVTVRILGWSTYIHKGPPLNFPPGMPLSLKDTLGYCVVVDIVKGLWTCFVSFFYTNMGKCGLENMADKREKSLLRGTGHNMEQKLVRDFQELCESQEEELPGFSPEKKYCVARRQRMTVYVYLWVRIHLAH

SEQ ID NO: 1029006 - protein, 224 aa, Homo sapiens
MATVTATTKVPEIRDVTRIERIGAHSHIRGLGLDDALEPRQASQGMVGQLAARRAAGVVLEMIREGKIAGRAVLIAGQPGTGKTAIVSTIPNYSEKDTKQDPPPSGCEESKIVEMSEDAYTVLDPTLGLETYTALQPSSSSKLHRLGCARTTHRVTAKDGQWLRHDTFRDARGSLLPPSSPMRNESIRGHPHGKHPNWQREKRRGHSPVTHPFQQTTYTKSATA

SEQ ID NO: 1029007 - protein, 351 aa, Homo sapiens
MATVTATTKVPEIRDVTRIERIGAHSHIRGLGLDDALEPRQASQGMVGQLAARRAAGVVLEMIREGKIAGRAVLIAGQPGTGKTAIAMGMAQALGPDTPLHRPSPAVKSSPMEMSKTEALTQAFRRSIGVRIKEEDGDHRKGRVVEIQIDRQPAGTGSKVAQTDPSRPQPCETIYQLGTNMIESLSQGPGVPGPGTVITIDKGARCQISKLGLLLHTPPADYKAMGSQTKFVQCPDGELPEYAKEGGRTTVSPGTEIGRSFNCAPPGLSWRLLLQGDTRGTIQVRTSREQINAKVDLSGPRKGQAGRITPLECWSSGRVPCWTLKTSPFLKRARGSSCGRPGSWASGDSAN

SEQ ID NO: 1029008 - protein, 136 aa, Homo sapiens
IVRLQLDYRTDLPSPRQGSQECQRVSLPIRDVVLGGLITHVRLDARRECPEGDRLIIGDVTCLPIQCPVLGELVCRQDVSIDHVLHKGEVHQVLPISHHELHLAVPGCLDERWVPTAGPLGRKCHEGGWLWFGHSS

SEQ ID NO: 1029009 - protein, 121 aa, Homo sapiens
MAASSATPVPAESDCAGQMLVSAVHGLYFGGAAAVAEPDHLMGSGHHGRANSGLGGVPASRRGLGSRIYARLFDAIRWTNPRRTYSAIWTGAWPSSVHAPATERPCGVGPLSCRSQVEVWP

SEQ ID NO: 1029010 - protein, 170 aa, Homo sapiens
MAPKRAKRRTVAEGGSSSVFSMFDQTQIQEFKEAFTVIDQNRDGIIDKEDLRDTFAAMGRLNVKNEELDAMMKEASGPINFTVFLTMFGEKLKGADPEDVITGAFKVLDPEGKGTIKKKFLEELLTTQCDRFSQEEIKNMWAAFPPDVGGNVDYKNICYVITHGDAKDQE

SEQ ID NO: 1029011 - protein, 67 aa, Homo sapiens
KGTRNPIATPLVSPLSSLEELLTTQCDRFSQEEIKNMWAAFPPDVGGNVDYKNICYVITHGDAKDQE

SEQ ID NO: 1029012 - protein, 168 aa, Homo sapiens
  misc_feature (165)..(165): Xaa can be any naturally occurring amino acid
  misc_feature (168)..(168): Xaa can be any naturally occurring amino acid
MAPKRAKRRTVEGGSSSVFSMFDQTQIQEFKEAFTVIDQNRDGIIDKEDLRDTFAAMGRLNVKNEELDAMMKEASGPINFTVFLTMFGEKLKGADPEDVITGAFKVLDPEGKGTIKKKFLEELLTTQCDRFSQEEIKNMWAAFPPDVGGNVDYKNILAWFRESQXAKX

SEQ ID NO: 1029013 - protein, 153 aa, Homo sapiens
MENRLCDGLKDPINVKNEELDAMMKEASGPINFTVFLTMFGEKLKGELECPGSKAPAAFSQTLQGPISFMCPLTPTGADPEDVITGAFKVLDPEGKGTIKKKFLEELLTTQCDRFSQEEIKNMWAAFPPDVGGNVDYKNICYVITHGDAKDQE

SEQ ID NO: 1029014 - protein, 169 aa, Homo sapiens
MAPKRAKRRTVEGGSSSVFSMFDQTQIQEFKEAFTVIDQNRDGIIDKEDLRDTFAAMGRLNVKNEELDAMMKEASGPINFTVFLTMFGEKLKGADPEDVITGAFKVLDPEGKGTIKKKFLEELLTTQCDRFSQEEIKNMWAAFPPDVGGNVDYKNICYVITHGDAKDQE

SEQ ID NO: 1029015 - protein, 170 aa, Homo sapiens; identical to SEQ ID NO: 1029010

SEQ ID NO: 1029016 - protein, 257 aa, Homo sapiens
  misc_feature (248)..(248): Xaa can be any naturally occurring amino acid
MPGMMEKGPELLGKNRSANGSAKSPAGGGGSGASSTNGGLHYSEPESGCSSDDEHDVGMRVGAEYQARIPEFDPGATKYTDKDNGGMLVWSPYHSIPDAKLDEYIAIAKEKHGYNVEQALGMLFWHKHNIEKSLADLPNFTPFPDEWTVEDKVLFEQAFSFHGKSFHRIQQMLPDKTIASLVKYYYSWKKTRSRTSLMDRQARKLANRHNQGDSDDDVEETHPMDGNDSDYDPKKEAKKEGNTGQPVXTSQNGLGKK

SEQ ID NO: 1029017 - protein, 174 aa, Homo sapiens
MPGMMEKGPELLGKNRSANGSAKSPAGGGGSGASSTNGGLHYSEPESGCSSDDEHDVGMRVGAEYQARIPEFDPGATKYTDKDNGGMLVWSPYHSIPDAKLDEYIAIAKEKHGYNVEQALGMLFWHKHNIEKSLADLPNFTPFPDEWTVEDKVLFEQAFSFHGKSFHRIQQMVW

SEQ ID NO: 1029018 - protein, 199 aa, Homo sapiens
  misc_feature (190)..(190): Xaa can be any naturally occurring amino acid
MRVGAEYQARIPEFDPGATKYTDKDNGGMLVWSPYHSIPDAKLDEYIAIAKEKHGYNVEQALGMLFWHKHNIEKSLADLPNFTPFPDEWTVEDKVLFEQAFSFHGKSFHRIQQMLPDKTIASLVKYYYSWKKTRSRTSLMDRQARKLANRHNQGDSDDDVEETHPMDGNDSDYDPKKEAKKEGNTGQPVXTSQNGLGKK

SEQ ID NO: 1029019 - protein, 257 aa, Homo sapiens; identical to SEQ ID NO: 1029016
  misc_feature (248)..(248): Xaa can be any naturally occurring amino acid

SEQ ID NO: 1029020 - protein, 290 aa, Homo sapiens
  misc_feature (281)..(281): Xaa can be any naturally occurring amino acid
MPGMMEKGPELLGKNRSANGSAKSPAGGGGSGASSTNGGLHYSEPESGCSSDDEHDVGMRVGAEYQARIPEFDPGVETRSCYVSQAGLKLRGSSHPPSLAPKVLLIIGATKYTDKDNGGMLVWSPYHSIPDAKLDEYIAIAKEKHGYNVEQALGMLFWHKHNIEKSLADLPNFTPFPDEWTVEDKVLFEQAFSFHGKSFHRIQQMLPDKTIASLVKYYYSWKKTRSRTSLMDRQARKLANRHNQGDSDDDVEETHPMDGNDSDYDPKKEAKKEGNTGQPVXTSQNGLGKK

SEQ ID NO: 1029021 - protein, 119 aa, Homo sapiens
MPGMMEKGPELLGKNRSANGSAKSPAGGGGSGASSTNGGLHYSEPESGCSSDDEHDVGMRVGAEYQARIPEFDPGSPAVTRFQPVQGLGESSAYGGALAGASRSGARFLLPTLPETLLS

SEQ ID NO: 1029022 - protein, 95 aa, Homo sapiens
RHEGGRHTSLASQLWEVRPQDSGCSCQGDIFSPTSQVPASSANPACGLPVYFSPNRLPGGHEISACAGIGREFRIWRRPCWSLSEWSAFPSPHPA

SEQ ID NO: 1029023 - protein, 119 aa, Homo sapiens; identical to SEQ ID NO: 1029021

SEQ ID NO: 1029024 - protein, 217 aa, Homo sapiens
SVRFSSLVTSPQASSDSPPGFTSVIASPKITSHSTPSFTSSITTTETTSHSTPSFTSSITTTETTSHSTPSFTSSITTTETTSHSTPSFTSPPPRPPHTVLPASLLQSPPLRPPHMETTSRSSPSFTSLITITGSTSHSTPSFTSSITITETTSHSTPSITSSVTTAERTSHSTPSYAFSIATSETPSHTVPSFTSLITTTESTSHSRPTNLASLIT

SEQ ID NO: 1029025 - protein, 147 aa, Homo sapiens
SVRFSSLVTSPQASSESPPGFTSVIASPKITSHSTPSFTSSITTTETTSHSTPSFTSSITTTETTSHSTPSFTSSITTTETTSHSTPSFTSSITTTETTSHSTPSFTSSITTTETTSHSTPSFTSSDHHHRDHLTQYSQLHFFDHHL

SEQ ID NO: 1029026 - protein, 1104 aa, Homo sapiens
LSTTPVASSEASTLSTSPVDTSTPVTNSSPTNSSPTTAEVTSMPTSTAGEGSTPLTNMPVSTTPVASSEASTLSTTPVDSNTFVTSSSQASSSPATLQVTTMRMSTPSEGSSSLTTMLLSSTYVTSSEASTPSTPSVDRSTPVTTSTQSNSTPTPPEVITLPMSTPSEVSTPLTIMPVSTTSVTISEAGTASTLPVDTSTPVITSTQVSSSPVTPEGTTMPIWTLSEGSIPITIMHVSTTRVTSSEGSTLSTPSVVTSTPVTTSTEAISSSATLDSTTMSVSMPMEISTLGTTILVSTTPVTRFPESSTPSIPSVYTSMSMTTASEGSSSPTTLEGTTTMPMSTTSERSTLLTTVLISPISVMSPSEASTLSTPPGDTSTPLLTSTKAGSFSIPAEVTTIRISITSERSTPLTTLLVSTTLPTSFPGASIASTPPLDTSTTFTPSTDTASTPTIPVATTISVSVITEGSTPGTTIFIPSTPVTSSTADVFPATTGAVSTPVITSTELNTPSTSSSSTTTSFSTTKEFTTPAMTTAAPLTYVTMSTAPSTPRTTSRGCTTSASTLSATSTPHTSTSVTTRPVTPSSESSRPSTITSHTIPPTFPPAHSSTPPTTSASSTTVNPEAVTTMTTRTKPSTRTTSFPTVTTTAVPTNTTIKSNPTSTPTVPRTTTCFGDGCQNTASRCKNGGTWDGLKCQCPNLYYGELCEEVVSSIDIGPPETISAQMELTVTVTSVKFTEELKNHSSQEFQEFKQTFTEQMNIVYSGIPEYVGVNITKLRLGSVVVEHDVLLRTKYTPEYKTVLDNATEVVKEKITKVTTQQIMINDICSDMMCFNTTGTQVQNITVTQYDPEEDCRKMAKEYGDYFVVEYRDQKPYCISPCEPGFSVSKNCSLGKCQMSLSGPQCLCVTTETHWYSGETCNQGTQKSLVYGLVGAGVVLMLIILVALLMLVFRSKREVKRQKYRLSQLYKWQEEDSGPAPGTFQNIGFDICQDDDSIHLESIYSNFQPSLRHIDPETTDPNSEASGNDDIILRHGAEKSGSEEIPVRLSLVEHFPIESLPWELNVPIVSTGNKPRTYQGERGETAVLGDSQIETRGRSNGLVMISG

SEQ ID NO: 1029027 - protein, 1013 aa, Homo sapiens
MVTTETTSHSTPSFTSSITTTETTSHSTPSFTSSITTTETTSHSTPSFTSSITTTETTSHSTPSFTSSITTTETTSHSTPSFTSSITTTETTSHSTPSFTSSITTTETTSHSTPSFTSSITTTETTSHSTPSLSSSTIYSTVSTSTTAITSHFTTSETAVTPTPVTPSSLSTDIPTTSLRTLTPLSLNTSTSLTTTTDFPSIPTDISTLPTRTHIISSSPSIQSTETSSLVGTTSPTMSTVRMTLRITENTPISSFSTSIVVIPETPTQTPPVLTSATGTQTSPAPTTVTFGSTDSSTSTLHTLTPSTALSTIVSTSQVPIPSTHSSTLQTTPSTPSLQTSLTSTSEFTTESFTRGSTSTNAILTSFSTIIWSSTPTIIMSSSPSSASITPVFSTTIHSVPSSPYIFSTENVGSASITGFPSLSSSATTSTSSTSSSLTTALTEITPFSYISLPSTTPCPGTITITIVPASPTDPCVEMDPSTEATSPPTTPLTVFPFTTEMVTCPTSISIQTTLTTYMDTSSMMPESESSISPNASSSTGTGTVPTNTVFTSTRLPTSETWLSNSSVIPLPLPGVSTIPLTMKPSSSLPTILRTSSKSTHPSPPTTRTSETPVATTQTPTTLTSRRTTRITSQMTTQSTLTTTAGTCDNGGTWEQGQCACLPGFSGDRCQLQTRCQNGGQWDGLKCQCPSTFYGSSCEFAVEQVDLDVVETEVGMEVSVDQQFSPDLNDNTSQAYRDFNKTFWNQMQKIFADMQGFTFKGVEILSLRNGSIVVDYLVLLEMPFSPQLESEYEQVKTTLKEGLQNASQDVNSCQDSQTLCFKPDSIKVNNNSKTELTPAAICRRAAPTGYEEFYFPLVEATRLRCVTKCTSGVDNAIDCHQGQCVLETSGPTCRCYSTDTHWFSGPRCEVAVHWRALVGGLTAGAALLVLLLLALGVRAVRSGWWGGQRRGRSWDQDRKWFETWDEEVVGTFSNWGFEDDGTDKDTNFYVALENVDTTMKVHIKRPEMTSSSV

SEQ ID NO: 1029028 - protein, 1350 aa, Homo sapiens
WGASFTSLITTSETPSHSTPSFTSSISTTETTSHSTPSFTSSITTTETTSHSTPSFTSSITTTETTSHSTPSFTSSITTTETTSHSTPSFTSSITTTETTSHSTPSFTSSIRTTETTSHSTPSFTSSIIATETTSHSTPSYTSLIPTTETTSHSTPSFTSSITTTETTSHSTPSFTSSITTTDSIVTTETTSHSTPSFTSSISTTETTSHSTPSFTSSITITETTSHSTPSYTTSITTTETPSSSTPSFTSSITTTETTSHSTPSFTSSISTTETTSHSTPSFTSSITTTETTSHGTPSFTSSITTTETPSHSTPSFTSLITTTETTSHSTPSFTSSITTTETTSHSTPSFTSLITTTETPSHSTPSFTSSITTTETTSHSTTSFTSSITTTETTSHSTPSFSSSITTTETPLHSTPGLPSWVTTTKTTSHITPGLTSSITTTETTSHSTPGFTSSNHHHWTTSHSTPSLSSSTIYSTVSTSTTAITSHFTTSETAVTPTPVTPSSLSTDIPTTSLRTLTPLSLNTSTSLTTTTDFPSIPTDISTLPTPTHIISSSPSIQSTETSSLVGTTSPTMSTVRMTLRITENTPISSFSTSIVVIPETPTQTPPVLTSATGTQTSPAPTTVTFGSTDSSTSTLHTLTPSTALSTIVSTSQVPIPSTHSSTLQTTPSTPSLQTSLTSTSEFTTESFTRGSTSTNAILTSFSTIIWSSTPTIIMSSSPSSASITPVFSTTIHSVPSSPYIFSTENVGSASITGFPSLSSSATTSTSSTSSSLTTALTEITPFSYISLPSTTPCPGTITITIVPASPTDPCVEMDPSTEATSPPTTPLTVFPFTTEMVTCPTSISIQTTLTTYMDTSSMMPESESSISPNASSSTGTGTVPTNTVFTSTRLPTSETWLSNSSVIPLPLPGVSTIPLTMKPSSSLPTILRTSSKSTHPSPPTTRTSETPVATTQTPTTLTSRRTTRITSQMTTQSTLTTTAGTCDNGGTWEQGQCACLPGFSGDRCQLQTRCQNGGQWDGLKCQCPSTFYGSSCEFAVEQVDLDVVETEVGMEVSVDQQFSPDLNDNTSQAYRDFNKTFWNQMQKIFADMQGFTFKGVEILSLRNGSIVVDYLVLLEMPFSPQLESEYEQVKTTLKEGLQNASQDVNSCQDSQTLCFKPDSIKVNNNSKTELTPAAICRRAAPTGYEEFYFPLVEATRLRCVTKCTSGVDNAIDCHQGQCVLETSGPTCRCYSTDTHWFSGPRCEVAVHWRALVGGLTAGAALLVLLLLALGVRAVRSGWWGGQRRGRSWDQDRKWFETWDEEVVGTFSNWGFEDDGTDKDTNFYVALENVDTTMKVHIKRPEMTSSSV

SEQ ID NO: 1029029 - protein, 1359 aa, Homo sapiens
WGASFTSLITTSETPSHSTPSFTSSISTTETTSHSTPSFTSSITTTETTSHSTPSFTSSITTTETTSHSTPSFTSSITTTETTSHSTPSFTSSITTTETTSHSTPSFTSSIRTTETTSHSTPSFTSSIIATETTSHSTPSYTSLIPTTETTSHSTPSFTSSITTTETTSHSTPSFTSSITTTDSIVTTETTSHSTPSFTSSISTTETTSHSTPSFTSSITITETTSHSTPSYTTSITTTETPSSSTPSFTSSITTTETTSHSTPSFTSSISTTETTSHSTPSFTSSITTTETTSHSTPSFTSSITTTETPSHSTPSFTSLITTTDSIVTTETTYDHLTQYSQLHFFDHHHRDHLTQYSQLHFFDHHHRDPVTQYSQLHFFDHHHRDHLTQYYQLHFFDHHHRDHLTQYSQLQFFNHHHRDPLTQYSWPTFVGHHHQDHLTHYSWPHFFNHHHWDYLTQYSRLHFFNHHHWTTSHSTPSLSSSTIYSTVSTSTTAITSHFTTSETAVTPTPVTPSSLSTDIPTTSLRTLTPLSLNTSTSLTTTTDFPSIPTDISTLPTRTHIISSSPSIQSTETSSLVGTTSPTMSTVRMTLRITENTPISSFSTSIVVIPETPTQTPPVLTSATGTQTSPAPTTVTFGSTDSSTSTLHTLTPSTALSTIVSTSQVPIPSTHSSTLQTTPSTPSLQTSLTSTSEFTTESFTRGSTSTNAILTSFSTIIWSSTPTIIMSSSPSSASITPVFSTTIHSVPSSPYIFSTENVGSASITGFPSLSSSATTSTSSTSSSLTTALTEITPFSYISLPSTTPCPGTITITIVPASPTDPCVEMDPSTEATSPPTTPLTVFPFTTEMVTCPTSISIQTTLTTYMDTSSMMPESESSISPNASSSTGTGTVPTNTVFTSTRLPTSETWLSNSSVIPLPLPGVSTIPLTMKPSSSLPTILRTSSKSTHPSPPTTRTSETPVATTQTPTTLTSRRTTRITSQMTTQSTLTTTAGTCDNGGTWEQGQCACLPGFSGDRCQLQTRCQNGGQWDGLKCQCPSTFYGSSCEFAVEQVDLDVVETEVGMEVSVDQQFSPDLNDNTSQAYRDFNKTFWNQMQKIFADMQGFTFKGVEILSLRNGSIVVDYLVLLEMPFSPQLESEYEQVKTTLKEGLQNASQDVNSCQDSQTLCFKPDSIKVNNNSKTELTPAAICRRAAPTGYEEFYFPLVEATRLRCVTKCTSGVDNAIDCHQGQCVLETSGPTCRCYSTDTHWFSGPRCEVAVHWRALVGGLTAGAALLVLLLLALGVRAVRSGWWGGQRRGRSWDQDRKWFETWDEEVVGTFSNWGFEDDGTDKDTNFYVALENVDTTMKVHIKRPEMTSSSV

SEQ ID NO: 1029030 - protein, 1176 aa, Homo sapiens
WGASFTSLITTSETPSHSTPSFTSSISTTETTSHSTPSFTSSITTTETTSHSTPSFTSSITTTETTSHSTPSFTSSITTTETTSHSTPSFTSSITTTETTSHSTPSFTSSIRTTETTSHSTPSFTSSIIATETTSHSTPSYTSLIHCHRDRLTTVNASPTARSSPPRPHPTVLPASLLQSAPLRPHPTVLPASLLRSPSLRPPHTVLPASFTSSITTTETTSHSTPSFSSSITTTETPLHSTPGLPSWVTTTKTTSHITPGLTSSITTTETTSHSTPGFTSSNHHHWTTSHSTPSLSSSTIYSTVSTSTTAITSHFTTSETAVTPTPVTPSSLSTDIPTTSLRTLTPLSLNTSTSLTTTTDFPSIPTDISTLPTRTHIISSSPSIQSTETSSLVGTTSPTMSTVRMTLRITENTPISSFSTSIVVIPETPTQTPPVLTSATGTQTSPAPTTVTFGSTDSSTSTLHTLTPSTALSTIVSTSQVPIPSTHSSTLQTTPSTPSLQTSLTSTSEFTTESFTRGSTSTNAILTSFSTIIWSSTPTIIMSSSPSSASITPVFSTTIHSVPSSPYIFSTENVGSASITGFPSLSSSATTSTSSTSSSLTTALTEITPFSYISLPSTTPCPGTITITIVPASPTDPCVEMDPSTEATSPPTTPLTVFPFTTEMVTCPTSISIQTTLTTYMDTSSMMPESESSISPNASSSTGTGTVPTNTVFTSTRLPTSETWLSNSSVIPLPLPGVSTIPLTMKPSSSLPTILRTSSKSTHPSPPTTRTSETPVATTQTPTTLTSRRTTRITSQMTTQSTLTTTAGTCDNGGTWEQGQCACLPGFSGDRCQLQTRCQNGGQWDGLKCQCPSTFYGSSCEFAVEQVDLDVVETEVGMEVSVDQQFSPDLNDNTSQAYRDFNKTFWNQMQKIFADMQGFTFKGVEILSLRNGSIVVDYLVLLEMPFSPQLESEYEQVKTTLKEGLQNASQDVNSCQDSQTLCFKPDSIKVNNNSKTELTPAAICRRAAPTGYEEFYFPLVEATRLRCVTKCTSGVDNAIDCHQGQCVLETSGPTCRCYSTDTHWFSGPRCEVAVHWRALVGGLTAGAALLVLLLLALGVRAVRSGWWGGQRRGRSWDQDRKWFETWDEEVVGTFSNWGFEDDGTDKDTNFYVALENVDTTMKVHIKRPEMTSSSV

SEQ ID NO: 1029031 - protein, 1185 aa, Homo sapiens
WGASFTSLITTSETPSHSTPSFTSSISTTETTSHSTPSFTSSITTTETTSHSTPSFTSSITTTETTSHSTPSFTSSITTTETTSHSTPSFTSSITTTETTSHSTPSFTSSIRTTETTSHSTPSFTSSIIATETTSHSTPSYTSLIHCHRDRLTTVNATTLDHLTQYSQLHFFDHHHRDHLTQYSQLHFFDHHHRDPVTQYSQLHFFDHHHRDHLTQYYQLHFFDHHHRDHLTQYSQLQFFNHHHRDPLTQYSWPTFVGHHHQDHLTHYSWPHFFNHHHWDYLTQYSRLHFFNHHHWTTSHSTPSLSSSTIYSTVSTSTTAITSHFTTSETAVTPTPVTPSSLSTDIPTTSLRTLTPLSLNTSTSLTTTTDFPSIPTDISTLPTRTHIISSSPSIQSTETSSLVGTTSPTMSTVRMTLRITENTPISSFSTSIVVIPETPTQTPPVLTSATGTQTSPAPTTVTFGSTDSSTSTLHTLTPSTALSTIVSTSQVPIPSTHSSTLQTTPSTPSLQTSLTSTSEFTTESFTRGSTSTNAILTSFSTIIWSSTPTIIMSSSPSSASITPVFSTTIHSVPSSPYIFSTENVGSASITGFPSLSSSATTSTSSTSSSLTTALTEITPFSYISLPSTTPCPGTITITIVPASPTDPCVEMDPSTEATSPPTTPLTVFPFTTEMVTCPTSISIQTTLTTYMDTSSMMPESESSISPNASSSTGTGTVPTNTVFTSTRLPTSETWLSNSSVIPLPLPGVSTIPLTMKPSSSLPTILRTSSKSTHPSPPTTRTSETPVATTQTPTTLTSRRTTRITSQMTTQSTLTTTAGTCDNGGTWEQGQCACLPGFSGDRCQLQTRCQNGGQWDGLKCQCPSTFYGSSCEFAVEQVDLDVVETEVGMEVSVDQQFSPDLNDNTSQAYRDFNKTFWNQMQKIFADMQGFTFKGVEILSLRNGSIVVDYLVLLEMPFSPQLESEYEQVKTTLKEGLQNASQDVNSCQDSQTLCFKPDSIKVNNNSKTELTPAAICRRAAPTGYEEFYFPLVEATRLRCVTKCTSGVDNAIDCHQGQCVLETSGPTCRCYSTDTHWFSGPRCEVAVHWRALVGGLTAGAALLVLLLLALGVRAVRSGWWGGQRRGRSWDQDRKWFETWDEEVVGTFSNWGFEDDGTDKDTNFYVALENVDTTMKVHIKRPEMTSSSV

SEQ ID NO: 1029032 - protein, 1038 aa, Homo sapiens
WGASFTSLITTSETPSHSTPSFTSSISTTETTSHSTPSFTSSITTTETTSHSTPSFTSSITTTETTSHSTPSFTSSITTTETTSHSTPSFTSSITTTETTSHSTPSFTSSITTTETTSHSTPSFTSSITTTETTSHSTPSFTSSITTTETTSHSTPSLSSSTIYSTVSTSTTAITSHFTTSETAVTPTPVTPSSLSTDIPTTSLRTLTPLSLNTSTSLTTTTDFPSIPTDISTLPTPTHIISSSPSIQSTETSSLVGTTSPTMSTVRMTLRITENTPISSFSTSIVVIPETPTQTPPVLTSATGTQTSPAPTTVTFGSTDSSTSTLHTLTPSTALSTIVSTSQVPIPSTHSSTLQTTPSTPSLQTSLTSTSEFTTESFTRGSTSTNAILTSFSTIIWSSTPTIIMSSSPSSASITPVFSTTIHSVPSSPYIFSTENVGSASITGFPSLSSSATTSTSSTSSSLTTALTEITPFSYISLPSTTPCPGTITITIVPASPTDPCVEMDPSTEATSPPTTPLTVFPFTTEMVTCPTSISIQTTLTTYMDTSSMMPESESSISPNASSSTGTGTVPTNTVFTSTRLPTSETWLSNSSVIPLPLPGVSTIPLTMKPSSSLPTILRTSSKSTHPSPPTTRTSETPVATTQTPTTLTSRRTTRITSQMTTQSTLTTTAGTCDNGGTWEQGQCACLPGFSGDRCQLQTRCQNGGQWDGLKCQCPSTFYGSSCEFAVEQVDLDVVETEVGMEVSVDQQFSPDLNDNTSQAYRDFNKTFWNQMQKIFADMQGFTFKGVEILSLRNGSIVVDYLVLLEMPFSPQLESEYEQVKTTLKEGLQNASQDVNSCQDSQTLCFKPDSIKVNNNSKTELTPAAICRRAAPTGYEEFYFPLVEATRLRCVTKCTSGVDNAIDCHQGQCVLETSGPTCRCYSTDTHWFSGPRCEVAVHWRALVGGLTAGAALLVLLLLALGVRAVRSGWWGGQRRGRSWDQDRKWFETWDEEVVGTFSNWGFEDDGTDKDTNFYVALENVDTTMKVHIKRPEMTSSSV

SEQ ID NO: 1029033 - protein, 1038 aa, Homo sapiens; identical to SEQ ID NO: 1029032

SEQ ID NO: 1029034 - protein, 980 aa, Homo sapiens
WGASFTSLITTSETPSHSTPSFTSSISTTETTSHSTPSFTSSITTTETTSHSTPSFTSSITTTETTSHSTPSFTSSITTTETTSHSTPSFTSSITTTETTSHSTPSFTSSITTTETTSHSTPSFTSSITTTETTSHSTPSFTSSITTTETTSHSTPSLSSSTIYSTVSTSTTAITSHFTTSETAVTPTPVTPSSLSTDIPTTSLRTLTPLSLNTSTSLTTTTDFPSIPTDISTLPTPTHIISSSPSIQSTETSSLVGTTSPTMSTVRMTLRITENTPISSFSTSIVVIPETPTQTPPVLTSATGTQTSPAPTTVTFGSTDSSTSTLHTLTPSTALSTIVSTSQVPIPSTHSSTLQTTPSTPSLQTSLTSTSEFTTESFTRGSTSTNAILTSFSTIIWSSTPTIIMSSSPSSASITPVFSTTIHSVPSSPYIFSTENVGSASITGFPSLSSSATTSTSSTSSSLTTALTEITPFSYISLPSTTPCPGTITITIVPASPTDPCVEMDPSTEATSPPTTPLTVFPFTTEMVTCPTSISIQTTLTTYMDTSSMMPESESSISPNASSSTGTGTVPTNTVFTSTRLPTSETWLSNSSVIPLPLPGVSTIPLTMKPSSSLPTILRTSSKSTHPSPPTTRTSETPVATTQTPTTLTSRRTTRITSQMTTQSTLTTTAGTCDNGGTWEQGQCACLPGFSGDRCQLQTRCQNGGQWDGLKCQCPSTFYGSSCEFAVEQVDLDVVETEVGMEVSVDQQFSPDLNDNTSQAYRDFNKTFWNQMQKIFADMQGFTFKGVEILSLRNGSIVVDYLVLLEMPFSPQLESEYEQVKTTLKEGLQNASQDVNSCQDSQTLCFKPDSIKVNNNSKTELTPAAICRRAAPTGYEEFYFPLVEATRLRCVTKCTSGVDNAIDCHQGQCVLETSGPTCRSWDQDRKWFETWDEEVVGTFSNWGFEDDGTDKDTNFYVALENVDTTMKVHIKRPEMTSSSV

SEQ ID NO: 1029035 - protein, 533 aa, Homo sapiens
WGASFTSLITTSETPSHSTPSFTSSISTTETTSHSTPSFTSSITTTETTSHSTPSFTSSITTTETTSHSTPSFTSSITTTETTSHSTPSFTSSITTTETTSHSTPSFTSSITTTETTSHSTPSFTSSITTTETTSHSTPSFTSSITTTETTSHSTPSLSSSTIYSTVSTSTTAITSHFTTSETAVTPTPVTPSSLSTDIPTTSLRTLTPLSLNTSTSLTTTTDFPSIPTDISTLPTPTHIISSSPSIQSTETSSLVGTTSPTMSTVRMTLRITENTPISSFSTSIVVIPETPTQTPPVLTSATGTQTSPAPTTVTFGSTDSSTSTLHTLTPSTALSTIVSTSQVPIPSTHSSTLQTTPSTPSLQTSLTSTSEFTTESFTRGSTSTNAILTSFSTIIWSSTPTIIMSSSPSSASITPVFSTTIHSVPSSPYIFSTENVGSASITGFPSLSSSATTSTSSTSSSLTTALTEITPFSYISLPSTTPCPGTITITIVPASPTDPCVEMDPSTEATSPPTTSHSTPATLPQSPAPDGT

SEQ ID NO: 1029036 - protein, 208 aa, Homo sapiens
WGASFTSLITTSETPSHSTPSFTSSISTTETTSHSTPSFTSSITTTETTSHSTPSFTSSITTTETTSHSTPSFTSSITTTETTSHSTPSFTSSITTTETTSHSTPSFTSSITTTETPSSSTPSFTSSITTTDSIVTTETTSHSTPSFTSSISTTETTSHSTPSFTSSITITETTSHSTPSYTTSITTTETTSHLPPNFTSLITASQKD

SEQ ID NO: 1029037 - protein, 148 aa, Homo sapiens
WGASFTSLITTSETPSHSTPSFTSSISTTETTSHSTPSFTSSITTTETTSHSTPSFTSSITTTETTSHSTPSFTSSITTTETTSHSTPSFTSSITTTETTSHSTPSFTSSITTTETTSHSTPSFTSSDHHHRDHLTQYSQLHFFDHHL

SEQ ID NO: 1029038 - protein, 218 aa, Homo sapiens
WGASFTSLITTSETPSHSTPSFTSSISTTETTSHSTPSFTSSITTTETTSHSTPSFTSSITTTETTSHSTPSFTSSITTTETTSHSTPSFTSPPPRPPHTVLPASLLQSPPLRPPHMETTSRSSPSFTSLITITGSTSHSTPSFTSSITITETTSHSTPSITSSVTTAERTSHSTPSYAFSIATSETPSHTVPSFTSLITTTESTSHSRPTNLASLIT

SEQ ID NO: 1029039 - protein, 670 aa, Homo sapiens
LSTTPVASSEASTLSTSPVDTSTPVTNSSPTNSSPTTAEVTSMPTSTAGEGSTPLTNMPVSTTPVASSEASTLSTTPVDSNTFVTSSSQASSSPATLQVTTMRMSTPSEGSSSLTTMLLSSTYVTSSEASTPSTPSVDRSTPVTTSTQSNSTPTPPEVITLPMSTPSEVSTPLTIMPVSTTSVTISEAGTASTLPVDTSTPVITSTQVSSSPVTPEGTTMPIWTLSEGSIPITIMHVSTTRVTSSEGSTLSTPSVVTSTPVTTSTEAISSSATLDSTTMSVSMPMEISTLGTTILVSTTPVTRFPESSTPSIPSVYTSMSMTTASEGSSSPTTLEGTTTMPMSTTSERSTLLTTVLISPISVMSPSEASTLSTPPGDTSTPLLTSTKAGSFSIPAEVTTIRISITSERSTPLTTLLVSTTLPTSFPGASIASTPPLDTSTTFTPSTDTASTPTIPVATTISVSVITEGSTPGTTIFIPSTPVTSSTADVFPATTGAVSTPVITSTELNTPSTSSSSTTTSFSTTKEFTTPAMTTAAPLTYVTMSTAPSTPRTTSRGCTTSASTLSATSTPHTSTSITTTETTSHSTPSFTSSITRSSPPRPHPTVLPASLLQSAPLRPHPTVLPASLLRSPSLRPPHTVLPATLPQSPPPSYLTPSSQLHVFDHRLPERL

SEQ ID NO: 1029040 - protein, 1038 aa, Homo sapiens; identical to SEQ ID NO: 1029032

SEQ ID NO: 1029041 - protein, 1038 aa, Homo sapiens
WGASFTSLITTSETPSHSTPSFTSSISTTETTSHSTPSFTSSITTTETTSHSTPSFTSSITTTETTSHSTPSFTSSITTTETTSHSTPSFTSSITTTETTSHSTPSFTSSITTTETTSHSTPSFTSSITTTETTSHSTPSFTSSITTTETTSHSTPSLSSSTIYSTVSTSTTAITSHFTTSETAVTPTPVTPSSLSTDIPTTSLRTLTPSSVGTSTSLTTTTDFPSIPTDISTLPTPTHIISSSPSIQSTETSSLVGTTSPTMSTVRMTLRITENTPISSFSTSIVVIPETPTQTPPVLTSATGTQTSPAPTTVTFGSTDSSTSTLHTLTPSTALSTIVSTSQVPIPSTHSSTLQTTPSTPSLQTSLTSTSEFTTESFTRGSTSTNAILTSFSTIIWSSTPTIIMSSSPSSASITPVFSTTIHSVPSSPYIFSTENVGSASITGFPSLSSSATTSTSSTSSSLTTALTEITPFSYISLPSTTPCPGTITITIVPASPTDPCVEMDPSTEATSPPTTPLTVFPFTTEMVTCPTSISIQTTLTTYMDTSSMMPESESSISPNASSSTGTGTVPTNTVFTSTRLPTSETWLSNSSVIPLPLPGVSTIPLTMKPSSSLPTILRTSSKSTHPSPPTTRTSETPVATTQTPTTLTSRRTTRITSQMTTQSTLTTTAGTCDNGGTWEQGQCACLPGFSGDRCQLQTRCQNGGQWDGLKCQCPSTFYGSSCEFAVEQVDLDVVETEVGMEVSVDQQFSPDLNDNTSQAYRDFNKTFWNQMQKIFADMQGFTFKGVEILSLRNGSIVVDYLVLLEMPFSPQLESEYEQVKTTLKEGLQNASQDVNSCQDSQTLCFKPDSIKVNNNSKTELTPAAICRRAAPTGYEEFYFPLVEATRLRCVTKCTSGVDNAIDCHQGQCVLETSGPTCRCYSTDTHWFSGPRCEVAVHWRALVGGLTAGAALLVLLLLALGVRAVRSGWWGGQRRGRSWDQDRKWFETWDEEVVGTFSNWGFEDDGTDKDTNFYVALENVDTTMKVHIKRPEMTSSSV

SEQ ID NO: 1029042 - protein, 1299 aa, Homo sapiens
WGASFTSLITTSETPSHSTPSFTSSISTTETTSHSTPSFTSSITTTETTSHSTPSFTSSITTTETTSHSTPSFTSSITTTETTSHSTPSFTSSITTTETTSHSTPSFTSSITTTETPSSSTPSFTSSITTTDSIVTTETTSHSTPSFTSSISTTETTSHSTPSFTSSITITETTSHSTPSYTTSITTTETPSSSTPSFTSSITTTETTSHSTPSFTSSISTTETTSHSTPSFTSSITTTETTSHGTPSFTSSITTTETPSHSTPSFTSLITTTETTSHSTPSFTSSITTTETTSHSTPSFTSLITTTETPSHSTPSFTSSITTTETTSHSTTSFTSSITTTETTSHSTPSFSSSITTTETPLHSTPGLPSWVTTTKTTSHITPGLTSSITTTETTSHSTPGFTSSNHHHWTTSHSTPSLSSSTIYSTVSTSTTAITSHFTTSETAVTPTPVTPSSLSTDIPTTSLRTLTPLSLNTSTSLTTTTDFPSIPTDISTLPTPTHIISSSPSIQSTETSSLVGTTSPTMSTVRMTLRITENTPISSFSTSIVVIPETPTQTPPVLTSATGTQTSPAPTTVTFGSTDSSTSTLHTLTPSTALSTIVSTSQVPIPSTHSSTLQTTPSTPSLQTSLTSTSEFTTESFTRGSTSTNAILTSFSTIIWSSTPTIIMSSSPSSASITPVFSTTIHSVPSSPYIFSTENVGSASITGFPSLSSSATTSTSSTSSSLTTALTEITPFSYISLPSTTPCPGTITITIVPASPTDPCVEMDPSTEATSPPTTPLTVFPFTTEMVTCPTSISIQTTLTTYMDTSSMMPESESSISPNASSSTGTGTVPTNTVFTSTRLPTSETWLSNSSVIPLPLPGVSTIPLTMKPSSSLPTILRTSSKSTHPSPPTTRTSETPVATTQTPTTLTSRRTTRITSQMTTQSTLTTTAGTCDNGGTWEQGQCACLPGFSGDRCQLQTRCQNGGQWDGLKCQCPSTFYGSSCEFAVEQVDLDVVETEVGMEVSVDQQFSPDLNDNTSQAYRDFNKTFWNQMQKIFADMQGFTFKGVEILSLRNGSIVVDYLVLLEMPFSPQLESEYEQVKTTLKEGLQNASQDVNSCQDSQTLCFKPDSIKVNNNSKTELTPAAICRRAAPTGYEEFYFPLVEATRLRCVTKCTSGVDNAIDCHQGQCVLETSGPTCRCYSTDTHWFSGPRCEVAVHWRALVGGLTAGAALLVLLLLALGVRAVRSGWWGGQRRGRSWDQDRKWFETWDEEVVGTFSNWGFEDDGTDKDTNFYVALENVDTTMKVHIKRPEMTSSSV

SEQ ID NO: 1029043 - protein, 1261 aa, Homo sapiens
WGASFTSLITTSETPSHSTPSFTSSISTTETTSHSTPSFTSSITTTETTSHSTPSFTSSITTTETTSHSTPSFTSSITTTETTSHSTPSFTSSITTTETTSHSTPSFTSSIRITTTETTSHSTPSFTSLITTSETPSHSTPSFTSSITTTETPSSSTPSFTSSITTTETTSHSTPSFTSSISTTETTSHSTPSFTSSITTTETTSHGTPSFTSSITTTETPSHSTPSFTSLITTTETTSHSTPSFTSSITTTETTSHSTPSFTSLITTTETPSHSTPSFTSSITTTETTSHSTTSFTSSITTTETTSHSTPSFSSSITTTETPLHSTPGLPSWVTTTKTTSHITPGLTSSITTTETTSHSTPGFTSSNHHHWTTSHSTPSLSSSTIYSTVSTSTTAITSHFTTSETAVTPTPVTPSSLSTDIPTTSLRTLTPLSLNTSTSLTTTTDFPSIPTDISTLPTRTHIISSSPSIQSTETSSLVGTTSPTMSTVRMTLRITENTPISSFSTSIVVIPETPTQTPPVLTSATGTQTSPAPTTVTFGSTDSSTSTLHTLTPSTALSTIVSTSQVPIPSTHSSTLQTTPSTPSLQTSLTSTSEFTTESFTRGSTSTNAILTSFSTIIWSSTPTIIMSSSPSSASITPVFSTTIHSVPSSPYIFSTENVGSASITGFPSLSSSATTSTSSTSSSLTTALTEITPFSYISLPSTTPCPGTITITIVPASPTDPCVEMDPSTEATSPPTTPLTVFPFTTEMVTCPTSISIQTTLTTYMDTSSMMPESESSISPNASSSTGTGTVPTNTVFTSTRLPTSETWLSNSSVIPLPLPGVSTIPLTMKPSSSLPTILRTSSKSTHPSPPTTRTSETPVATTQTPTTLTSRRTTRITSQMTTQSTLTTTAGTCDNGGTWEQGQCACLPGFSGDRCQLQTRCQNGGQWDGLKCQCPSTFYGSSCEFAVEQVDLDVVETEVGMEVSVDQQFSPDLNDNTSQAYRDFNKTFWNQMQKIFADMQGFTFKGVEILSLRNGSIVVDYLVLLEMPFSPQLESEYEQVKTTLKEGLQNASQDVNSCQDSQTLCFKPDSIKVNNNSKTELTPAAICRRAAPTGYEEFYFPLVEATRLRCVTKCTSGVDNAIDCHQGQCVLETSGPTCRCYSTDTHWFSGPRCEVAVHWRALVGGLTAGAALLVLLLLALGVRAVRSGWWGGQRRGRSWDQDRKWFETWDEEVVGTFSNWGFEDDGTDKDTNFYVALENVDTTMKVHIKRPEMTSSSV

SEQ ID NO: 1029044 - protein, 1279 aa, Homo sapiens
WGASFTSLITTSETPSHSTPSFTSSISTTETTSHSTPSFTSSITTTETTSHSTPSFTSSITTTETTSHSTPSFTSSITTTETTSHSTPSFTSPPPRPPHTVLPASLLQSPPLRPPHMETTSRSSPSFTSLITITGSTSHSTPSFTSSITITETTSHSTPSYTTSITTTETPSSSTPSFTSSITTTETTSHSTPSFTSSISTTETTSHSTPSFTSSITTTETTSHSTPSFTSSITTTETPSHSTPSFTSLITTTETTSHSTPSFTSSITTTETTSHSTPSFTSLITTTETPSHSTPSFTSSITTTETTSHSTTSFTSSITTTETTSHSTPSFSSSITTTETPLHSTPGLPSWVTTTKTTSHITPGLTSSITTTETTSHSTPGFTSSNHHHWTTSHSTPSLSSSTIYSTVSTSTTAITSHFTTSETAVTPTPVTPSSLSTDIPTTSLRTLTPLSLNTSTSLTTTTDFPSIPTDISTLPTRTHIISSSPSIQSTETSSLVGTTSPTMSTVRMTLRITENTPISSFSTSIVVIPETPTQTPPVLTSATGTQTSPAPTTVTFGSTDSSTSTLHTLTPSTALSTIVSTSQVPIPSTHSSTLQTTPSTPSLQTSLTSTSEFTTESFTRGSTSTNAILTSFSTIIWSSTPTIIMSSSPSSASITPVFSTTIHSVPSSPYIFSTENVGSASITGFPSLSSSATTSTSSTSSSLTTALTEITPFSYISLPSTTPCPGTITITIVPASPTDPCVEMDPSTEATSPPTTPLTVFPFTTEMVTCPTSISIQTTLTTYMDTSSMMPESESSISPNASSSTGTGTVPTNTVFTSTRLPTSETWLSNSSVIPLPLPGVSTIPLTMKPSSSLPTILRTSSKSTHPSPPTTRTSETPVATTQTPTTLTSRRTTRITSQMTTQSTLTTTAGTCDNGGTWEQGQCACLPGFSGDRCQLQTRCQNGGQWDGLKCQCPSTFYGSSCEFAVEQVDLDVVETEVGMEVSVDQQFSPDLNDNTSQAYRDFNKTFWNQMQKIFADMQGFTFKGVEILSLRNGSIVVDYLVLLEMPFSPQLESEYEQVKTTLKEGLQNASQDVNSCQDSQTLCFKPDSIKVNNNSKTELTPAAICRRAAPTGYEEFYFPLVEATRLRCVTKCTSGVDNAIDCHQGQCVLETSGPTCRCYSTDTHWFSGPRCEVAVHWRALVGGLTAGAALLVLLLLALGVRAVRSGWWGGQRRGRSWDQDRKWFETWDEEVVGTFSNWGFEDDGTDKDTNFYVALENVDTTMKVHIKRPEMTSSSV

SEQ ID NO: 1029045 - protein, 999 aa, Homo sapiens
WGASFTSLITTSETPSHSTPSFTSSISTTETTSHSTPSFTSSITTTETTSHSTPSFTSSITTTETTSHSTPSFTSSITTTETTSHSTPSFTSSITTTETTSHSTPSFTSSITTTETTSHSTPSFTSSITTTETTSHSTPSFTSSITTTETTSHSTPSLSSSTIYSTVSTSTTAITSHFTTSETAVTPTPVTPSSLSTDIPTTSLRTLTPLSLNTSTSLTTTTDFPSIPTDISTLPTPTHIISSSPSIQSTETSSLVGTTSPTMSTVRMTLRITENTPISSFSTSIVVIPETPTQTPPVLTSATGTQTSPAPTTVTFGSTDSSTSTLHTLTPSTALSTIVSTSQVPIPSTHSSTLQTTPSTPSLQTSLTSTSEFTTESFTRGSTSTNAILTSFSTIIWSSTPTIIMSSSPSSASITPVFSTTIHSVPSSPYIFSTENVGSASITGFPSLSSSATTSTSSTSSSLTTALTEITPFSYISLPSTTPCPGTITITIVPASPTDPCVEMDPSTEATSPPTTPLTVFPFTTEMVTCPTSISIQTTLTTYMDTSSMMPESESSISPNASSSTGTGTVPTNTVFTSTRLPTSETWLSNSSVIPLPLPGVSTIPLTMKPSSSLPTILRTSSKSTHPSPPTTRTSETPVATTQTPTTLTSRRTTRITSQMTTQSTLTTTAGTCDNGGTWEQGQCACLPGFSGDRCQLQTRCQNGGQWDGLKCQCPSTFYGSSCEFAVEQVDLDAEDFCRHAGLHLQGVEILSLRNGSIVVDYLVLLEMPFSPQLESEYEQVKTTLKEGLQNASQDVNSCQDSQTLCFKPDSIKVNNNSKTELTPAAICRRAAPTGYEEFYFPLVEATRLRCVTKCTSGVDNAIDCHQGQCVLETSGPTCRCYSTDTHWFSGPRCEVAVHWRALVGGLTAGAALLVLLLLALGVRAVRSGWWGGQRRGRSWDQDRKWFETWDEEVVGTFSNWGFEDDGTDKDTNFYVALENVDTTMKVHIKRPEMTSSSV

SEQ ID NO: 1029046 - protein, 794 aa, Homo sapiens
WGASFTSLITTSETPSHSTPSFTSSISTTETTSHSTPSFTSSITTTETTSHSTPSFTSSITTTETTSHSTPSFTSSITTTETTSHSTPSFTSSITTTETTSHSTPSFTSSITTTETTSHSTPSFTSSITTTETTSHSTPSFTSSITTTETTSHSTPSLSSSTIYSTVSTSTTAITSHFTTSETAVTPTPVTPSSLSTDIPTTSLRTLTPSSVGSTSSSLTTALTEITPFSYISLPSTTPCPGTITITIVPASPTDPCVEMDPSTEATSPPTTPLTVFPFTTEMVTCPTSISIQTTLTTYMDTSSMMPESESSISPNASSSTGTGTVPTNTVFTSTRLPTSETWLSNSSVIPLPLPGVSTIPLTMKPSSSLPTILRTSSKSTHPSPPTTRTSETPVATTQTPTTLTSRRTTRITSQMTTQSTLTTTAGTCDNGGTWEQGQCACLPGFSGDRCQLQTRCQNGGQWDGLKCQCPSTFYGSSCEFAVEQVDLDVVETEVGMEVSVDQQFSPDLNDNTSQAYRDFNKTFWNQMQKIFADMQGFTFKGVEILSLRNGSIVVDYLVLLEMPFSPQLESEYEQVKTTLKEGLQNASQDVNSCQDSQTLCFKPDSIKVNNNSKTELTPAAICRRAAPTGYEEFYFPLVEATRLRCVTKCTSGVDNAIDCHQGQCVLETSGPTCRCYSTDTHWFSGPRCEVAVHWRALVGGLTAGAALLVLLLLALGVRAVRSGWWGGQRRGRSWDQDRKWFETWDEEVVGTFSNWGFEDDGTDKDTNFYVALENVDTTMKVHIKRPEMTSSSV

SEQ ID NO: 1029047 - protein, 1070 aa, Homo sapiens
WGASFTSLITTSETPSHSTPSFTSSISTTETTSHSTPSFTSSITTTETTSHSTPSFTSSITTTETTSHSTPSFTSSITTTETTSHSTPSFTSSITTTETTSHSTPSFTSSITTTETTSHSTPSFTSSITTTETTSHSTPSFTSSITTTETTSHSTPSLSSSTIYSTVSTSTTAITSHFTTSETAVTPTPVTPSSLSTDIPTTSLRTLTPLSLNTSTSLTTTTDFPSIPTDISTLPTPTHIISSSPSIQSTETSSLVGTTSPTMSTVRMTLRITENTPISSFSTSIVVIPETPTQTPPVLTSATGTQTSPAPTTVTFGSTDSSTSTLHTLTPSTALSTIVSTSQVPIPSTHSSTLQTTPSTPSLQTSLTSTSEFTTESFTRGSTSTNAILTSFSTIIWSSTPTIIMSSSPSSASITPVFSTTIHSVPSSPYIFSTENVGSASITGFPSLSSSATTSTSSTSSSLTTALTEITPFSYISLPSTTPCPGTITITIVPASPTDPCVEMDPSTEATSPPTTPLTVFPFTTEMVTCPTSISIQTTLTTYMDTSSMMPESESSISPNASSSTGTGTVPTNTVFTSTRLPTSETWLSNSSVIPLPLPGVSTIPLTMKPSSSLPTILRTSSKSTHPSPPTTRTSETPVATTQTPTTLTSRRTTRITSQMTTQSTLTTTAGTCDNGGTWEQGQCACLPGFSGDRCQLQTRCQNGGQWDGLKCQCPSTFYGSSCEFAVEQVDLDVVETEVGMEVSVDQQFSPDLNDNTSQAYRDFNKTFWNQMQKIFADMQGFTFKGVEILSLRNGSIVVDYLVLLEMPFSPQLESEYEQVKTTLKEGLQNASQDVNSCQDSQTLCFKPDSIKVNNNSKTELTPAAICRRAAPTGYEEFYFPLVEATRLRCVTKCTSGVDNAIDCHQGQCVLETSGPTCRCYSTDTHWFSGPRCEVAVHWRALVGGLTAGAALLVLLLLALGVRAVRSGWWGGQRRGRSWDQDRKWFETWDEEVVGTFSNWGFEDDGTDKDTNFYVALENVDTTMKVRGYRGGPQGTLPASIPESLPDPQPGQGGGWARIGSDLPVSPTSG

SEQ ID NO: 1029048 - protein, 131 aa, Homo sapiens
WGASFTSLITTSETPSHSTPSFTSSISTTETTSHSTPSFTSSITTTETTSHSTPSFTSSITTTETTSHSTPSFTSSITTTETTSHSTPSFTSSITTTETTSHSTPSFTSSIMITTTETTFHSTNEGEAVIL

SEQ ID NO: 1029049 - protein, 175 aa, Homo sapiens
  misc_feature (10)..(11): Xaa can be any naturally occurring amino acid
RPLRSPKRKXXKKQISNFTNNYHFYFISVLWNGFLLWCLTQSLFLGAPFPSWLHGLLRILGAAQFQGGELALSAFLVLVFLWLHSLRRLFECLYVSVFSNVMIHVVQYCFGLVYYVLVGLTVLSQVPMDGRNAYITGKNLLMQARWFHILGMMMFIWSSAHQYKGHVILRQSQET

SEQ ID NO: 1029050 - protein, 258 aa, Homo sapiens
GLLFLRASWAVGAASSSGSAVQRGHGSLLRSAEHSALNPAAALVWLTLTACLPADPTAAAPACPGLLPGLLLIFQDLIRYGKTKCGEPQRPAACRAFDVPKRYFSHFYFISVLWNGFLLWCLTQSLFLGAPFPSWLHGLLRILGAAQFQGGELALSAFLVLVFLWLHSLRRLFECLYVSVFSNVMIHVVQYCFGLVYYVLVGLTVLSQVPMDGRNAYITGKNLLMQARWFHILGMMMFIWSSAHQYKGHVILRQSQET

SEQ ID NO: 1029051 - protein, 170 aa, Homo sapiens
PARLGTAAGKPGEVIFLHFYFISVLWNGFLLWCLTQSLFLGAPFPSWLHGLLRILGAAQFQGGELALSAFLVLVFLWLHSLRRLFECLYVSVFSNVMIHVVQYCFGLVYYVLVGLTVLSQVPMDGRNAYITGKNLLMQARWFHILGMMMFIWSSAHQYKGHVILRQSQET

SEQ ID NO: 1029052 - protein, 146 aa, Homo sapiens
  misc_feature (10)..(11): Xaa can be any naturally occurring amino acid
RPLRSPKRKXXKKQISNFTNNYHFYFISVLWNGFLLWCLTQSLFLGAPFPSWLHGLLRILGAAQFQGGELALSAFLVLVFLWLHSLRRLFECLYVSVFSNVMIHVVQYCFGLVYYVLVGALLNLCSWEHLFQAGFMVCSEFSGRHS

SEQ ID NO: 1029053 - protein, 182 aa, Homo sapiens
KKKQQTQKAKLARYSLAFNQAAGKMADIQTERAYQKQPTIFQNKKRVLLGETGKEKLPRYYKNIGLGFKTPKEAIEGTYIDKKCPFTGNVSIRGRILSGVVTKMKMQRTIVIRRDYLHYIRKYNRFEKRHKNMSVHLSPCFRDVQIGDIVTVGECRPLSKTVRFNVLKVTKAAGTKKQFQKF

SEQ ID NO: 1029054 - protein, 194 aa, Homo sapiens
KKKQQTQKAKLARYSLAFNQAAGKMADIQTERAYQKQPTIFQNKKRVLLGETGKEKLPRYYKNIGLGFKTPKEAIEGTYIDKKCPFTGNVSIRGRILSGVVTKMKMQRTIVIRRDYLHYIRKYNRFEKRHKNMSVHLSPCFRDVQIGDIVTVGECRPLSKTVRFNVLKVTKAASTKKQFQVTKAAGTKKQFQKF

SEQ ID NO: 1029055 - protein, 77 aa, Homo sapiens
VRLGTCQTLNYVHYIRKYNRFEKRHKNMSVHLSPCFRDVQIGDIVTVGECRPLSKTVRFNVLKVTKAAGTKKQFQKF

SEQ ID NO: 1029056 - protein, 182 aa, Homo sapiens; identical to SEQ ID NO: 1029053

SEQ ID NO: 1029057 - protein, 323 aa, Homo sapiens
KKKQQTQKAKLARYSLAFNQAAGKMADIQTERAYQKQPTIFQNKKRVLLGETGKEKLPRYYKNIGLGFKTPKEAIEGTYIDKKCPFTGNVSIRGRILSGVVTKMKMQRTIVIRRDYLHYIRKYNRFEKRHKNMSVHLSPCFRDVQIGDIVTVGECRPLSKTVRFNVLKVTNGLARQHKDKQCYHESNIERWTHRCPKYHNKENKSLIVPQYPHKQSRKTKQKNRANQIDKGNGSRKQSGYYEKSNAGVDTATTQTERSDQQTNRWPKCRRRPQYEEDAANKNEKNCTEAKTGNTDQRQKETDQTNSTNQSRALKKKRSITREN

SEQ ID NO: 1029058 - protein, 125 aa, Homo sapiens
  misc_feature (3)..(3): Xaa can be any naturally occurring amino acid
  misc_feature (23)..(23): Xaa can be any naturally occurring amino acid
SVXATASIRSRRLPTLCRALPLXPPSPFSRALWAQGGSTRPRGWFGAGLAPADQTLSPSQSPDFAEELRSLEPSPSPGPQEEDGEVALVLLGRPSPGAVGPEDVALCSSRRPVRPGRRGLGPVPS

SEQ ID NO: 1029059 - protein, 105 aa, Homo sapiens
MVGGGQGRWPLCTGPLLQGWGVRGHRGVLLTPVFPLLPWGLLCEEGQGRLPGQSCLATGVGERLKMCLNPGRGLKAPENTRQVSSGPQHLPRGPHLSLTWPYSTG

SEQ ID NO: 1029060 - protein, 947 aa, Homo sapiens
YALADRDEEEASTEEEDKEGAVVSAPSVKGVSFDQANNLLIEPARIEEEELTLTILRQTGGLGISIAGGKGSTPYKGDDEGIFISRVSEEGPAARAGVRVGDKLLEVNGVALQGAEHHEAVEALRGAGTAVQMRVWRERMVEPENAVTITPLRPEDDYSPRERRGGGLRLPLLPPESPGPLRQRHVACLARSERGLGFSIAGGKGSTPYRAGDAGIFVSRIAEGGAAHRAGTLQINGVDVTEARHDHAVSLLTAASPTIALLLEREAGGPLPPSPLPHSSPPTAAVATTSITTATPGVPGLPSLAPSLLAAALEGPYPVEEIRLPRAGGPLGLSIVGGSDHSSHPFGVQEPGVFISKVLPRGLAARSGLRVGDRILAVNGQDVRDATHQEAVSALLRPCLELSLLVRRDPAPPGLRELCIQKAAWGEAGHQHPRGCQGPRWQPPRPTDEGIFISKVSPTGAAGRDGRLRVGLRLLEVNQQSLLGLTHGEAVQLLRSVGDTLTVLVCDGFEASTDAALEVSPGVIANPFAAGIGHRNSLESISSIDRELSPEGPGKEKELPGQTLHWGPEATEAAGRGLQPLKLDYRALAAVPSAGSVQRVPSGAAGGKMAESPCSPSGQQPPSPPSPDELPANVKQAYRAFAAVPTSHPPEDAPAQPPTPGPAASPEQLSFRERQKYFELEVRVPQAEGPPKRVSLVGADDLRKMQEEEARKLQQKRAQMLREAAEAGAEARLALDGETLGEEEQEDEQPPWASPSPTSRQSPASPPPLGGGAPVRTAKAERRHQERLRVQSPEPPAPERALSPAELRALEAEKRALWRAARMKSLEQDALRAQMVLSRSQEGRGTRGPLERLAEAPSPAPTPSPTPVEDLGPQTSTSPGRLSPDFAEELRSLEPSPSPGPQEEDGEVALVLLGRPSPGAVGPEDVALCSSRRPVRPGRRGLGPVPS

SEQ ID NO: 1029061 - protein, 979 aa, Homo sapiens
YALADRDEEEASTEEEDKEGAVVSAPSVKGVSFDQANNLLIEPARIEEEELTLTILRQTGGLGISIAGGKGSTPYKGDDEGIFISRVSEEGPAARAGVRVGDKLLEVNGVALQGAEHHEAVEALRGAGTAVQMRVWRERMVEPENAVTITPLRPEDDYSPRERRGGGLRLPLLPPESPGPLRQRHVACLARSERGLGFSIAGGKGSTPYRAGDAGIFVSRIAEGGAAHRAGTLQVGDRVLSINGVDVTEARHDHAVSLLTAASPTIALLLEREAGGPLPPSPLPHSSPPTAAVATTSITTATPGVPGLPSLAPSLLAAALEGPYPVEEIRLPRAGGPLGLSIVGGSDHSSHPFGVQEPGVFISKVLPRGLAARSGLRVGDRILAVNGQDVRDATHQEAVSALLRPCLELSLLVRRDPAPPGLRELCIQKAAWGEAGHQHPRGCQGPRWQPPRPTDEGIFISKVSPTGAAGRDGRLRVGLRLLEVNQQSLLGLTHGEAVQLLRSVGDTLTVLVCDGFEASTDAALEVSPGVIANPFAAGIGHRNSLESISSIDRELSPEGPGKEKELPGQTLHWGPEATEAAGRGLQPLKLDYRALAAVPSAGSVQRVPSGAAGGKMAESPCSPSGQQPPSPPSPDELPANVKQAYRAFAAVPTSHPPEDAPAQPPTPGPAASPEQLSFRERQKYFELEVRVPQAEGPPKRVSLVGADDLRKMQEEEARKLQQKRAQMLREAAEAGAEARLALDGETLGEEEQEDEQPPWASPSPTSRQSPASPPPLGGGAPVRTAKAERRHQERLRVQSPEPPAPERALSPAELRALEAEKRALWRAARMKSLEQDALRAQMVLSRSQEGRGTRGPLERLAEAPSPAPTPSPTPVEDLGPQTSTSPGRLPLSGKKFDYRAFAALPSSRPVYDIQSPDFAEELRSLEPSPSPGPQEEDGEVALVLLGRPSPGAVGPEDVALCSSRRPVRPGRRGLGPVPS

SEQ ID NO: 1029062 - protein, 695 aa, Homo sapiens
YALADRDEEEASTEEEDKEGAVVSAPSVKGVSFDQANNLLIEPARIEEEELTLTSLLAAALEGPYPVEEIRLPRAGGPLGLSIVGGSDHSSHPFGVQEPGVFISKVLPRGLAARSGLRVGDRILAVNGQDVRDATHQEAVSALLRPCLELSLLVRRDPAPPGLRELCIQKAAWGEAGHQHPRGCQGPRWQPPRPTDEGIFISKVSPTGAAGRDGRLRVGLRLLEVNQQSLLGLTHGEAVQLLRSVGDTLTVLVCDGFEASTDAALEVSPGVIANPFAAGIGHRNSLESISSIDRELSPEGPGKEKELPGQTLHWGPEATEAAGRGLQPLKLDYRALAAVPSAGSVQRVPSGAAGGKMAESPCSPSGQQPPSPPSPDELPANVKQAYRAFAAVPTSHPPEDAPAQPPTPGPAASPEQLSFRERQKYFELEVRVPQAEGPPKRVSLVGADDLRKMQEEEARKLQQKRAQMLREAAEAGAEARLALDGETLGEEEQEDEQPPWASPSPTSRQSPASPPPLGGGAPVRTAKAERRHQERLRVQSPEPPAPERALSPAELRALEAEKRALWRAARMKSLEQDALRAQMVLSRSQEGRGTRGPLERLAEAPSPAPTPSPTPVEDLGPQTSTSPGRLSPDFAEELRSLEPSPSPGPQEEDGEVALVLLGRPSPGAVGPEDVALCSSRRPVRPGRRGLGPVPS

SEQ ID NO: 1029063 - protein, 954 aa, Homo sapiens
YALADRDEEEASTEEEDKEGAVVSAPSVKGVSFDQANNLLIEPARIEEEELTLTILRQTGGLGISIAGGKGSTPYKGDDEGIFISRVSEEGPAARAGVRVGDKLLEVNGVALQGAEHHEAVEALRGAGTAVQMRVWRERMVEPENAVTITPLRPEDDYSPRERRGGGLRLPLLPPESPGPLRQRHVACLARSERGLGFSIAGGKGSTPYRAGDAGIFVSRIAEGGAAHRAGTLQVGDRVLSINGVDVTEARHDHAVSLLTAASPTIALLLEREAGGPLPPSPLPHSSPPTAAVATTSITTATPGVPGLPSLAPSLLAAALEGPYPVEEIRLPRAGGPLGLSIVGGSDHSSHPFGVQEPGVFISKVLPRGLAARSGLRVGDRILAVNGQDVRDATHQEAVSALLRPCLELSLLVRRDPAPPGLRELCIQKAAWGEAGHQHPRGCQGPRWQPPRPTDEGIFISKVSPTGAAGRDGRLRVGLRLLEVNQQSLLGLTHGEAVQLLRSVGDTLTVLVCDGFEASTDAALEVSPGVIANPFAAGIGHRNSLESISSIDRELSPEGPGKEKELPGQTLHWGPEATEAAGRGLQPLKLDYRALAAVPSAGSVQRVPSGAAGGKMAESPCSPSGQQPPSPPSPDELPANVKQAYRAFAAVPTSHPPEDAPAQPPTPGPAASPEQLSFRERQKYFELEVRVPQAEGPPKRVSLVGADDLRKMQEEEARKLQQKRAQMLREAAEAGAEARLALDGETLGEEEQEDEQPPWASPSPTSRQSPASPPPLGGGAPVRTAKAERRHQERLRVQSPEPPAPERALSPAELRALEAEKRALWRAARMKSLEQDALRAQMVLSRSQEGRGTRGPLERLAEAPSPAPTPSPTPVEDLGPQTSTSPGRLSPDFAEELRSLEPSPSPGPQEEDGEVALVLLGRPSPGAVGPEDVALCSSRRPVRPGRRGLGPVPS

SEQ ID NO: 1029064 - protein, 407 aa, Homo sapiens
YALADRDEEEASTEEEDKEGAVVSAPSVKGVSFDQANNLLIEPARIEEEELTLTILRQTGGLGISIAGGKGSTPYKGDDEGIFISRVSEEGPAARAGVRVGDKLLEVNGVALQGAEHHEAVEALRGAGTAVQMRVWRERMVEPENAVTITPLRPEDDYSPRERRGGGLRLPLLPPESPGPLRQRHVACLARSERGLGFSIAGGKGSTPYRAGDAGIFVSRIAEGGAAHRAGTLQVGDRVLSINGVDVTEARHDHAVSLLTAASPTIALLLEREAGGPLPPSPLPHSSPPTAAVATTSITTATPGVPGLPSLAPSLLAAALEGPYPVEEIRLPRAGGPLGLSIVGGSDHSSHPFGVQEPGVFISKVLPRGLASKASGWAPSVVKAMSVPTKSRVPLARLYQDTPARCT

SEQ ID NO: 1029065 - protein, 954 aa, Homo sapiens; identical to SEQ ID NO: 1029063

SEQ ID NO: 1029066 - protein, 863 aa, Homo sapiens
YALADRDEEEASTEEEDKEGAVVSAPSVKGVSFDQANNLLIEPARIEEEELTLTILRQTGGLGISIAGGKGSTPYKGDDEGIFISRVSEEGPAARAGVRVGDKLLEVNGVALQGAEHHEAVEALRGAGTAVQMRVWRERMVEPENAVTITPLRPEDDYSPRERRGGGLRLPLLPPESPGPLRQRHVACLARSERGLGFSIAGGKGSTPYRAGDAGIFVSRIAEGGAAHRAGTLQVGDRVLSINGVDVTEARHDHAVSLLTAASPTIALLLEREAGGPLPPSPLPHSSPPTDPGSERARRAGCHAPRSSQCPAPALPGAVAAGAEGPGTPGPTGTVHPEGTWGEAGHQHPRGCQGPRWQPPRPTDEGIFISKVSPTGAAGRDGRLRVGLRLLEVNQQSLLGLTHGEAVQLLRSVGDTLTVLVCDGFEASTDAALEVSPGVIANPFAAGIGHRNSLESISSIDRELSPEGPGKEKELPGQTLHWGPEATEAAGRGLQPLKLDYRALAAVPSAGSVQRVPSGAAGGKMAESPCSPSGQQPPSPPSPDELPANVKQAYRAFAAVPTSHPPEDAPAQPPTPGPAASPEQLSFRERQKYFELEVRVPQAEGPPKRVSLVGADDLRKMQEEEARKLQQKRAQMLREAAEAGAEARLALDGETLGEEEQEDEQPPWASPSPTSRQSPASPPPLGGGAPVRTAKAERRHQERLRVQSPEPPAPERALSPAELRALEAEKRALWRAARMKSLEQDALRAQMVLSRSQEGRGTRGPLERLAEAPSPAPTPSPTPVEDLGPQTSTSPGRLSPDFAEELRSLEPSPSPGPQEEDGEVALVLLGRPSPGAVGPEDVALCSSRRPVRPGRRGLGPVPS

SEQ ID NO: 1029067 - protein, 719 aa, Homo sapiens
SKLPQPEAVVALLQGMQPDGEGPVAPGGWHNGPHAPWAPRAQKEEEEEEEGSPQEEEEEEEEENRAEEEEPGLPSLAPSLLAAALEGPYPVEEIRLPRAGGPLGLSIVGGSDHSSHPFGVQEPGVFISKVLPRGLAARSGLRVGDRILAVNGQDVRDATHQEAVSALLRPCLELSLLVRRDPAPPGLRELCIQKAAWGEAGHQHPRGCQGPRWQPPRPTDEGIFISKVSPTGAAGRDGRLRVGLRLLEVNQQSLLGLTHGEAVQLLRSVGDTLTVLVCDGFEASTDAALEVSPGVIANPFAAGIGHRNSLESISSIDRELSPEGPGKEKELPGQTLHWGPEATEAAGRGLQPLKLDYRALAAVPSAGSVQRVPSGAAGGKMAESPCSPSGQQPPSPPSPDELPANVKQAYRAFAAVPTSHPPEDAPAQPPTPGPAASPEQLSFRERQKYFELEVRVPQAEGPPKRVSLVGADDLRKMQEEEARKLQQKRAQMLREAAEAGAEARLALDGETLGEEEQEDEQPPWASPSPTSRQSPASPPPLGGGAPVRTAKAERRHQERLRVQSPEPPAPERALSPAELRALEAEKRALWRAARMKSLEQDALRAQMVLSRSQEGRGTRGPLERLAEAPSPAPTPSPTPVEDLGPQTSTSPGRLSPDFAEELRSLEPSPSPGPQEEDGEVALVLLGRPSPGAVGPEDVALCSSRRPVRPGRRGLGPVPS

SEQ ID NO: 1029068 - protein, 1121 aa, Homo sapiens
YALADRDEEEASTEEEDKEGAVVSAPSVKGVSFDQANNLLIEPARIEEEELTLTILRQTGGLGISIAGGKGSTPYKGDDEGIFISRVSEEGPAARAGVRVGDKLLEVNGVALQGAEHHEAVEALRGAGTAVQMRVWRERMVEPENAVTITPLRPEDDYSPRERRGGGLRLPLLPPESPGPLRQRHVACLARSERGLGFSIAGGKGSTPYRAGDAGIFVSRIAEGGAAHRAGTLQVGDRVLSINGVDVTEARHDHAVSLLTAASPTIALLLEREAGGPLPPSPLPHSSPPTAAVATTSITTATPGVPGLPSLAPSLLAAALEGPYPVEEIRLPRAGGPLGLSIVGGSDHSSHPFGVQEPGVFISKVLPRGLAARSGLRVGDRILAVNGQDVRDATHQEAVSALLRPCLELSLLVRRDPAPPGLRELCIQKAAWGEAGHQHPRGCQGPRWQPPRPTDEGIFISKVSPTGAAGRDGRLRVGLRLLEVNQQSLLGLTHGEAVQLLRSVGDTLTVLVCDGFEASTDAALEVSPGVIANPFAAGIGHRNSLESISSIDRELSPEGPGKEKELPGQTLHWGPEATEAAGRGLQPLKLDYRALAAVPSAGSVQRVPSGAAGGKMAESPCSPSGQQPPSPPSPDELPANVKQAYRAFAAVPTSHPPEDAPAQVQSPPQNPTRPWALTDSTGSSMSLHEAAAESTYMTMEVLQCHQGQAGEPRHKTRSTLDGVHDRTNAGAHCQERTAQPRQALTDTKRRRAGHACRSRRRQQEPAGPHTAEGIQHHGTRGQQRQEADGTATHSDGLEARHKNRGNHEPRTTAKTMTETTKRQQDGKNNNRRHQRAEANMRRPHTSRTAKRETTHTPGHATEHHTTDTRTHETNDTKKPSTRKQHGDKSRRSHRGNKTPNNEPRKETEREKKQESNEHTSGRQERKTTQDRDKRARGESRRPRKGDDRNSKNREHTEKQEENKKAKGHHTRERNRDSNEKEEPQKGEQGDQNDQYGEDSQTQEKRQRTSSDKGQRKTNRDSNKATQDQERKPGNRQQQRETAAGETEEREKKERRSRDRERTEEQASRDKANREQRERGRKRKERTEETAERQQNNNERKNQEKSTGGTRQQEARRQNTTK

SEQ ID NO: 1029069 - protein, 182 aa, Homo sapiens
  misc_feature (1)..(1): Xaa can be any naturally occurring amino acid
  misc_feature (71)..(71): Xaa can be any naturally occurring amino acid
XADVAELLLYTFLVVLSDAAVGLEVSGWCCGFPRAFRCVFTRGLNPEIGGSSPVWTFPPRSKIVPNSPSPXEKVFPGEFRRIKLAEGVRQSHELRVLKQLGGESRAPRKKWLQKAIVETTTSVKWQKSTDPPKWELIKRTERHQMAAKLERLREKDKHHCKKCGRTKNPKSLLTRLKLTNLF

SEQ ID NO: 1029070 - protein, 181 aa, Homo sapiens
AALWASAQALRRTTSRPLVDWDRKWRVLGLSVFLARGSGVSCADRSEGSWPTAPSRSLPPPSTLSVVEKMVGRNSAIAAGVCGALFIGYCIYFDRKRRSDPNFKNRLRERRKKQKLAKERAGLSKLPDLKDAEAVQKFFLEEIQLGEELLAQVFIGRNGYCKVPEKVNLPNQGHTVNMRRA

SEQ ID NO: 1029071 - protein, 186 aa, Homo sapiens
  misc_feature (13)..(13): Xaa can be any naturally occurring amino acid
KKQAQYIIGRYRXEFVRGSVPGPRPSGVSCADRSEGSWPTAPSRSLPPPSTLSVVEKMVGRNSAIAAGVCGALFIGYCIYFDRKRRSDPNFKNRLRERRKKQKLAKERAGLSKLPDLKDAEAVQKFFLEEIQLGEELLAQGEYEKGVDHLTNAIAVCGQPQQLLQVLQQTLPPPVFQMLLTKLPNN

SEQ ID NO: 1029072 - protein, 198 aa, Homo sapiens
AALWASAQALRRTTSRPLVDWDRKWRVLGLSVFLARGSGVSCADRSEGSWPTAPSRSLPPPSTLSVVEKMVGRNSAIAAGVCGALFIGYCIYFDRKRRSDPNFKNRLRERRKKQKLAKERAGLSKLPDLKDAEAVQKFFLEEIQLGEELLAQGEYEKGVDHLTNAIAVCGQPQQLLQVLQQTLPPPVFQMLLTKLPNN

SEQ ID NO: 1029073 - protein, 350 aa, Homo sapiens
MAGRLLGKALAAVSLSLALASVTIRSSRCRGIQAFRNSFSSSWFHLNTNVMSGSNGSKENSHNKARTSPYPGSKVERSQVPNEKVGWLVEWQDYKPVEYTAVSVLAGPRWADPQISESNFSPKFNEKDGHVERKSKNGLYEIENGRPRNPAGRTGLVGRGLLGRWGPNHAADPIITRWKRDSSGNKIMHPVSGKHILQFVAIKRKDCGEWAIPGGMVDPGEKISATLKREFGEEALNSLQKTSAEKREIEEKLHKLFSQDHLVIYKGYVDDPRNTDNAWMETEAVNYHDETGEIMDNLMLEAGDDAGKVKWVDINDKLKLYASHSQFIKLVAEKRDAHWSEDSEADCHAL

SEQ ID NO: 1029074 - protein, 314 aa, Homo sapiens
MAGRLLGKALAAVSLSLALASVTIRSSRCRGIQAFRNSFSSSWFHLNTNVMSGSNGSKENSHNKARTSPYPGSKVERSQVPNEKVGWLVEWQDYKPVEYTAVSVLAGPRWADPQISESNFSPKFNEKDGHVERKSKNGLYEIENGRPRNPAGRTGLVGRGLLGRWGPNHAADPIITRWKRDSSGNKIMHPVSGKHILQFVAIKRKDCGEWAIPGGMVDPGEKISATLKREFGEEALNSLQKTSAEKREIEEKLHKLFSQDHLVIYKGYVDDPRNTDNAWMETEAVNYHDETGEIMDNLMLEAGDDAGSIHQTCG

SEQ ID NO: 1029075 - protein, 315 aa, Homo sapiens
MAGRLLGKALAAVSLSLALASVTIRSSRCRGIQAFRNSFSSSWFHLNTNVMSGSNGSKENSHNKARTSPYPGSKVERSQVPNEKVGWLVEWQDYKPVEYTAVSVLAGPRWADPQISESNFSPKFNEKDGHVERKSKNGLYEIENGRPRNPAGRTGLVGRGLLGRWGPNHAADPIITRWKRDSSGNKIMHPVSGKHILQFVAIKRKDCGEWAIPGGMVDPGEKISATLKREFGEEALNSLQKTSAEKREIEEKLHKLFSQDHLVIYKGYVDDPRNTDNAWMETEAVNYHDETGEIIARRLNPSPTVFTLLVSLYLH

SEQ ID NO: 1029076 - protein, 93 aa, Homo sapiens
GGAAQSAITQRESYEVRGRGFPRQLALEASASRAGLDNSRSANGWFDEAQNGKEYEISKIDVKDMEAPLNKDARTSKQDQISRHRTGNPRDLR

SEQ ID NO: 1029077 - protein, 329 aa, Homo sapiens
AARRKAPLRREKVTRNSFSSSWFHLNTNVMSGSNGSKENSHNKARTSPYPGSKVERSQVPNEKVGWLVEWQDYKPVEYTAVSVLAGPRWADPQISESNFSPKFNEKDGHVERKSKNGLYEIENGRPRNPAGRTGLVGRGLLGRWGPNHAADPIITRWKRDSSGNKIMHPVSGKHILQFVAIKRKDCGEWAIPGGMVDPGEKISATLKREFGEEALNSLQKTSAEKREIEEKLHKLFSQDHLVIYKGYVDDPRNTDNAWMETEAVNYHDETGEIMDNLMLEAGDDAGKVKWVDINDKLKLYASHSQFIKLVAEKRDAHWSEDSEADCHAL

SEQ ID NO: 1029078 - protein, 163 aa, Homo sapiens [sequence omitted]

SEQ ID NO: 1029079 - protein, 315 aa, Homo sapiens
MAGRLLGKALAAVSLSLALASVTIRSSRCRGIQAFRNSFSSSWFHLNTNVMSGSNGSKENSHNKARTSPYPGSKVERSQVPNEKVGWLVEWQDYKPVEYTAVSVLAGPRWADPQISESNFSPKFNEKDGHVERKSKNGLYEIENGRPRNPAGRTGLVGRGLLGRWGPNHAADPIITRWKRDSSGNKIMHPVSGKHILQFVAIKRKDCGEWAIPGGMVDPGEKISATLKREFGEEALNSLQKTSAEKREIEEKLHKLFSQDHLVIYKGYVDDPRNTDNAWMETEAVNYHDETGEIMDNLMLEAGDDAGRCTLERGL

SEQ ID NO: 1029080 - protein, 350 aa, Homo sapiens; identical to SEQ ID NO: 1029073

SEQ ID NO: 1029081 - protein, 300 aa, Homo sapiens
MSGSNGSKENSHNKARTSPYPGSKVERSQVPNEKVGWLVEWQDYKPVEYTAVSVLAGPRWADPQISESNFSPKFNEKDGHVERKSKNGLYEIENGRPRNPAGRTGLVGRGLLGRWGPNHAADPIITRWKRDSSGNKIMHPVSGKHILQFVAIKRKDCGEWAIPGGMVDPGEKISATLKREFGEEALNSLQKTSAEKREIEEKLHKLFSQDHLVIYKGYVDDPRNTDNAWMETEAVNYHDETGEIMDNLMLEAGDDAGKVKWVDINDKLKLYASHSQFIKLVAEKRDAHWSEDSEADCHAL

SEQ ID NO: 1029082 - protein, 148 aa, Homo sapiens
MGPKSRCRSHYKGMVDPGEKISATLKREFGEEALNSLQKTSAEKREIEEKLHKLFSQDHLVIYKGYVDDPRNTDNAWMETEAVNYHDETGEIMDNLMLEAGDDAGKVKWVDINDKLKLYASHSQFIKLVAEKRDAHWSEDSEADCHAL

SEQ ID NO: 1029083 - protein, 1171 aa, Homo sapiens
MKRRLDDQESPVYAAQQRRIPGSTEAFPHQHRVLAPAPPVYEAVSETMQSATGIQYSVTPSYQVSAMPQSSGSHGPAIAAVHSSHHHPTAVQPHGGQVVQSHAHPAPPVAPVQGQQQFQRLKVEDALSYLDQVKLQFGSQPQVYNDFLDIMKEFKSQSIDTPGVISRVSQLFKGHPDLIMGFNTFLPPGYKIEVQTNDMVNVTTPGQVHQIPTHGIQPQPQPPPQHPSQPSAQSAPAPAQPAPQPPPAKVSKPSQLQAHTPASQQTPPLPPYASPRSPPVQPHTPVTISLGTAPSLQNNQPVEFNHAINYVNKIKNRFQGQPDIYKAFLEILHTYQKEQRNAKEAGGNYTPALTEQEVYAQVARLFKNQEDLLSEFGQFLPDANSSVLLSKTTAEKVDSVRNDHGGTVKKPQLNNKPQRPSQNGCQIRRHPTGTTPPVKKKPKLLNLKDSSMADASKHGGGTESLFFDKVRKALRSAEAYENFLRCLVIFNQEVISRAELVQLVSPFLGKFPELFNWFKNFLGYKESVHLETYPKERATEGIAMEIDYASCKRLGSSYRALPKSYQQPKCTGRTPLCKEVLNDTWVSFPSWSEDSTFVSSKKTQYEEHIYRCEDERFELDVVLETNLATIRVLEAIQKKLSRLSAEEQAKFRLDNTLGGTSEVIHRKALQRIYADKAADIIDGLRKNPSIAVPIVLKRLKMKEEEWREAQRGFNKVWREQNEKYYLKSLDHQGINFKQNDTKVLRSKSLLNEIESIYDERQEQATEENAGVPVGPHLSLAYEDKQILEDAAALIIHHVKRQTGIQKEDKYKIKQIMHHFIPDLLFAQRGDLSDVEEEEEEEMDVDEATGAVKKHNGVGGSPPKSKLLFSNTAAQKLRGMDEVYNLFYVNNNWYIFMRLHQILCLRLLRICSQAERQIEEENREREWEREVLGIKRDKSDSPAIQLRLKEPMDVDVEDYYPAFLDMVRSLLDGNIDSSQYEDSLREMFTIHAYIAFTMDKLIQSIVRQLQHIVSDEICVQVTDLYLAENNNGATGGQLNTQNSGALLESTYQRKAEQLMSDENCFKLMFIQSQGQVQLTIELLDTEEENSDDPVEAERWSDYVERYMNSDTTSPELREHLAQKPVFLPRNLRRIRKCQRGREQQEKEGKEGNSKKTMENVDSLDKLECRFKL

SEQ ID NO: 1029084 - protein, 1171 aa, Homo sapiens
MKRRLDDQESPVYAAQQRRIPGSTEAFPHQHRVLAPAPPVYEAVSETMQSATGIQYSVTPSYQVSAMPQSSGSHGPAIAAVHSSHHHPTAVQPHGGQVVQSHAHPAPPVAPVQGQQQFQRLKVEDALSYLDQVKLQFGSQPQVYNDFLDIMKEFKSQSIDTPGVISRVSQLFKGHPDLIMGFNTFLPPGYKIEVQTNDMVNVTTPGQVHQIPTHGIQPQPQPPPQHPSQPSAQSAPAPAQPAPQPPPAKVSKPSQLQAHTPASQQTPPLPPYASPRSPPVQPHTPVTISLGTAPSLQNNQPVEFNHAINYVNKIKNRFQGQPDIYKAFLEILHTYQKEQRNAKEAGGNYTPALTEQEVYAQVARLFKNQEDLLSEFGQFLPDANSSVLLSKTTAEKVDSVRNDHGGTVKKPQLNNKPQRPSQNGCQIRRHPTGTTPPVKKKPKLLNLKDSSMADASKHGGGTESLFFDKVRKALRSAEAYENFLRCLVIFNQEVISRAELVQLVSPFLGKFPELFNWFKNFLGYKESVHLETYPKERATEGIAMEIDYASCKRLGSSYRALPKSYQQPKCTGRTPLCKEVLNDTWVSFPSWSEDSTFVSSKKTQYEEHIYRCEDERFELDVVLETNLATIRVLEAIQKKLSRLSAEEQAKFRLDNTLGGTSEVIHRKALQRIYADKAADIIDGLRKNPSIAVPIVLKRLKMKEEEWREAQRGFNKVWREQNEKYYLKSLDHQGINFKQNDTKVLRSKSLLNEIESIYDERQEQATEENAGVPVGPHLSLAYEDKQILEDAAALIIHHVKRQTGIQKEDKYKIKQIMHHFIPDLLFAQRGDLSDVEEEEEEEMDVDEATGAVKKHNGVGGSPPKSKLLFSNTAAQKLRGMDEVYNLFYVNNNWYIFMRLHQILCLRLLRICSQAERQIEEENREREWEREVLGIKRDKSDSPAIQLRLKEPMDVDVEDYYPAFLDMVRSLLDGNIDSSQYEDSLREMFTIHAYIAFTMDKLIQSIVRQLQHIVSDEICVQVTDLYLAENNNGATGGQLNTQNSRSLLESTYQRKAEQLMSDENCFKLMFIQSQGQVQLTIELLDTEEENSDDPVEAERWSDYVERYMNSDTTSPELREHLAQKPVFLPRNLRRIRKCQRGREQQEKEGKEGNSKKTMENVDSLDKLECRFKL

SEQ ID NO: 1029085 - protein, 373 aa, Homo sapiens
MKRRLDDQESPVYAAQQRRIPGSTEAFPHQHRVLAPAPPVYEAVSETMQSATGIQYSVTPSYQVSAMPQSSGSHGPAIAAVHSSHHHPTAVQPHGGQVVQSHAHPAPPVAPVQGQQQFQRLKVEDALSYLDQVKLQFGSQPQVYNDFLDIMKEFKSQSIDTPGVISRVSQLFKGHPDLIMGFNTFLPPGYKIEVQTNDMVNVTTPGQVHQIPTHGIQPQPQPPPQHPSQPSAQSAPAPAQPAPQPPPAKVSKPSQLQAHTPASQQTPPLPPYASPRSPPVQPHTPVTISLGTAPSLQNNQPVEFNHAINYVNKIKNRFQGQPDIYKAFLEILHTYQKEQRNAKEAGGNYTPALTEHVPREMAAETSKWLMGEG

SEQ ID NO: 1029086 - protein, 102 aa, Homo sapiens
MKRRLDDQESPVYAAQQRRIPGSTEAFPHQHRVLAPAPPVYEAVSETMQSATGIQYSVTPSYQVSWSQPRDKNEGREIVVLGNYKTFFNTVLDIKNLLSMCK

SEQ ID NO: 1029087 - protein, 1186 aa, Homo sapiens
MIDFAAACIPEHEHRMKRRLDDQESPVYAAQQRRIPGSTEAFPHQHRVLAPAPPVYEAVSETMQSATGIQYSVTPSYQVSAMPQSSGSHGPAIAAVHSSHHHPTAVQPHGGQVVQSHAHPAPPVAPVQGQQQFQRLKVEDALSYLDQVKLQFGSQPQVYNDFLDIMKEFKSQSIDTPGVISRVSQLFKGHPDLIMGFNTFLPPGYKIEVQTNDMVNVTTPGQVHQIPTHGIQPQPQPPPQHPSQPSAQSAPAPAQPAPQPPPAKVSKPSQLQAHTPASQQTPPLPPYASPRSPPVQPHTPVTISLGTAPSLQNNQPVEFNHAINYVNKIKNRFQGQPDIYKAFLEILHTYQKEQRNAKEAGGNYTPALTEQEVYAQVARLFKNQEDLLSEFGQFLPDANSSVLLSKTTAEKVDSVRNDHGGTVKKPQLNNKPQRPSQNGCQIRRHPTGTTPPVKKKPKLLNLKDSSMADASKHGGGTESLFFDKVRKALRSAEAYENFLRCLVIFNQEVISRAELVQLVSPFLGKFPELFNWFKNFLGYKESVHLETYPKERATEGIAMEIDYASCKRLGSSYRALPKSYQQPKCTGRTPLCKEVLNDTWVSFPSWSEDSTFVSSKKTQYEEHIYRCEDERFELDVVLETNLATIRVLEAIQKKLSRLSAEEQAKFRLDNTLGGTSEVIHRKALQRIYADKAADIIDGLRKNPSIAVPIVLKRLKMKEEEWREAQRGFNKVWREQNEKYYLKSLDHQGINFKQNDTKVLRSKSLLNEIESIYDERQEQATEENAGVPVGPHLSLAYEDKQILEDAAALIIHHVKRQTGIQKEDKYKIKQIMHHFIPDLLFAQRGDLSDVEEEEEEEMDVDEATGAVKKHNGVGGSPPKSKLLFSNTAAQKLRGMDEVYNLFYVNNNWYIFMRLHQILCLRLLRICSQAERQIEEENREREWEREVLGIKRDKSDSPAIQLRLKEPMDVDVEDYYPAFLDMVRSLLDGNIDSSQYEDSLREMFTIHAYIAFTMDKLIQSIVRQLQHIVSDEICVQVTDLYLAENNNGATGGQLNTQNSGALLESTYQRKAEQLMSDENCFKLMFIQSQGQVQLTIELLDTEEENSDDPVEAERWSDYVERYMNSDTTSPELREHLAQKPVFLPRNLRRIRKCQRGREQQEKEGKEGNSKKTMENVDSLDKLECRFKL

SEQ ID NO: 1029088 - protein, 1013 aa, Homo sapiens
VLDEVRRKLYGMPTDFGFCVKVKTWPGLAPGYKIEVQTNDMVNVTTPGQVHQIPTHGIQPQPQPPPQHPSQPSAQSAPAPAQPAPQPPPAKVSKPSQLQAHTPASQQTPPLPPYASPRSPPVQPHTPVTISLGTAPSLQNNQPVEFNHAINYVNKIKNRFQGQPDIYKAFLEILHTYQKEQRNAKEAGGNYTPALTEQEVYAQVARLFKNQEDLLSEFGQFLPDANSSVLLSKTTAEKVDSVRNDHGGTVKKPQLNNKPQRPSQNGCQIRRHPTGTTPPVKKKPKLLNLKDSSMADASKHGGGTESLFFDKVRKALRSAEAYENFLRCLVIFNQEVISRAELVQLVSPFLGKFPELFNWFKNFLGYKESVHLETYPKERATEGIAMEIDYASCKRLGSSYRALPKSYQQPKCTGRTPLCKEVLNDTWVSFPSWSEDSTFVSSKKTQYEEHIYRCEDERFELDVVLETNLATIRVLEAIQKKLSRLSAEEQAKFRLDNTLGGTSEVIHRKALQRIYADKAADIIDGLRKNPSIAVPIVLKRLKMKEEEWREAQRGFNKVWREQNEKYYLKSLDHQGINFKQNDTKVLRSKSLLNEIESIYDERQEQATEENAGVPVGPHLSLAYEDKQILEDAAALIIHHVKRQTGIQKEDKYKIKQIMHHFIPDLLFAQRGDLSDVEEEEEEEMDVDEATGAVKKHNGVGGSPPKSKLLFSNTAAQKLRGMDEVYNLFYVNNNWYIFMRLHQILCLRLLRICSQAERQIEEENREREWEREVLGIKRDKSDSPAIQLRLKEPMDVDVEDYYPAFLDMVRSLLDGNIDSSQYEDSLREMFTIHAYIAFTMDKLIQSIVRQLQHIVSDEICVQVTDLYLAENNNGATGGQLNTQNSGALLESTYQRKAEQLMSDENCFKLMFIQSQGQVQLTIELLDTEEENSDDPVEAERWSDYVERYMNSDTTSPELREHLAQKPVFLPRNLRRIRKCQRGREQQEKEGKEGNSKKTMENVDSLDKLECRFKL

SEQ ID NO: 1029089 - protein, 156 aa, Homo sapiens
MKRRLDDQESPVYAAQQRRIPGSTEAFPHQHRVLAPAPPVYEAVSETMQSATGIQYSVTPSYQVSAMPQSSGSHGPAIAAVHSSHHHPTAVQPHGGQVVQSHAHPAPPVAPVQGQQQFQRLKVVFSSFSWVKKFIFSRKYWLQLVGCGGTTSNLRY

SEQ ID NO: 1029090 - protein, 734 aa, Homo sapiens
LEDRIRAACIPEHEHRMKRRLDDQESPVYAAQQRRIPGSTEAFPHQHRVLAPAPPVYEAVSETMQSATGIQYSVTPSYQVSAMPQSSGSHGPAIAAVHSSHHHPTAVQPHGGQVVQSHAHPAPPVAPVQGQQQFQRLKVEDALSYLDQVKLQFGSQPQVYNDFLDIMKEFKSQSIDTPGVISRVSQLFKGHPDLIMGFNTFLPPGYKIEVQTNDMVNVTTPGQVHQIPTHGIQPQPQPPPQHPSQPSAQSAPAPAQPAPQPPPAKVSKPSQLQAHTPASQQTPPLPPYASPRSPPVQPHTPVTISLGTAPSLQNNQPVEFNHAINYVNKIKNRFQGQPDIYKAFLEILHTYQKEQRNAKEAGGNYTPALTEQEVYAQVARLFKNQEDLLSEFGQFLPDANSSVLLSKTTAEKVDSVRNDHGGTVKKPQLNNKPQRPSQNGCQIRRHPTGTTPPVKKKPKLLNLKDSSMADASKHGGGTESLFFDKVRKALRSAEAYENFLRCLVIFNQEVISRAELVQLVSPFLGKFPELFNWFKNFLGYKESVHLETYPKERATEGIAMEIDYASCKRLGSSYRALPKSYQQPKCTGRTPLCKEVLNDTWVSFPSWSEDSTFVSSKKTQYEEHIYRCEDERFELDVVLETNLATIRVLEAIQKKLSRLSAEEQAKFRLDNTLGGTSEVIHRKALQRIYADKAADIIDGLRKNPSIAVPIVLKRYMSKCALSALVYFTTGSVSH

SEQ ID NO: 1029091 - protein, 430 aa, Homo sapiens
MLSLLDISQNTFVSLSHQRQEQATEENAGVPVGPHLSLAYEDKQILEDAAALIIHHVKRQTGIQKEDKYKIKQIMHHFIPDLLFAQRGDLSDVEEEEEEEMDVDEATGAVKKHNGVGGSPPKSKLLFSNTAAQKLRGMDEVYNLFYVNNNWYIFMRLHQILCLRLLRICSQAERQIEEENREREWEREVLGIKRDKSDSPAIQLRLKEPMDVDVEDYYPAFLDMVRSLLDGNIDSSQYEDSLREMFTIHAYIAFTMDKLIQSIVRQLQHIVSDEICVQVTDLYLAENNNGATGGQLNTQNSGALLESTYQRKAEQLMSDENCFKLMFIQSQGQVQLTIELLDTEEENSDDPVEAERWSDYVERYMNSDTTSPELREHLAQKPVFLPRNLRRIRKCQRGREQQEKEGKEGNSKKTMENVDSLDKLECRFKL

SEQ ID NO: 1029092 - protein, 368 aa, Homo sapiens
TKEKERTRTLLLGTSWLVITAEEDFTRILQMEEEYIQQLCEDIIQLKPDVVITEKGISDLAQHYLMRANITAIRRVRKTDNNRIARACGARIVSRPEELREDDVGTGAGLLEIKKIGDEYFTFITDCKDPKACTILLRWVLANEILLGSRTQPPGCHASVSQCSPGPSAGARGWGLRDGCGPCLDRKIQVHDLVVEQLANMGCCQALEVIPRTLIQNCGASTIRLLTSLRAKHTQENCETWGVNGETGTLVDMKELGIWEPLAVKLQTYKTAVETAVLLLRIDDIVSGHKKKGDDQSPARRGSLMLARSECYARLQFNCDRTSRVSPFPAARVPGTLWTSLFRRDQVGGQPPDPFLFRAQIFPKTLTC

SEQ ID NO: 1029093 - protein, 236 aa, Homo sapiens
MSHQEFGFILSVCFSKEVERNLQDAMQVCRNVLLDPQLVPGGGASEMAVAHALTEKSKAMTGVEQWPYRAVAQALEVIPRTLIQNCGASTIRLLTSLRAKHTQENCETWGVNGETGTLVDMKELGIWEPLAVKLQTYKTAVETAVLLLRIDDIVSGHKKKGDDQSPARRGSLMLARSECYARLQFNCDRTSRVSPFPAARVPGTLWTSLFRRDQVGGQPPDPFLFRAQIFPKTLTC

SEQ ID NO: 1029094 - protein, 400 aa, Homo sapiens
SSLACNIALDAVKMVQFEENGRKEIDIKKYARVEKIPGGIIEDSCVLRGVMINKDVTHPRMRRYINEPSSLCCWIAVLPGKYQKKKGRQKGPELDIEITREEDFTRILQMEEEYIQQLCEDIIQLKPDVVITEKGISDLAQHYLMRANITAIRRVRKTDNNRIARACGARIVSRPEELREDDVGTGAGLLEIKKIGDEYFTFITDCKDPKACTILLRGASKEILSEVERNLQDAMQVCRNVLLDPQLVPGGGASEMAVAHALTEKSKAMTGVEQWPYRAVAQALEVIPRTLIQNCGASTIRLLTSLRAKHTQENCETWGVNGETGTLVDMKELGIWEPLAVKLQTYKTAVETAVLLLRIDDIVSGHKKKGDDQSPARRGSLMLARSECYARLQFNCDRTS

SEQ ID NO: 1029095 - protein, 427 aa, Homo sapiens
SSLACNIALDAVKMVQFEENGRKEIDIKKYARVEKIPGGIIEDSCVLRGVMINKDVTHPRMRRYINEPSSLCCWIAVLPGKYQKKKGRQKGPELDIEITREEDFTRILQMEEEYIQQLCEDIIQLKPDVVITEKGISDLAQHYLMRANITAIRRVRKTDNNRIARACGARIVSRPEELREDDVGTGAGLLEIKKIGDEYFTFITDCKDPKACTILLRGASKEILSEVERNLQDAMQVCRNVLLDPQLVPGGGASEMAVAHALTEALEVIPRTLIQNCGASTIRLLTSLRAKHTQENCETWGVNGETGTLVDMKELGIWEPLAVKLQTYKTAVETAVLLLRIDDIVSGHKKKGDDQSPARRGSLMLARSECYARLQFNCDRTSRVSPFPAARVPGTLWTSLFRRDQVGGQPPDPFLFRAQIFPKTLTC

SEQ ID NO: 1029096 - protein, 301 aa, Homo sapiens
  misc_feature (8)..(8): Xaa can be any naturally occurring amino acid
  misc_feature (21)..(21): Xaa can be any naturally occurring amino acid
  misc_feature (31)..(31): Xaa can be any naturally occurring amino acid
  misc_feature (37)..(37): Xaa can be any naturally occurring amino acid
  misc_feature (55)..(55): Xaa can be any naturally occurring amino acid
GLLGGEIXRNKGRKEKFSPCXKVGDRKILVXTGKTVXSQRKKIQFNQEEERLKNXRTVFVGNLPVTCNKKKLKSSFKEYAQIESVRFRSLIPAEGTLSKKLAAIKRKIHPDQKNINAYVVFKEESAATQALKRNGAQIADGFRIRVDLASETSSRDKRSVFVGNLPYKVEESAIEKHFLDCGSIMAVRIVRDKMTGIGKGFGYVLFENTDSVHLALKLNNSELMGRKLRVMRSVNKEKFKQQNSNPRLKNVSKPKQGLNFTSKTAEGHPKSLFIGEKAVLLKTKKKGQKKSGRPKKQRKQK

SEQ ID NO: 1029097 - protein, 334 aa, Homo sapiens
  misc_feature (1)..(1): Xaa can be any naturally occurring amino acid
XEKKQGSIKEENKGASSTRPPNNAGEPRPCTPQGENPQMQREAWSYKKSQTAKRNSHLVLSSEAILRTRRHQSSLKKKFKSPEKRDKEGETVLLELPVTCNKKKLKSSFKEYAQIESVRFRSLIPAEGTLSKKLAAIKRKIHPDQKNINAYVVFKEESAATQALKRNGAQIADGFRIRVDLASETSSRDKRSVFVGNLPYKVEESAIEKHFLDCGSIMAVRIVRDKMTGIGKGFGYVLFENTDSVHLALKLNNSELMGRKLRVMRSVNKEKFKQQNSNPRLKNVSKPKQGLNFTSKTAEGHPKSLFIGEKAVLLKTKKKGQKKSGRPKKQRKQK

SEQ ID NO: 1029098 - protein, 334 aa, Homo sapiens; identical to SEQ ID NO: 1029097
  misc_feature (1)..(1): Xaa can be any naturally occurring amino acid

SEQ ID NO: 1029099 - protein, 283 aa, Homo sapiens
  misc_feature (8)..(8): Xaa can be any naturally occurring amino acid
  misc_feature (21)..(21): Xaa can be any naturally occurring amino acid
  misc_feature (31)..(31): Xaa can be any naturally occurring amino acid
  misc_feature (37)..(37): Xaa can be any naturally occurring amino acid
  misc_feature (55)..(55): Xaa can be any naturally occurring amino acid
GLLGGEIXRNKGRKEKFSPCXKVGDRKILVXTGKTVXSQRKKIQFNQEEERLKNXRTVFVGNLPVTCNKKKLKSSFKEYAQIESVRFRSLIPAEGTLSKKLAAIKRKIHPDQKNINAYVVFKEESAATQALKRNGAQIADGFRVGNLPYKVEESAIEKHFLDCGSIMAVRIVRDKMTGIGKGFGYVLFENTDSVHLALKLNNSELMGRKLRVMRSVNKEKFKQQNSNPRLKNVSKPKQGLNFTSKTAEGHPKSLFIGEKAVLLKTKKKGQKKSGRPKKQRKQK

SEQ ID NO: 1029100 - protein, 163 aa, Homo sapiens
  misc_feature (8)..(8): Xaa can be any naturally occurring amino acid
  misc_feature (21)..(21): Xaa can be any naturally occurring amino acid
  misc_feature (31)..(31): Xaa can be any naturally occurring amino acid
  misc_feature (37)..(37): Xaa can be any naturally occurring amino acid
  misc_feature (55)..(55): Xaa can be any naturally occurring amino acid
GLLGGEIXRNKGRKEKFSPCXKVGDRKILVXTGKTVXSQRKKIQFNQEEERLKNXRTVFVGNLPVTCNKKKLKSSFKEYAQIESVRFRSLIPAEGTLSKKLAAIKRKIHPDQKNINAYVVFKEESAATQALKRNGAQIADGFRIRVDLASETSSRIQILFILL

SEQ ID NO: 1029101 - protein, 130 aa, Homo sapiens
MGSGARFPSGTLRVRWLLLLGLVGPVLGAARPGFQQTSHLSSYEIITPWRLTRERREAPRPYSKQVSYVIQAEGKEHIIHLERNKDLLPEDFVVYTYNKEGTLITDHPNIQVMYFSLDPIANFKTIIIYK

SEQ ID NO: 1029102 - protein, 826 aa, Homo sapiens
MGSGARFPSGTLRVRWLLLLGLVGPVLGAARPGFQQTSHLSSYEIITPWRLTRERREAPRPYSKQVSYVIQAEGKEHIIHLERNKDLLPEDFVVYTYNKEGTLITDHPNIQNHCHYRGYVEGVHNSSIALSDCFGLRGLLHLENASYGIEPLQNSSHFEHIIYRMDDVYKEPLKCGVSNKDIEKETAKDEEEEPPSMTQLLRRRRAVLPQTRYVELFIVVDKERYDMMGRNQTAVREEMILLANYLDSMYIMLNIRIVLVGLEIWTNGNLINIVGGAGDVLGNFVQWREKFLITRRRHDSAQLVLKKGFGGTAGMAFVGTVCSRSHAGGINVFGQITVETFASIVAHELGHNLGMNHDDGRDCSCGAKSCIMNSGASGSRNFSSCSAEDFEKLTLNKGGNCLLNIPKPDEAYSAPSCGNKLVDAGEECDCGTPKECELDPCCEGSTCKLKSFAECAYGDCCKDCRFLPGGTLCRGKTSECDVPEYCNGSSQFCQPDVFIQNGYPCQNNKAYCYNGMCQYYDAQCQVIFGSSCTEISCSILSTMLQEAVRQTGTYLGGSVLVAGKVIVGSDLVKNALCGKLQCENVQEIPVFGIVPAIIQTPSRGTKCWGVDFQLGSDVPDPGMVNEGTKCGAGKICRNFQCVDASVLNYDCDVQKKCHGHGVCNSNKNCHCENGWAPPNCETKGYGGSVDSGPTYNEMNTALRDGLLVFFFLIVPLIVCAIFIFIKRDQLWRSYFRKKRSQTYESDGKNQANPSRQPGSVPRHVSPVTPPREVPIYANRFAVPTYAAKQPQQFPSRPPPPQPKVSSQGNLIPARPAPAPPLYSSLT

SEQ ID NO: 1029103 - protein, 836 aa, Homo sapiens
MGSGARFPSGTLRVRWLLLLGLVGPVLGAARPGFQQTSHLSSYEIITPWRLTRERREAPRPYSKQVSYVIQAEGKEHIIHLERNKDLLPEDFVVYTYNKEGTLITDHPNIQNHCHYRGYVEGVHNSSIALSDCFGLRGLLHLENASYGIEPLQNSSHFEHIIYRMDDVYKEPLKCGVSNKDIEKETAKDEEEEPPSMTQLLRRRRAVLPQTRYVELFIVVDKERYDMMGRNQTAVREEMILLANYLDSMYIMLNIRIVLVGLEIWTNGNLINIVGGAGDVLGNFVQWREKFLITRRRHDSAQLVLKKGFGGTAGMAFVGTVCSRSHAGGINVFGQITVETFASIVAHELGHNLGMNHDDGRDCSCGAKSCIMNSGASGSRNFSSCSAEDFEKLTLNKGGNCLLNIPKPDEAYSAPSCGNKLVDAGEECDCGTPKECELDPCCEGSTCKLKSFAECAYGDCCKDCRFLPGGTLCRGKTSECDVPEYCNGSSQFCQPDVFIQNGYPCQNNKAYCYNGMCQYYDAQCQVIFGSKAKAAPKDCFIEVNSKGDRFGNCGFSGNEYKKCATGNALCGKLQCENVQEIPVFGIVPAIIQTPSRGTKCWGVDFQLGSDVPDPGMVNEGTKCGAGKICRNFQCVDASVLNYDCDVQKKCHGHGVCNSNKNCHCENGWAPPNCETKGYGGSVDSGPTYNEMNTALRDGLLVFFFLIVPLIVCAIFIFIKRDQLWRSYFRKKRSQTYESDGKNQANPSRQPGSVPRHVSPVTPPREVPIYANRFAVPTYAAKQPQQFPSRPPPPQPKVSSQGNLIPARPPTMGTRFKHETKTPSPRPTSNTGDQISA

SEQ ID NO: 1029104 - protein, 581 aa, Homo sapiens
MILLANYLDSMYIMLNIRIVLVGLEIWTNGNLINIVGGAGDVLGNFVQWREKFLITRRRHDSAQLVLKKGFGGTAGMAFVGTVCSRSHAGGINVFGQITVETFASIVAHELGHNLGMNHDDGRDCSCGAKSCIMNSGASGSRNFSSCSAEDFEKLTLNKGGNCLLNIPKPDEAYSAPSCGNKLVDAGEECDCGTPKECELDPCCEGSTCKLKSFAECAYGDCCKDCRFLPGGTLCRGKTSECDVPEYCNGSSQFCQPDVFIQNGYPCQNNKAYCYNGMCQYYDAQCQVIFGSKAKAAPKDCFIEVNSKGDRFGNCGFSGNEYKKCATGNALCGKLQCENVQEIPVFGIVPAIIQTPSRGTKCWGVDFQLGSDVPDPGMVNEGTKCGAGKICRNFQCVDASVLNYDCDVQKKCHGHGVCNSNKNCHCENGWAPPNCETKGYGGSVDSGPTYNEMNTALRDGLLVFFFLIVPLIVCAIFIFIKRDQLWRSYFRKKRSQTYESDGKNQANPSRQPGSVPRHVSPVTPPREVPIYANRFAVPTYAAKQPQQFPSRPPPPQPKVSSQGNLIPARPAPAPPLYSSLT

SEQ ID NO: 1029105 - protein, 819 aa, Homo sapiens
MGSGARFPSGTLRVRWLLLLGLVGPVLGAARPGFQQTSHLSSYEIITPWRLTRERREAPRPYSKQVSYVIQAEGKEHIIHLERNKDLLPEDFVVYTYNKEGTLITDHPNIQNHCHYRGYVEGVHNSSIALSDCFGLRGLLHLENASYGIEPLQNSSHFEHIIYRMDDVYKEPLKCGVSNKDIEKETAKDEEEEPPSMTQLLRRRRAVLPQTRYVELFIVVDKERYDMMGRNQTAVREEMILLANYLDSMYIMLNIRIVLVGLEIWTNGNLINIVGGAGDVLGNFVQWREKFLITRRRHDSAQLVLKKGFGGTAGMAFVGTVCSRSHAGGINVFGQITVETFASIVAHELGHNLGMNHDDGRDCSCGAKSCIMNSGASGSRNFSSCSAEDFEKLTLNKGGNCLLNIPKPDEAYSAPSCGNKLVDAGEECDCGTPKECELDPCCEGSTCKLKSFAECAYGDCCKDCRFLPGGTLCRGKTSECDVPEYCNGSSQFCQPDVFIQNGYPCQNNKAYCYNGMCQYYDAQCQVIFGSKAKAAPKDCFIEVNSKGDRFGNCGFSGNEYKKCATGNALCGKLQCENVQEIPVFGIVPAIIQTPSRGTKCWGVDFQLGSDVPDPGMVNEGTKCGAGKICRNFQCVDASVLNYDCDVQKKCHGHGVCNSNKNCHCENGWAPPNCETKGYGGSVDSGPTYNEMNTALRDGLLVFFFLIVPLIVCAIFIFIKRDQLWRSYFRKKRSQTYESDGKNQANPSRQPGSVPRHVSPVTPPREVPIYANRFAVPTYAAKQPQQFPSRPPPPQPKVSSQGNLIPARPAPAPPLYSSLT

SEQ ID NO: 1029106 - protein, 809 aa, Homo sapiens
MGSGARFPSGTLRVRWLLLLGLVGPVLGAARPGFQQTSHLSSYEIITPWRLTRERREAPRPYSKQVSYVIQAEGKEHIIHLERNKDLLPEDFVVYTYNKEGTLITDHPNIQNHCHYRGYVEGVHNSSIALSDCFGLRGLLHLENASYGIEPLQNSSHFEHIIYRMDDVYKEPLKCGVSNKDIEKETAKDEEEEPPSMTQLLRRRRAVLPQTRYVELFIVVDKERYDMMGRNQTAVREEMILLANYLDSMYIMLNIRIVLVGLEIWTNGNLINIVGGAGDVLGNFVQWREKFLITRRRHDSAQLVLKKGFGGTAGMAFVGTVCSRSHAGGINVFGQITVETFASIVAHELGHNLGMNHDDGRDCSCGAKSCIMNSGASGSRNFSSCSAEDFEKLTLNKGGNCLLNIPKPDEAYSAPSCGNKLVDAGEECDCGTPKECELDPCCEGSTCKLKSFAECAYGDCCKDCRFLPGGTLCRGKTSECDVPEYCNGSSQFCQPDVFIQNGYPCQNNKAYCYNGMCQYYDAQCQVIFGSKAKAAPKDCFIEVNSKGDRFGNCGFSGNEYKKCATGNALCGKLQCENVQEIPVFGIVPAIIQTPSRGTKCWGVDFQLGSDVPDPGMVNEGTKCGAGKICRNFQCVDASVLNYDCDVQKKCHGHGVCNSNKNCHCENGWAPPNCETKGYGGSVDSGPTYNEMNTALRDGLLVFFFLIVPLIVCAIFIFIKRDQLWRSYFRKKRSQTYESDGKNQANPSRQPGSVPRHVSPVTPPREVPIYANRFAVPTYAAKQPQQFPSRHLHHTEVYSENRQFRDPQGS

SEQ ID NO: 1029107 - protein, 819 aa, Homo sapiens; identical to SEQ ID NO: 1029105

SEQ ID NO: 1029108 - protein, 819 aa, Homo sapiens; identical to SEQ ID NO: 1029105

SEQ ID NO: 1029109 - protein, 819 aa, Homo sapiens; identical to SEQ ID NO: 1029105

SEQ ID NO: 1029110 - protein, 691 aa, Homo sapiens [sequence omitted]

SEQ ID NO: 1029111 - protein, 71 aa, Homo sapiens
HREIHINEYATLDGGERWEDKKKTPPNYTLTKNQKKNQKKWIMKVWGDKSSESPEINVKCLMQWFPNLSAH

SEQ ID NO: 1029112 - protein, 288 aa, Homo sapiens
MLNAGQGERHRARRAWPKPTRSKTVDRCNAAVRMELCRLLQNEAVMVTEDEVEKYSEVREGRPRRILEQAEKKATDAEAMMWPPCNRCIQLVEEELDLGPRSPGYLALQKLEEAEKAAELRARDGMTVIEYRAMKDEEKMELLEMQLKEAKHIAEDSDRKYEEVARKLVILEGELERSEERAEVAESPGDLEEELKIVTNNLKSLEAQADKYSTKEDKYEEEIKLLEEKLKEAETRAEFAERSVAKLEKHIDDLEEHLGRAQEENVEIHQTLDQYLLELNNLLRAAPP

SEQ ID NO: 1029113 - protein, 290 aa, Homo sapiens
MLNAGQGERHRARRAWPKPTRSKTVDRCNAAVRMELCRLLQNEAVMVTEDEVEKYSEVREGRPRRILEQAEKKATDAEAMMWPPCNRCIQLVEEELDLGPRSPGYLALQKLEEAEKAAELRARDGMTVIEYRAMKDEEKMELLEMQLKEAKHIAEDSDRKYEEVARKLVILEGELERSEERAEVAESEPDSWRRNFEPWTMALKFPDWASEEEYSTKEDNYEEEIKLLEEKLKEAETRAEFAERSVAKLEKHIDDLEEHLGRAQEENVEIHQTLDQYLLELNNLLRAAPP

SEQ ID NO: 1029114 - protein, 138 aa, Homo sapiens
PRRAPAPIGAPRGAGEGRSAPLDGRRHFRLSLSLGGSAPNFSPEAEVVANGSMSLRSGGRRRADPGADGEASRDDGATSSVSALKRLERSQWTDKMDLRFGFERLKEPGEKTGWLINMHPVSTRSFSHPGIWLQPFWS

SEQ ID NO: 1029115 - protein, 77 aa, Homo sapiens
MDLRFGFERLKEPGEKTGWLINMHPTEILDEDKRLGSAVDYYFIQDDGSRFKEAPDCDKLKPTFMGVHVSSVTVREG

SEQ ID NO: 1029116 - protein, 2286 aa, Homo sapiens
MSLRSGGRRRADPGADGEASRDDGATSSVSALKRLERSQWTDKMDLRFGFERLKEPGEKTGWLINMHPTEILDEDKRLGSAVDYYFIQDDGSRFKVALPYKPYFYIATRKGCEREVSSFLSKKFQGKIAKVETVPKEDLDLPNHLVGLKRNYIRLSFHTVEDLVKVRKEISPAVKKNREQDHASDAYTALLSSVLQRGGVITDEEETSKKIADQLDNIVDMREYDVPYHIRLSIDLKIHVAHWYNVRYRGNAFPVEITRRDDLVERPDPVVLAFDIETTKLPLKFPDAETDQIMMISYMIDGQGYLITNREIVSEDIEDFEFTPKPEYEGPFCVFNEPDEAHLIQRWFEHVQETKPTIMVTYNGDFFDWPFVEARAAVHGLSMQQEIGFQKDSQGEYKAPQCIHMDCLRWVKRDSYLPVGSHNLKAAAKAKLGYDPVELDPEDMCRMATEQPQTLATYSVSDAVATYYLYMKYVHPFIFALCTIIPMEPDEVLRKGSGTLCEALLMVQAFHANIIFPNKQEQEFNKLTDDGHVLDSETYVGGHVEALESGVFRSDIPCRFRMNPAAFDFLLQRVEKTLRHALEEEEKVPVEQVTNFEEVCDEIKSKLASLKDVPSRIECPLIYHLDVGAMYPNIILTNRLQPSAMVDEATCAACDFNKPGANCQRKMAWQWRGEFMPASRSEYHRIQHQLESEKFPPLFPEGPARAFHELSREEQAKYEKRRLADYCRKAYKKIHITKVEERLTTICQRENSFYVDTVRAFRDRRYEFKGLHKVWKKKLSAAVEVGDAAEVKRCKNMEVLYDSLQLAHKCILNSFYGYVMRKGARWYSMEMAGIVCFTGANIITQARELIEQIGRPLELDTDGIWCVLPNSFPENFVFKTTNVKKPKVTISYPGAMLNIMVKEGFTNDQYQELAEPSSLTYVTRSENSIFFEVDGPYLAMILPASKEEGKKLKKRYAVFNEDGSLAELKGFEVKRRGELQLIKIFQSSVFEAFLKGSTLEEVYGSVAKVADYWLDVLYSKAANMPDSELFELISENRSMSRKLEDYGEQKSTSISTAKRLAEFLGDQMVKDAGLSCRYIISRKPEGSPVTERAIPLAIFQAEPTVRKHFLRKWLKSSSLQDFDIRAILDWDYYIERLGSAIQKIITIPAALQQVKNPVPRVKHPDWLHKKLLEKNDVYKQKKISELFTLEGRRQVTMAEASEDSPRPSAPDMEDFGLVKLPHPAAPVTVKRKRVLWESQEESQDLTPTVPWQEILGQPPALGTSQEEWLVWLRFHKKKWQLQARQRLARRKRQRLESAEGVLRPGAIRDGPATGLGSFLRRTARSILDLPWQIVQISETSQAGLFRLWALVGSDLHCIRLSIPRVFYVNQRVAKAEEGASYRKVNRVLPRSNMVYNLYEYSVPEDMYQEHINEINAELSAPDIEGVYETQVPLLFRALVHLGCVCVVNKQLVRHLSGWEAETFALEHLEMRSLAQFSYLEPGSIRHIYLYHHAQAHKALFGIFIPSQRRASVFVLDTVRSNQMPSLGALYSAEHGLLLEKVGPELLPPPKHTFEVRAETDLKTICRAIQRFLLAYKEERRGPTLIAVQSSWELKRLASEIPVLEEFPLVPICVADKINYGVLDWQRHGARRMIRHYLNLDTCLSQAFEMSRYFHIPIGNLPEDISTFGSDLFFARHLQRHNHLLWLSPTARPDLGGKEADDNCLVMEFDDQATVEINSSGCYSTVCVELDLQNLAVNTILQSHHVNDMEGADSMGISFDVIQQASLEDMITGGQAASAPASYDETALCSNTFRILKSMVVGWVKEITQYHNIYADNQVMHFYRWLRSPSSLLHDPALHRTLHNMMKKLFLQLIAEFKRLGSSVIYANFNRIILCTKKRRVEDAIAYVEYITSSIHSKETFHSLTISFSRCWEFLLWMDPSNYGGIKGKVSSRIHCGLQDSQKAGGAEDEQENEDDEEERDGEEEEEAEESNVEDLLENNWNILQFLPQAASCQNYFLMIVSAYIVAVYHCMKDGLRRSAPGSTPVRRRGASQLSQEAEGAVGALPGMITFSQDYVANELTQSFFTITQKIQKKVTGSRNSTELSEMFPVLPGSHLLLNNPALEFIKYVCKVLSLDTNITNQVNKLNRDLLRLVDVGEFSEEAQFRDPCRSYVLPEVICRSCNFCRDLDLCKDSSFSEDGAVLPQWLCSNCQAPYDSSAIEMTLVEVLQKKLMAFTLQDLVCLKCRGVKETSMPVYCTCAGDFALTIHTQVFMEQIGIFRNIAQHYGMSYLLETLEWLLQKNPQLGH

SEQ ID NO: 1029117 - protein, 2257 aa, Homo sapiens [sequence omitted]

SEQ ID NO: 1029118 - protein, 2286 aa, Homo sapiens; identical to SEQ ID NO: 1029116

SEQ ID NO: 1029119 - protein, 2326 aa, Homo sapiens
MSLRSGGRRRADPGADGEASRDDGATSSVSALKRLERSQWTDKMDLRFGFERLKEPGEKTGWLINMHPTEILDEDKRLGSAVDYYFIQDDGSRFKVALPYKPYFYIATRKGCEREVSSFLSKKFQGKIAKVETVPKEDLDLPNHLVGLKRNYIRLSFHTVEDLVKVRKEISPAVKKNREQDHASDAYTALLSSVLQRGGVITDEEETSKKIADQLDNIVDMREYDVPYHIRLSIDLKIHVAHWYNVRYRGNAFPVEITRRDDLVERPDPVVLAFDIETTKLPLKFPDAETDQIMMISYMIDGQGYLITNREIVSEDIEDFEFTPKPEYEGPFCVFNEPDEAHLIQRWFEHVQETKPTIMVTYNGDFFDWPFVEARAAVHGLSMQQEIGFQKDSQGEYKAPQCIHMDCLRWVKRDSYLPVGSHNLKAAAKAKLGYDPVELDPEDMCRMATEQPQTLATYSVSDAVATYYLYMKYVHPFIFALCTIIPMEPDEVLRKGSGTLCEALLMVQAFHANIIFPNKQEQEFNKLTDDGHVLDSETYVGGHVEALESGVFRSDIPCRFRMVCFFPGIQILPTLVLVNPAAFDFLLQRVEKTLRHALEEEEKVPVEQVTNFEEVCDEIKSKLASLKDVPSRIECPLIYHLDVGAMYPNIILTNRLQVRLYFPCQSRSSLCPALVLSHPSQPSAMVDEATCAACDFNKPGANCQRKMAWQWRGEFMPASRSEYHRIQHQLESEKFPPLFPEGPARAFHELSREEQAKYEKRRLADYCRKAYKKIHITKVEERLTTICQRENSFYVDTVRAFRDRRYEFKGLHKVWKKKLSAAVEVGDAAEVKRCKNMEVLYDSLQLAHKCILNSFYGYVMRKGARWYSMEMAGIVCFTGANIITQARELIEQIGRPLELDTDGIWCVLPNSFPENFVFKTTNVKKPKVTISYPGAMLNIMVKEGFTNDQYQELAEPSSLTYVTRSENSIFFEVDGPYLAMILPASKEEGKKLKKRYAVFNEDGSLAELKGFEVKRRGELQLIKIFQSSVFEAFLKGSTLEEVYGSVAKVADYWLDVLYSKAANMPDSELFELISENRSMSRKLEDYGEQKSTSISTAKRLAEFLGDQMVKDAGLSCRYIISRKPEGSPVTERAIPLAIFQAEPTVRKHFLRKWLKSSSLQDFDIRAILDWDYYIERLGSAIQKIITIPAALQQVKNPVPRVKHPDWLHKKLLEKNDVYKQKKISELFTLEGRRQVTMAEASEDSPRPSAPDMEDFGLVKLPHPAAPVTVKRKRVLWESQEESQDLTPTVPWQEILGQPPALGTSQEEWLVWLRFHKKKWQLQARQRLARRKRQRLESAEGVLRPGAIRDGPATGLGSFLRRTARSILDLPWQIVQISETSQAGLFRLWALVGSDLHCIRLSIPRVFYVNQRVAKAEEGASYRKVNRVLPRSNMVYNLYEYSVPEDMYQEHINEINAELSAPDIEGVYETQVPLLFRALVHLGCVCVVNKQLVRHLSGWEAETFALEHLEMRSLAQFSYLEPGSIRHIYLYHHAQAHKALFGIFIPSQRRASVFVLDTVRSNQMPSLGALYSAEHGLLLEKVGPELLPPPKHTFEVRAETDLKTICRAIQRFLLAYKEERRGPTLIAVQSSWELKRLASEIPVLEEFPLVPICVADKINYGVLDWQRHGARRMIRHYLNLDTCLSQAFEMSRYFHIPIGNLPEDISTFGSDLFFARHLQRHNHLLWLSPTARPDLGGKEADDNCLVMEFDDQATVEINSSGCYSTVCVELDLQNLAVNTILQSHHVNDMEGADSMGISFDVIQQASLEDMITGGQAASAPASYDETALCSNTFRILKSMVVGWVKEITQYHNIYADNQVMHFYRWLRSPSSLLHDPALHRTLHNMMKKLFLQLIAEFKRLGSSVIYANFNRIILCTKKRRVEDAIAYVEYITSSIHSKETFHSLTISFSRCWEFLLWMDPSNYGGIKGKVSSRIHCGLQDSQKAGGAEDEQENEDDEEERDGEEEEEAEESNVEDLLENNWNILQFLPQAASCQNYFLMIVSAYIVAVYHCMKDGLRRSAPGSTPVRRRGASQLSQEAEGAVGALPGMITFSQDYVANELTQSFFTITQKIQKKVTGSRNSTELSEMFPVLPGSHLLLNNPALEFIKYVCKVLSLDTNITNQVNKLNRDLLRLVDVGEFSEEAQFRDPCRSYVLPEVICRSCNFCRDLDLCKDSSFSEDGAVLPQWLCSNCQAPYDSSAIEMTLVEVLQKKLMAFTLQDLVCLKCRGVKETSMPVYCSCAGDFALTIHTQVFMEQIGIFRNIAQHYGMSYLLETLEWLLQKNPQLGH

SEQ ID NO: 1029120 - protein, 2550 aa, Homo sapiens
MSLRSGGRRRADPGADGEASRDDGATSSVSALKRLERSQWTDKMDLRFGFERLKEPGEKTGWLINMHPTEILDEDKRLGSAVDYYFIQDDGSRFKVALPYKPYFYIATRKGCEREVSSFLSKKFQGKIAKVETVPKEDLDLPNHLVGLKRNYIRLSFHTVEDLVKVRKEISPAVKKNREQDHASDAYTALLSSVLQRGGVITDEEETSKKIADQLDNIVDMREYDVPYHIRLSIDLKIHVAHWYNVRYRGNAFPVEITRRDDLVERPDPVVLAFDIETTKLPLKFPDAETDQIMMISYMIDGQGYLITNREIVSEDIEDFEFTPKPEYEGPFCVFNEPDEAHLIQRWFEHVQETKPTIMVTYNGDFFDWPFVEARAAVHGLSMQQEIGFQKDSQGEYKAPQCIHMDCLRWVKRDSYLPVGSHNLKAAAKAKLGYDPVELDPEDMCRMATEQPQTLATYSVSDAVATYYLYMKYVHPFIFALCTIIPMEPDEVLRKGSGTLCEALLMVQAFHANIIFPNKQEQEFNKLTDDGHVLDSETYVGGHVEALESGVFRSDIPCRFRMNPAAFDFLLQRVEKTLRHALEEEEKVPVEQVTNFEEVCDEIKSKLASLKDVPSRIECPLIYHLDVGAMYPNIILTNRLQPSAMVDEATCAACDFNKPGANCQRKMAWQWRGEFMPASRSEYHRIQHQLESEKFPPLFPEGPARAFHELSREEQAKYEKRRLADYCRKAYKKIHITKVEERLTTICQRENSFYVDTVRAFRDRRYEFKGLHKVWKKKLSAAVEVGDAAEVKRCKNMEVLYDSLQLAHKCILNSFYGYVMRKGARWYSMEMAGIVCFTGANIITQARELIEQIGRPLELDTDGIWCVLPNSFPENFVFKTTNVKKPKVTISYPGAMLNIMVKEGFTNDQYQELAEPSSLTYVTRSENSIFFEVDGPYLAMILPASKEEGKKLKKRYAVFNEDGSLAELKGFEVKRRGELQLIKIFQSSVFEAFLKGSTLEEVYGSVAKVADYWLDVLYSKAANMPDSELFELISENRSMSRKLEDYGEQKSTSISTAKRLAEFLGDQMVKDAGLSCRYIISRKPEGSPVTERAIPLAIFQAEPTVRKHFLRKWLKSSSLQDFDIRAILDWDYYIERLGSAIQKIITIPAALQQVKNPVPRVKHPDWLHKKLLEKNDVYKQKKISELFTLEGRRQVTMAEASEDSPRPSAPDMEDFGLVKLPHPAAPVTVKRKRVLWESQEESQDLTPTVPWQEILGQPPALGTSQEEWLVWLRFHKKKWQLQARQRLARRKRQRLESAEGVLRPGAIRDGPATGLGSFLRRTARSILDLPWQIVQISETSQAGLFRLWALVGSDLHCIRLSIPRVFYVNQRVAKAEEGASYRKVNRVLPRSNMVYNLYEYSVPEDMYQEHINEINAELSAPDIEGVYETQVPLLFRALVHLGCVCVVNKQLVRHLSGWEAETFALEHLEMRSLAQFSYLEPGSIRHIYLYHHAQAHKALFGIFIPSQRRASVFVLDTVRSNQMPSLGALYSAEHGLLLEKVGPELLPPPKHTFEVRAETDLKTICRAIQRFLLAYKEERRGPTLIAVQSSWELKRLASEIPVLEEFPLVPICVADKINYGVLDWQRHGARRMIRHYLNLDTCLSQAFEMSRYFHIPIGNLPEDISTFGSDLFFARHLQRHNHLLWLSPTARPDLGGKEADDNCLVMEFDDQATVEINSSGCYSTVCVELDLQNLAVNTILQSHHVNDMEGADSMGISFDVIQQASLEDMITGGQAASAPASYDETALCSNTFRCHPLWEGVLLIEGSYPWPLIWKAKSKTGSIGLPLVLMAEPETLCGEFSIVYCLYHCGGPAWSLATVQCTASDLPVARGTSHRVFLTRATFRCDQRYITGISSQLYLSMMCEASALRCQELSVCCRGRGWGSGAISLRRAWLRAATRITHQRWFMLGNACCVPGGGPSTSHSASVPTSAQGRGAVIVCFSDKETEVRGAAFVVIPQMKEGILKSMVVGWVKEITQYHNIYADNQVMHFYRWLRSPSSLLHDPALHRTLHNMMKKLFLQLIAEFKRLGSSVIYANFNRIILCTKKRRVEDAIAYVEYITSSIHSKETFHSLTISFSRCWEFLLWMDPSNYGGIKGKVSSRIHCGLQDSQKAGGAEDEQENEDDEEERDGEEEEEAEESNVEDLLENNWNILQFLPQAASCQNYFLMIVSAYIVAVYHCMKDGLRRSAPGSTPVRRRGASQLSQEAEGAVGALPGMITFSQDYVANELTQSFFTITQKIQKKVTGSRNSTELSEMFPVLPGSHLLLNNPALEFIKYVCKVLSLDTNITNQVNKLNRDLLRLVDVGEFSEEAQFRDPCRSYVLPEVICRSCNFCRDLDLCKDSSFSEDGAVLPQWLCSNCQAPYDSSAIEMTLVEVLQKKLMAFTLQDLKEADTPKCEEKERRKRELRSSATGRSCRGASEQRLGDAPSCRVVVHGVQACRMEGVCLKCRGVKETSMPVYCSCAGDFALTIHTQVFMEQIGIFRNIAQHYGMSYLLETLEWLLQKNPQLGH

SEQ ID NO: 1029121 - protein, 263 aa, Homo sapiens
CVSDCSTHGPFCHLALSPWASPVPVTQHYRNEVLSLDTNITNQVNKLNRDLLRLVDVGEFSEEAQFRDPCRSYVLPEVICRSCNFCRDLDLCKDSSFSEDGAVLPQWLCSNCQAPYDSSAIEMTLVEVLQKKLMAFTLQDLKEADTPKCEEKERRKRELRSSATGRSCRGASEQRLGDAPSCRVVVHGVQACRMEGVCLKCRGVKETSMPVYCSCAGDFALTIHTQVFMEQIGIFRNIAQHYGMSYLLETLEWLLQKNPQLGH

SEQ ID NO: 1029122 - protein, 1818 aa, Homo sapiens
MSLRSGGRRRADPGADGEASRDDGATSSVSALKRLERSQWTDKMDLRFGFERLKEPGEKTGWLINMHPTEILDEDKRLGSAVDYYFIQDDGSRFKVALPYKPYFYIATRKGCEREVSSFLSKKFQGKIAKVETVPKEDLDLPNHLVGLKRNYIRLSFHTVEDLVKVRKEISPAVKKNREQDHASDAYTALLSSVLQRGGVITDEEETSKKIADQLDNIVDMREYDVPYHIRLSIDLKIHVAHWYNVRYRGNAFPVEITRRDDLVERPDPVVLAFDIETTKLPLKFPDAETDQIMMISYMIDGQGYLITNREIVSEDIEDFEFTPKPEYEGPFCVFNEPDEAHLIQRWFEHVQETKPTIMVTYNGDFFDWPFVEARAAVHGLSMQQEIGFQKDSQGEYKAPQCIHMDCLRWVKRDSYLPVGSHNLKAAAKAKLGYDPVELDPEDMCRMATEQPQTLATYSVSDAVATYYLYMKYVHPFIFALCTIIPMEPDEVLRKGSGTLCEALLMVQAFHANIIFPNKQEQEFNKLTDDGHVLDSETYVGGHVEALESGVFRSDIPCRFRMNPAAFDFLLQRVEKTLRHALEEEEKVPVEQVTNFEEVCDEIKSKLASLKDVPSRIECPLIYHLDVGAMYPNIILTNRLQPSAMVDEATCAACDFNKPGANCQRKMAWQWRGEFMPASRSEYHRIQHQLESEKFPPLFPEGPARAFHELSREEQAKYEKRRLADYCRKAYKKIHITKVEERLTTICQRENSFYVDTVRAFRDRRYEFKGLHKVWKKKLSAAVEVGDAAEVKRCKNMEVLYDSLQLAHKCILNSFYGYVMRKGARWYSMEMAGIVCFTGANIITQARELIEQIGRPLELDTDGIWCVLPNSFPENFVFKTTNVKKPKVTISYPGAMLNIMVKEGFTNDQYQELAEPSSLTYVTRSENSIFFEVDGPYLAMILPASKEEGKKLKKRYAVFNEDGSLAELKGFEVKRRGELQLIKIFQSSVFEAFLKGSTLEEVYGSVAKVADYWLDVLYSKAANMPDSELFELISENRSMSRKLEDYGEQKSTSISTAKRLAEFLGDQMVKDAGLSCRYIISRKPEGSPVTERAIPLAIFQAEPTVRKHFLRKWLKSSSLQDFDIRAILDWDYYIERLGSAIQKIITIPAALQQVKNPVPRVKHPDWLHKKLLEKNDVYKQKKISELFTLEGRRQVTMAEASEDSPRPSAPDMEDFGLVKLPHPAAPVTVKRKRVLWESQEESQDLTPTVPWQEILGQPPALGTSQEEWLVWLRFHKKKWQLQARQRLARRKRQRLESAEGVLRPGAIRDGPATGLGSFLRRTARSILDLPWQIVQISETSQAGLFRLWALVGSDLHCIRLSIPRVFYVNQRVAKAEEGASYRKVNRVLPRSNMVYNLYEYSVPEDMYQEHINEINAELSAPDIEGVYETQVPLLFRALVHLGCVCVVNKQLVRHLSGWEAETFALEHLEMRSLAQFSYLEPGSIRHIYLYHHAQAHKALFGIFIPSQRRASVFVLDTVRSNQMPSLGALYSAEHGLLLEKVGPELLPPPKHTFEVRAETDLKTICRAIQRFLLAYKEERRGPTLIAVQSSWELKRLASEIPVLEEFPLVPICVADKINYGVLDWQRHGARRMIRHYLNLDTCLSQAFEMSRYFHIPIGNLPEDISTFGSDLFFARHLQRHNHLLWLSPTARPDLGGKEADDNCLVMEFDDQATVEINSSGCYSTVCVELDLQNLAVNTILQSHHVNDMEGADSMGISFDVIQQASLEDMITGGQAASAPASYDETALCSNTFRCHPLWEGVLLIEGSYPWPLIWKAKV

SEQ ID NO: 1029123 - protein, 578 aa, Homo sapiens
MSLRSGGRRRADPGADGEASRDDGATSSVSALKRLERSQWTDKMDLRFGFERLKEPGEKTGWLINMHPTEILDEDKRLGSAVDYYFIQDDGSRFKVALPYKPYFYIATRKGCEREVSSFLSKKFQGKIAKVETVPKEDLDLPNHLVGLKRNYIRLSFHTVEDLVKVRKEISPAVKKNREQDHASDAYTALLSSVLQRGGVITDEEETSKKIADQLDNIVDMREYDVPYHIRLSIDLKIHVAHWYNVRYRGNAFPVEITRRDDLVERPDPVVLAFDIETTKLPLKFPDAETDQIMMISYMIDGQGYLITNREIVSEDIEDFEFTPKPEYEGPFCVFNEPDEAHLIQRWFEHVQETKPTIMVTYNGDFFDWPFVEARAAVHGLSMQQEIGFQKDSQGEYKAPQCIHMDCLRWVKRDSYLPVGSHNLKAAAKAKLGYDPVELDPEDMCRMATEQPQTLATYSVSDAVATYYLYMKYVHPFIFALCTIIPMEPDEVLRKGSGTLCEALLMVQAFHANIIFPNKQEQEFNKLTDDGHVLDSETYVGGHVEALESGVFRSDIPCRFRMVCFFPGIQILPTLVLW

SEQ ID NO: 1029124 - protein, 2310 aa, Homo sapiens
MSLRSGGRRRADPGADGEASRDDGATSSVSALKRLERSQWTDKMDLRFGFERLKEPGEKTGWLINMHPTEILDEDKRLGSAVDYYFIQDDGSRFKVALPYKPYFYIATRKGCEREVSSFLSKKFQGKIAKVETVPKEDLDLPNHLVGLKRNYIRLSFHTVEDLVKVRKEISPAVKKNREQDHASDAYTALLSSVLQRGGVITDEEETSKKIADQLDNIVDMREYDVPYHIRLSIDLKIHVAHWYNVRYRGNAFPVEITRRDDLVERPDPVVLAFDIETTKLPLKFPDAETDQIMMISYMIDGQGYLITNREIVSEDIEDFEFTPKPEYEGPFCVFNEPDEAHLIQRWFEHVQETKPTIMVTYNGDFFDWPFVEARAAVHGLSMQQEIGFQKDSQGEYKAPQCIHMDCLRWVKRDSYLPVGSHNLKAAAKAKLGYDPVELDPEDMCRMATEQPQTLATYSVSDAVATYYLYMKYVHPFIFALCTIIPMEPDEVLRKGSGTLCEALLMVQAFHANIIFPNKQEQEFNKLTDDGHVLDSETYVGGHVEALESGVFRSDIPCRFRMNPAAFDFLLQRVEKTLRHALEEEEKVPVEQVTNFEEVCDEIKSKLASLKDVPSRIECPLIYHLDVGAMYPNIILTNRLQVRLYFPCQSRSSLCPALVLSHPSQPSAMVDEATCAACDFNKPGANCQRKMAWQWRGEFMPASRSEYHRIQHQLESEKFPPLFPEGPARAFHELSREEQAKYEKRRLADYCRKAYKKIHITKVEERLTTICQRENSFYVDTVRAFRDRRYEFKGLHKVWKKKLSAAVEVGDAAEVKRCKNMEVLYDSLQLAHKCILNSFYGYVMRKGARWYSMEMAGIVCFTGANIITQARELIEQIGRPLELDTDGIWCVLPNSFPENFVFKTTNVKKPKVTISYPGAMLNIMVKEGFTNDQYQELAEPSSLTYVTRSENSIFFEVDGPYLAMILPASKEEGKKLKKRYAVFNEDGSLAELKGFEVKRRGELQLIKIFQSSVFEAFLKGSTLEEVYGSVAKVADYWLDVLYSKAANMPDSELFELISENRSMSRKLEDYGEQKSTSISTAKRLAEFLGDQMVKDAGLSCRYIISRKPEGSPVTERAIPLAIFQAEPTVRKHFLRKWLKSSSLQDFDIRAILDWDYYIERLGSAIQKIITIPAALQQVKNPVPRVKHPDWLHKKLLEKNDVYKQKKISELFTLEGRRQVTMAEASEDSPRPSAPDMEDFGLVKLPHPAAPVTVKRKRVLWESQEESQDLTPTVPWQEILGQPPALGTSQEEWLVWLRFHKKKWQLQARQRLARRKRQRLESAEGVLRPGAIRDGPATGLGSFLRRTARSILDLPWQIVQISETSQAGLFRLWALVGSDLHCIRLSIPRVFYVNQRVAKAEEGASYRKVNRVLPRSNMVYNLYEYSVPEDMYQEHINEINAELSAPDIEGVYETQVPLLFRALVHLGCVCVVNKQLVRHLSGWEAETFALEHLEMRSLAQFSYLEPGSIRHIYLYHHAQAHKALFGIFIPSQRRASVFVLDTVRSNQMPSLGALYSAEHGLLLEKVGPELLPPPKHTFEVRAETDLKTICRAIQRFLLAYKEERRGPTLIAVQSSWELKRLASEIPVLEEFPLVPICVADKINYGVLDWQRHGARRMIRHYLNLDTCLSQAFEMSRYFHIPIGNLPEDISTFGSDLFFARHLQRHNHLLWLSPTARPDLGGKEADDNCLVMEFDDQATVEINSSGCYSTVCVELDLQNLAVNTILQSHHVNDMEGADSMGISFDVIQQASLEDMITGGQAASAPASYDETALCSNTFRILKSMVVGWVKEITQYHNIYADNQVMHFYRWLRSPSSLLHDPALHRTLHNMMKKLFLQLIAEFKRLGSSVIYANFNRIILCTKKRRVEDAIAYVEYITSSIHSKETFHSLTISFSRCWEFLLWMDPSNYGGIKGKVSSRIHCGLQDSQKAGGAEDEQENEDDEEERDGEEEEEAEESNVEDLLENNWNILQFLPQAASCQNYFLMIVSAYIVAVYHCMKDGLRRSAPGSTPVRRRGASQLSQEAEGAVGALPGMITFSQDYVANELTQSFFTITQKIQKKVTGSRNSTELSEMFPVLPGSHLLLNNPALEFIKYVCKVLSLDTNITNQVNKLNRDLLRLVDVGEFSEEAQFRDPCRSYVLPEVICRSCNFCRDLDLCKDSSFSEDGAVLPQWLCSNCQAPYDSSAIEMTLVEVLQKKLMAFTLQDLVCLKCRGVKETSMPVYCSCAGDFALTIHTQVFMEQIGIFRNIAQHYGMSYLLETLEWLLQKNPQLGH

SEQ ID NO: 1029125 - protein, 2495 aa, Homo sapiens
MSLRSGGRRRADPGADGEASRDDGATSSVSALKRLERSQWTDKMDLRFGFERLKEPGEKTGWLINMHPTEILDEDKRLGSAVDYYFIQDDGSRFKVALPYKPYFYIATRKGCEREVSSFLSKKFQGKIAKVETVPKEDLDLPNHLVGLKRNYIRLSFHTVEDLVKVRKEISPAVKKNREQDHASDAYTALLSSVLQRGGVITDEEETSKKIADQLDNIVDMREYDVPYHIRLSIDLKIHVAHWYNVRYRGNAFPVEITRRDDLVERPDPVVLAFDIETTKLPLKFPDAETDQIMMISYMIDGQGYLITNREIVSEDIEDFEFTPKPEYEGPFCVFNEPDEAHLIQRWFEHVQETKPTIMVTYNGDFFDWPFVEARAAVHGLSMQQEIGFQKDSQGEYKAPQCIHMDCLRWVKRDSYLPVGSHNLKAAAKAKLGYDPVELDPEDMCRMATEQPQTLATYSVSDAVATYYLYMKYVHPFIFALCTIIPMEPDEVLRKGSGTLCEALLMVQAFHANIIFPNKQEQEFNKLTDDGHVLDSETYVGGHVEALESGVFRSDIPCRFRMNPAAFDFLLQRVEKTLRHALEEEEKVPVEQVTNFEEVCDEIKSKLASLKDVPSRIECPLIYHLDVGAMYPNIILTNRLQPSAMVDEATCAACDFNKPGANCQRKMAWQWRGEFMPASRSEYHRIQHQLESEKFPPLFPEGPARAFHELSREEQAKYEKRRLADYCRKAYKKIHITKVEERLTTICQRENSFYVDTVRAFRDRRYEFKGLHKVWKKKLSAAVEVGDAAEVKRCKNMEVLYDSLQLAHKCILNSFYGYVMRKGARWYSMEMAGIVCFTGANIITQARELIEQIGRPLELDTDGIWCVLPNSFPENFVFKTTNVKKPKVTISYPGAMLNIMVKEGFTNDQYQELAEPSSLTYVTRSENSIFFEVDGPYLAMILPASKEEGKKLKKRYAVFNEDGSLAELKGFEVKRRGELQLIKIFQSSVFEAFLKGSTLEEVYGSVAKVADYWLDVLYSKAANMPDSELFELISENRSMSRKLEDYGEQKSTSISTAKRLAEFLGDQMVKDAGLSCRYIISRKPEGSPVTERAIPLAIFQAEPTVRKHFLRKWLKSSSLQDFDIRAILDWDYYIERLGSAIQKIITIPAALQQVKNPVPRVKHPDWLHKKLLEKNDVYKQKKISELFTLEGRRQVTMAEASEDSPRPSAPDMEDFGLVKLPHPAAPVTVKRKRVLWESQEESQDLTPTVPWQEILGQPPALGTSQEEWLVWLRFHKKKWQLQARQRLARRKRQRLESAEGVLRPGAIRDGPATGLGSFLRRTARSILDLPWQIVQISETSQAGLFRLWALVGSDLHCIRLSIPRVFYVNQRVAKAEEGASYRKVNRVLPRSNMVYNLYEYSVPEDMYQEHINEINAELSAPDIEGVYETQVPLLFRALVHLGCVCVVNKQLVRHLSGWEAETFALEHLEMRSLAQFSYLEPGSIRHIYLYHHAQAHKALFGIFIPSQRRASVFVLDTVRSNQMPSLGALYSAEHGLLLEKVGPELLPPPKHTFEVRAETDLKTICRAIQRFLLAYKEERRGPTLIAVQSSWELKRLASEIPVLEEFPLVPICVADKINYGVLDWQRHGARRMIRHYLNLDTCLSQAFEMSRYFHIPIGNLPEDISTFGSDLFFARHLQRHNHLLWLSPTARPDLGGKEADDNCLVMEFDDQATVEINSSGCYSTVCVELDLQNLAVNTILQSHHVNDMEGADSMGISFDVIQQASLEDMITGGQAASAPASYDETALCSNTFRCHPLWEGVLLIEGSYPWPLIWKAKSKTGSIGLPLVLMAEPETLCGEFSIVYCLYHCGGPAWSLATVQCTASDLPVARGTSHRVFLTRATFRCDQRYITGISSQLYLSMMCEASALRCQELSVCCRGRGWGSGAISLRRAWLRAATRITHQRWFMLGNACCVPGGGPSTSHSASVPTSAQGRGAVIVCFSDKETEVRGAAFVVIPQMKEGILKSMVVGWVKEITQYHNIYADNQVMHFYRWLRSPSSLLHDPALHRTLHNMMKKLFLQLIAEFKRLGSSVIYANFNRIILCTKKRRVEDAIAYVEYITSSIHSKETFHSLTISFSRCWEFLLWMDPSNYGGIKGKVSSRIHCGLQDSQKAGGAEDEQENEDDEEERDGEEEEEAEESNVEDLLENNWNILQFLPQAASCQNYFLMIVSAYIVAVYHCMKDGLRRSAPGSTPVRRRGASQLSQEAEGAVGALPGMITFSQDYVANELTQSFFTITQKIQKKVTGSRNSTELSEMFPVLPGSHLLLNNPALEFIKYVCKVLSLDTNITNQVNKLNRDLLRLVDVGEFSEEAQFRDPCRSYVLPEVICRSCNFCRDLDLCKDSSFSEDGAVLPQWLCSNCQAPYDSSAIEMTLVEVLQKKLMAFTLQDLVCLKCRGVKETSMPVYCSCAGDFALTIHTQVFMEQIGIFRNIAQHYGMSYLLETLEWLLQKNPQLGH

SEQ ID NO: 1029126 - protein, 295 aa, Homo sapiens
MITFSQDYVANELTQSFFTITQKIQKKVTGSRNSTELSEMFPVLPGSHLLLNNPALEFIKYVCKVLSLDTNITNQVNKLNRDLLRLVDVGEFSEEAQFRDPCRSYVLPEVICRSCNFCRDLDLCKDSSFSEDGAVLPQWLCSNCQAPYDSSAIEMTLVEVLQKKLMAFTLQDLKEADTPKCEEKERRKRELRSSATGRSCRGASEQRLGDAPSCRVVVHGVQACRMEGVCLKCRGVKETSMPVYCSCAGDFALTIHTQVFMEQIGIFRNIAQHYGMSYLLETLEWLLQKNPQLGH

SEQ ID NO: 1029127 - protein, 636 aa, Homo sapiens
MSLRSGGRRRADPGADGEASRDDGATSSVSALKRLERSQWTDKMDLRFGFERLKEPGEKTGWLINMHPTEILDEDKRLGSAVDYYFIQDDGSRFKVALPYKPYFYIATRKGCEREVSSFLSKKFQGKIAKVETVPKEDLDLPNHLVGLKRNYIRLSFHTVEDLVKVRKEISPAVKKNREQDHASDAYTALLSSVLQRGGVITDEEETSKKIADQLDNIVDMREYDVPYHIRLSIDLKIHVAHWYNVRYRGNAFPVEITRRDDLVERPDPVVLAFDIETTKLPLKFPDAETDQIMMISYMIDGQGYLITNREIVSEDIEDFEFTPKPEYEGPFCVFNEPDEAHLIQRWFEHVQETKPTIMVTYNGDFFDWPFVEARAAVHGLSMQQEIGFQKDSQGEYKAPQCIHMDCLRWVKRDSYLPVGSHNLKAAAKAKLGYDPVELDPEDMCRMATEQPQTLATYSVSDAVATYYLYMKYVHPFIFALCTIIPMEPDEVLRKGSGTLCEALLMVQAFHANIIFPNKQEQEFNKLTDDGHVLDSETYVGGHVEALESGVFRSDIPCRFRMNPAAFDFLLQRVEKTLRHALEEEEKVPVEQVTNFEEVCDEIKSKLASLKDVPIPLGGPFLYLGDGGHLAPQLPC

SEQ ID NO: 1029128 - protein, 360 aa, Homo sapiens
PRRAPAPIGAPRGAGEGRSAPLDGRRHFRLSLSLGGSAPNFSPEAEVVANGSMSLRSGGRRRADPGADGEASRDDGATSSVSALKRLERSQWTDKMDLRFGFERLKEPGEKTGWLINMHPTEILDEDKRLGSAVDYYFIQDDGSRFKVALPYKPYFYIATRKGCEREVSSFLSKKFQGKIAKVETVPKEDLDLPNHLVGLKRNYIRLSFHTVEDLVKVRKEISPAVKKNREQDHASDAYTALLSSVLQRGGVITDEEETSKKIADQLDNIVDMREYDVPYHIRLSIDLKIHVAHWYNVRYRGNAFPVEITRRDDLVERPVSFACVTFILKFPVFWREYSSVLESESDSKICLLLFPQILY

SEQ ID NO: 1029129 - protein, 2286 aa, Homo sapiens; identical to SEQ ID NO: 1029116

SEQ ID NO: 1029130 - protein, 89 aa, Homo sapiens
CLKKSTKEVFDELVALLQPLPCPCFAPVLSSEVCLMELPFGSNTSDQDLHGSGCGEWPEDTSLYLYFLQELHEQLGGVQASSSCQTPGI

SEQ ID NO: 1029131 - protein, 452 aa, Homo sapiens
  misc_feature (5)..(5): Xaa can be any naturally occurring amino acid
ADTPXCVVSLSGNQAVRLPLMECVQVTKDVTKAMDEKKFDEALKLRGRSFMNNWEVYKLLAHVRPPVSKSGSHTVAVMNVGAPAAGMNAAVRSTVRIGLIQGNRVLVVHDGFEGLAKGQIEEAGWSYVGGWTGQGGSKLGTKRTLPKKSFEQISANITKFNIQGLVIIGGFEAYTGGLELMEGRKQFDELCIPFVVIPATVSNNVPGSDFSVGADTALNTICTTCDRIKQSAAGTKRRVFIIETMGGYCGYLATMAGLAAGADAAYIFEEPFTIRDLQANVEHLVQKMKTTVKRGLVLRNEKCNENYTTDFIFNLYSEEGKGIFDSRKNVLGHMQQGGSPTPFDRNFATKMGAKAMNWMSGKIKESYRNGRIFANTPDSGCVLGMRKRALVFQPVAELKDQTDFEHRIPKEQWWLKLRPILKILAKYEIDLDTSDHAHLEHITRKRSGEAAV

SEQ ID NO: 1029132 - protein, 435 aa, Homo sapiens
  misc_feature (5)..(5): Xaa can be any naturally occurring amino acid
ADTPXCVVSLSGNQAVRLPLMECVQVTKDVTKAMDEKKFDEALKLRGRSFMNNWEVYKLLAHVRPPVSKSGSHTVAVMNVGAPAAGMNAAVRSTVRIGLIQGNRVLVVHDGFEGLAKGQIEEAGWSYVGGWTGQGGSKLGTKFNIQGLVIIGGFEAYTGGLELMEGRKQFDELCIPFVVIPATVSNNVPGSDFSVGADTALNTICTTCDRIKQSAAGTKRRVFIIETMGGYCGYLATMAGLAAGADAAYIFEEPFTIRDLQANVEHLVQKMKTTVKRGLVLRNEKCNENYTTDFIFNLYSEEGKGIFDSRKNVLGHMQQGGSPTPFDRNFATKMGAKAMNWMSGKIKESYRNGRIFANTPDSGCVLGMRKRALVFQPVAELKDQTDFEHRIPKEQWWLKLRPILKILAKYEIDLDTSDHAHLEHITRKRSGEAAV

SEQ ID NO: 1029133 - protein, 272 aa, Homo sapiens [sequence omitted]

SEQ ID NO: 1029134 - protein, 397 aa, Homo sapiens
  misc_feature (5)..(5): Xaa can be any naturally occurring amino acid
ADTPXCVVSLSGNQAVRLPLMECVQVTKDVTKAMDEKKFDEALKLRGRSFMNNWEVYKLLAHVRPPVSKSGSHTVAVMNVGAPAAGMNAAVRSTVRIGLIQGNRVLVVHDGFEGLAKGQIEEAGWSYVGGWTGQGGSKLGTKRTLPKKSFEQISANITKFNIQGLVIIGGFEAYTGGLELMEGRKQFDELCIPFVVIPATVSNNVPGSDFSVGADTALNTICTANVEHLVQKMKTTVKRGLVLRNEKCNENYTTDFIFNLYSEEGKGIFDSRKNVLGHMQQGGSPTPFDRNFATKMGAKAMNWMSGKIKESYRNGRIFANTPDSGCVLGMRKRALVFQPVAELKDQTDFEHRIPKEQWWLKLRPILKILAKYEIDLDTSDHAHLEHITRKRSGEAAV

SEQ ID NO: 1029135 - protein, 173 aa, Homo sapiens
MLNRLKQKMKTTVKRGLVLRNEKCNENYTTDFIFNLYSEEGKGIFDSRKNVLGHMQQGGSPTPFDRNFATKMGAKAMNWMSGKIKESYRNGRIFANTPDSGCVLGMRKRALVFQPVAELKDQTDFEHRIPKEQWWLKLRPILKILAKYEIDLDTSDHAHLEHITRKRSGEAAV

SEQ ID NO: 1029136 - protein, 452 aa, Homo sapiens; identical to SEQ ID NO: 1029131
  misc_feature (5)..(5): Xaa can be any naturally occurring amino acid

SEQ ID NO: 1029137 - protein, 71 aa, Homo sapiens
FGGIGYVGCENGLDLVTIPEMGRVRLWDGVPAVQNPDPGVETVAVLPPQTKDVTKAMDEKKFDEALKLRGR

SEQ ID NO: 1029138 - protein, 272 aa, Homo sapiens [sequence omitted]

SEQ ID NO: 1029139 - protein, 242 aa, Homo sapiens
MQFGDTALNTICTTCDRIKQSAAGTKRRVFIIETMGGYCGYLATMAGLAAGADAAYIFEEPFTIRDLQANVEHLVQKMKTTVKRGLVLRNEKCNENYTTDFIFNLYSEEGKGIFDSRKNVLGHMQQGGSPTPFDRNFATKMGAKAMNWMSGKIKESYRNGRIFANTPDSGCVLGMRKRALVFQPVAELKDQTDFEHRIPKEQWWLKLRPILKILAKYEIDLDTSDHAHLEHITRKRSGEAAV

SEQ ID NO: 1029140 - protein, 434 aa, Homo sapiens
  misc_feature (5)..(5): Xaa can be any naturally occurring amino acid
ADTPXCVVSLSGNQAVRLPLMECVQVTKDVTKAMDEKKFDEALKLRGRSFMNNWEVYKLLAHVRPPVSKSGSHTVAVMNVGAPAAGMNAAVRSTVRIGLIQGNRVLVVHDGFEGLAKGQIEEAGWSYVGGWTGQGGSKLGTKRTLPKKSFEQISANITKFNIQGLVIIGGFEAYTGGLELMEGRKQFDELCIPFVVIPATVSNNVPGSDFSVGADTALNTICTTCDRIKQSAAGTKRRVFIIETMGGYCGYLATMAGLAAGADAAYIFEEPFTIRDLQANVEHLVQKMKTTVKRGLVLRNEGKGIFDSRKNVLGHMQQGGSPTPFDRNFATKMGAKAMNWMSGKIKESYRNGRIFANTPDSGCVLGMRKRALVFQPVAELKDQTDFEHRIPKEQWWLKLRPILKILAKYEIDLDTSDHAHLEHITRKRSGEAAV

SEQ ID NO: 1029141 - protein, 452 aa, Homo sapiens; identical to SEQ ID NO: 1029131
  misc_feature (5)..(5): Xaa can be any naturally occurring amino acid

SEQ ID NO: 1029142 - protein, 76 aa, Homo sapiens
  misc_feature (29)..(29): Xaa can be any naturally occurring amino acid
SRTCSCERRSQPDGSDLSMSVQGWRTSSXQLGRYCCEASRAPQPLRDQASLFTPELLQEARAAVAGRCLLFLTFSN

SEQ ID NO: 1029143 - protein, 182 aa, Homo sapiens
MALRPRSAPSRAPAWYTARRFCRSSASRRSRLRSLRRWEARRTRSSSVLWPSMACTSPRYCTRRPAHVLHVRAQPGLRRLQLLGHRCPRLLRHRGQLFLQFRFVGLQLLHGLVHQRPQFLGDLGAEQLLLHVLTQCMHPAQVIPKATQCQFPALAALPLGLLAQLGLRLCLHRCSSSDYTPG

SEQ ID NO: 1029144 - protein, 176 aa, Homo sapiens
RTASGAPPGPFLGLSRPGQPKRRILIVVPEIFLPIEDDCGDYLVMRKTSSSNSVTTYETCQTYERPIAFTSRSKKLWIQFKSNEGNSARGFQVPYVTYDEDYQELIEDIVRDGRLYASENHQEILKDKKLIKALFDVLAHPQNYFKYTAQESREMFPRSFIRLLRSKVSRFLRPYK

SEQ ID NO: 1029145 - protein, 122 aa, Homo sapiens
FLSEDVTTIRTSVTFKLNEGKCSLKNAELFPEGLRPALLGMESDGWCRELACMWEGACSQPSWRSMGARGCPADPSTLQMELNHPQLTGTQSQEEEEHNLACCIVLGSHLRGLHMHGIVGEL

SEQ ID NO: 1029146 - protein, 216 aa, Homo sapiens
FLSEDVTTIRTSVTFKLNEGKCSLKNAELFPEGLRPALPEKHSSVKESFRYVNLTCSSGKQVPGAPGRPSTPKEMFITVEFELETNQKEVTASCDLSCIVKRTEKRLRKAIRMLRKAVHREQFHLQLSGMNLDVAKKPPRTSERQAESCGVGQGHAENQCVSCRAGTYYDGARERCILCPNGTFQNEEGQMTCEPCPRSFIRLLRSKVSRFLRPYK

SEQ ID NO: 1029147 - protein, 458 aa, Homo sapiens
FLSEDVTTIRTSVTFKLNEGKCSLKNAELFPEGLRPALPEKHSSVKESFRYVNLTCSSGKQVPGAPGRPSTPKEMFITVEFELETNQKEVTASCDLSCIVKRTEKRLRKAIRMLRKAVHREQFHLQLSGMNLDVAKKPPRTSERQAESCGVGQGHAENQCVSCRAGTYYDGARERCILCPNGTFQNEEGQMTCEPCPRPGNSGALKTPEAWNMSECGGLCQPGEYSADGFAPCQLCALGTFQPEAGRTSCFPCGGGLATKHQGATSFQDCETRVQCSPGHFYNTTTHRCIRCPVGTYQPEFGKNNCVSCPGNTTTDFDGSTNITQCKNRRCGGELGDFTGYIESPNYPGNYPANTECTWTINPPPKRRILIVVPEIFLPIEDDCGDYLVMRKTSSSNSVTTYETCQTYERPIAFTSRSKKLWIQFKSNEGNSARGFQVPYVTYDDKHSLQHMERASLL

SEQ ID NO: 1029148 - protein, 508 aa, Homo sapiens
FLSEDVTTIRTSVTFKLNEGKCSLKNAELFPEGLRPALPEKHSSVKESFRYVNLTCSSGKQVPGAPGRPSTPKEMFITVEFELETNQKEVTASCDLSCIVKRTEKRLRKAIRMLRKAVHREQFHLQLSGMNLDVAKKPPRTSERQAESCGVGQGHAENQCVSCRAGTYYDGARERCILCPNGTFQNEEGQMTCEPCPRPGNSGALKTPEAWNMSECGGLCQPGEYSADGFAPCQLCALGTFQPEAGRTSCFPCGGGLATKHQGATSFQDCETRVQCSPGHFYNTTTHRCIRCPVGTYQPEFGKNNCVSCPGNTTTDFDGSTNITQCKNRRCGGELGDFTGYIESPNYPGNYPANTECTWTINPPPKRRILIVVPEIFLPIEDDCGDYLVMRKTSSSNSVTTYETCQTYERPIAFTSRSKKLWIQFKSNEGNSARGFQVPYVTYDDQREEEKQRSLREVTGKVGGKPKSMVSWKLSEELDQGGGVTSQVKATDASRRMKTKNWPLGFNT

SEQ ID NO: 1029149 - protein, 101 aa, Homo sapiens
SKSERVSLEATEFIRMQNMFFIPTEDYQELIEDIVRDGRLYASENHQEILKDKKLIKALFDVLAHPQNYFKYTAQESREMFPRSFIRLLRSKVSRFLRPYK

SEQ ID NO: 1029150 - protein, 521 aa, Homo sapiens
FLSEDVTTIRTSVTFKLNEGKCSLKNAELFPEGLRPALPEKHSSVKESFRYVNLTCSSGKQVPGAPGRPSTPKEMFITVEFELETNQKEVTASCDLSCIVKRTEKRLRKAIRMLRKAVHREQFHLQLSGMNLDVAKKPPRTSERQAESCGVGQGHAENQCVSCRAGTYYDGARERCILCPNGTFQNEEGQMTCEPCPRPGNSGALKTPEAWNMSECGGLCQPGEYSADGFAPCQLCALGTFQPEAGRTSCFPCGGGLATKHQGATSFQDCETRVQCSPGHFYNTTTHRCIRCPVGTYQPEFGKNNCVSCPGNTTTDFDGSTNITQCKNRRCGGELGDFTGYIESPNYPGNYPANTECTWTINPPPKRRILIVVPEIFLPIEDDCGDYLVMRKTSSSNSVTTYETCQTYERPIAFTSRSKKLWIQFKSNEGNSARGFQVPYVTYDEDYQELIEDIVRDGRLYASENHQEILKDKKLIKALFDVLAHPQNYFKYTAQESREMFPRSFIRLLRSKVSRFLRPYK

SEQ ID NO: 1029151 - protein, 446 aa, Homo sapiens
FLSEDVTTIRTSVTFKLNEGKCSLKNAELFPEGLRPALPEKHSSVKESFRYVNLTCSSGKQVPGAPGRPSTPKEMFITVEFELETNQKEVTASCDLSCIVKRTEKRLRKAIRMLRKAVHREQFHLQLSGMNLDVAKKPPRTSERQAESCGVGQGHAENQCVSCRAGTYYDGARERCILCPNGTFQNEEGQMTCEPCPRPGNSGALKTPEAWNMSECGGLCQPGEYSADGFAPCQLCALGTFQPEAGRTSCFPCGGGLATKHQGATSFQDCETRVQCSPGHFYNTTTHRCIRCPVGTYQPEFGKNNCVSCPGNTTTDFDGSTNITQCKNRRCGGELGDFTGYIESPNYPGNYPANTECTWTINPPPKRRILIVVPEIFLPIEDDCGDYLVMRKTSSSNSVTTYETCQTYERPIAFTSRSKKLWIQFKSNEGNSARGFQVPYVTYDDA

SEQ ID NO: 1029152 - protein, 110 aa, Homo sapiens
  misc_feature (102)..(102): Xaa can be any naturally occurring amino acid
DSGETAAASIPEPGPSISLRSTSSSSHNAIIKIPDLGLSLKILGPAWPTWSNPVSTKNTKISRAMVVHPCNPSSFGRLRQESHLNPGGRGCSELRLCHCTPXWVTERHCV

SEQ ID NO: 1029153 - protein, 43 aa, Homo sapiens
MKDNSYLLGCDTRRRTYLTPDYEFSSTFTVICDHYNAHATTQT

SEQ ID NO: 1029154 - protein, 438 aa, Homo sapiens
  misc_feature (437)..(437): Xaa can be any naturally occurring amino acid
MLKLNMKILICVKQQHKNLLSEHEQLVVTLEDHKSALAAAQTQVAEYKQLKDTLNRIPSLRKPDPAEQQNVTQVAHSPQGYNTAREKPTREVQEVSRNNDVWQNHEAVPGRAEDTKLYAPTHKEAEFQAPPEPIQQEVERREPEEHQVEEEHRKALEEEEMEQVGQAEHLEEEHDPSPEEQDREWKEQHEQREAANLLEGHARAEVYPSAKPMIKFQSPYEEQLEQQRLAVQQVEEAQQLREHQEALHQQRLQGHLLRQQEQQQQQVAREMALQRQAELEEGRPQHQEQLRQQAHYDAMDNDIVQGAEDQGIQGEEGAYERDNQHQDEAEGDPGNRHEPREQGPREADPESEADRAAVEDINPADDPNNQGEDEFEEAEQVREENLPDENEEQKQSNQKQENTEVEEHLVMAGNPDQQEDNVDEQYQEEAEEELQEXL

SEQ ID NO: 1029155 - protein, 334 aa, Homo sapiens
MLKLNMKILICVKQQHKNLLSEHEQLVVTLEDHKSALAAAQTQVAEYKQLKDTLNRIPSLRKPDPAEQQNVTQVAHSPQGYNTAREKPTREVQEVSRNNDVWQNHEAVPGRAEDTKLYAPTHKEAEFQAPPEPIQQEVERREPEEHQVEEEHRKALEEEEMEQVGQAEHLEEEHDPSPEEQDREWKEQHEQREAANLLEGHARAEVYPSAKPMIKFQSPYEEQLEQQRLAVQQVEEAQQLREHQEALHQQRLQGHLLRQQEQQQQQVAREMALQRQAELEEGRPQHQEQLRQQAHYDAMDNDIVQGAEDQGIQGEEGAYERDNQQPRRSTRPRI

SEQ ID NO: 1029156 - protein, 202 aa, Homo sapiens
  misc_feature (201)..(201): Xaa can be any naturally occurring amino acid
MNRYSVRLATCIPRERVIPRERVIPRERVISRERVIPRERVIPRERVIQHQEQLRQQAHYDAMDNDIVQGAEDQGIQGEEGAYERDNQHQDEAEGDPGNRHEPREQGPREADPESEADRAAVEDINPADDPNNQGEDEFEEAEQVREENLPDENEEQKQSNQKQENTEVEEHLVMAGNPDQQEDNVDEQYQEEAEEELQEXL

SEQ ID NO: 1029157 - protein, 76 aa, Homo sapiens
  misc_feature (75)..(75): Xaa can be any naturally occurring amino acid
GSYPYHSCVVVAFCQCEQVREENLPDENEEQKQSNQKQENTEVEEHLVMAGNPDQQEDNVDEQYQEEAEEELQEXL

SEQ ID NO: 1029158 - protein, 494 aa, Homo sapiens
  misc_feature (493)..(493): Xaa can be any naturally occurring amino acid
RQDFNSRYSALNVQHQMLKSQHEELKKQHSDLEEEHRKQGEDFSRTFNDHKQKYLQLQQEKEQELSKLKETVYNLREENRQLRKAPQDIHTQLQDVKTQVAEYKQLKDTLNRIPSLRKPDPAEQQNVTQVAHSPQGYNTAREKPTREVQEVSRNNDVWQNHEAVPGRAEDTKLYAPTHKEAEFQAPPEPIQQEVERREPEEHQVEEEHRKALEEEEMEQVGQAEHLEEEHDPSPEEQDREWKEQHEQREAANLLEGHARAEVYPSAKPMIKFQSPYEEQLEQQRLAVQQVEEAQQLREHQEALHQQRLQGHLLRQQEQQQQQVAREMALQRQAELEEGRPQHQEQLRQQAHYDAMDNDIVQGAEDQGIQGEEGAYERDNQHQDEAEGDPGNRHEPREQGPREADPESEADRAAVEDINPADDPNNQGEDEFEEAEQVREENLPDENEEQKQSNQKQENTEVEEHLVMAGNPDQQEDNVDEQYQEEAEEEVQEXL

SEQ ID NO: 1029159 - protein, 114 aa, Homo sapiens
RQDFNSRYSALNVQHQMLKSQHEELKKQHSDLEEEHRKQGEDFSRTFNDHKQKYLQLQQEKEQELSKLKETVYNLREENRQLRKAPQDIHTQLQDVKVKENQTFHYLVFACFIW

SEQ ID NO: 1029160 - protein, 134 aa, Homo sapiens
MNRVNDPLIFIRDIKPGLKNLNVVFIVLEIGRVTKTKDGHEVRSCKVADKTGSITISVWDEIGGLIQPGDIIRLTRGYASMWKGCLTLYTGRGGELQKIGDLGAVQAAAMRDSIHYYPGNDLHPDLEEPSSLGV

SEQ ID NO: 1029161 - protein, 134 aa, Homo sapiens; identical to SEQ ID NO: 1029160

SEQ ID NO: 1029162 - protein, 70 aa, Homo sapiens
RRRSVTSAEGEGRAEGPAGARACSSESLFGTLGVRCSVSAPVSLSQPVPSRSPGQAGRAPVTRDQNQRRP

SEQ ID NO: 1029163 - protein, 110 aa, Homo sapiens
AATQRDFSGGGGAGRGSCRRAGVFIGVAVWDAGCAVFCLRSRFAVTARSFPEPGTGWARARVSERDSGQKCPLTAFFFPFIQRTGQLVRLPSCRPVGSGVGVRSGSPFFL

SEQ ID NO: 1029164 - protein, 134 aa, Homo sapiens; identical to SEQ ID NO: 1029160

SEQ ID NO: 1029165 - protein, 70 aa, Homo sapiens; identical to SEQ ID NO: 1029162

SEQ ID NO: 1029166 - protein, 134 aa, Homo sapiens; identical to SEQ ID NO: 1029160

SEQ ID NO: 1029167 - protein, 134 aa, Homo sapiens; identical to SEQ ID NO: 1029160

SEQ ID NO: 1029168 - protein, 70 aa, Homo sapiens; identical to SEQ ID NO: 1029162

SEQ ID NO: 1029169 - protein, 103 aa, Homo sapiens
MNRVNDPLIFIRDIKPGLKNLNVVFIVLEIGRVTKTKDGHEVRSCKVADKTGSITISVWDEIGGLIQPGDIIRLTRGYASMWKGCLTLYTGRGGELQKIGEKY

SEQ ID NO: 1029170 - protein, 134 aa, Homo sapiens; identical to SEQ ID NO: 1029160

SEQ ID NO: 1029171 - protein, 136 aa, Homo sapiens
MNRVNDPLIFIRDIKPGLKNLNVVFIVLEIGRVTKTKDGHEVRSCKVADKTGSITISVWDEIGGLIQPGDIIRLTRGYASMWKGCLTLYTGRGGELQKIGEDFVWFIQKCQISVNPTQIIEDSRTKGHRVNRRIIP

SEQ ID NO: 1029172 - protein, 410 aa, Homo sapiens
MPGVCDRAPDFLSPSEDQVLRPALGSSVALNCTAWVVSGPHCSLPSVQWLKDGLPLGIGGHYSLHEYSWVKANLSEVLVSSVLGVNVTSTEVYGAFTCSIQNISFSSFTLQRAGPTSHVAAVLASLLVLLALLLAALLYVKCRLNVLLWYQDAYGEVEINDGKLYDAYVSYSDCPEDRKFVNFILKPQLERRRGYKLFLDDRDLLPRAEPSADLLVNLSRCRRLIVVLSDAFLSRAWCSHSFREGLCRLLELTRRPIFITFEGQRRDPAHPALRLLRQHRHLVTLLLWRPGSVTPSSDFWKEVQLALPRKVRYRPVEGDPQTQLQDDKDPMLILRGRVPEGRALDSEVDPDPEGDLGVRGPVFGEPSAPPHTSGVSLGESRSSEVDVSDLGSRNYSARTDFYCLVSKDDM

SEQ ID NO: 1029173 - protein, 73 aa, Homo sapiens
FTWVHGHCCVAAAQSEEGAPGSLAGQVGAGSDYGFISPGHVFPEFKESDAMFAAERVSVGGRQGFWSRAAQEA

SEQ ID NO: 1029174 - protein, 410 aa, Homo sapiens; identical to SEQ ID NO: 1029172

SEQ ID NO: 1029175 - protein, 511 aa, Homo sapiens
MPGVCDRAPDFLSPSEDQVLRPALGSSVALNCTAWVVSGPHCSLPSVQWLKDGLPLGIGGHYSLHEYSWVKANLSEVLVSSVLGVNVTSTEVYGAFTCSIQNISFSSFTLQRAGPTSHVAAVLASLLVLLALLLAALLYVKCRLNVLLWYQDAYGEVEINDGKLYDAYVSYSDCPEDRKFVNFILKPQLERRRGYKLFLDDRDLLPRAEPSADLLVNLSRCRRLIVVLSDAFLSRAWCSHSFREGLCRLLELTRRPIFITFEGQRRDPAHPALRLLRQHRHLVTLLLWRPGSVVRSRRGRVRGSGGLEMGGARAPGWDPSVGSSAAPRFVNGPWGEVPLPGAPMRGAALEAPGATEELSQGVEPVGSRRCALGGQDARGFRGVHTCKPPRPGPQTPSSDFWKEVQLALPRKVRYRPVEGDPQTQLQDDKDPMLILRGRVPEGRALDSEVDPDPEGDLGVRGPVFGEPSAPPHTSGVSLGESRSSEVDVSDLGSRNYSARTDFYCLVSKDDM

SEQ ID NO: 1029176 - protein, 507 aa, Homo sapiens
MPGVCDRAPDFLSPSEDQVLRPALGSSVALNCTAWVVSGPHCSLPSVQWLKDGLPLGIGGHYSLHEYSWVKANLSEVLVSSVLGVNVTSTEVYGAFTCSIQNISFSSFTLQRAGPTSHVAAVLASLLVLLALLLAALLYVKCRLNVLLWYQDAYGEVEINDGKLYDAYVSYSDCPEDRKFVNFILKPQLERRRGYKLFLDDRDLLPRAEPSADLLVNLSRCRRLIVVLSDAFLSRAWCSHSFREGLCRLLELTRRPIFITFEGQRRDPAHPALRLLRQHRHLVTLLLWRPGSVTPSSDFWKEVQLALPRKVRYRPVEGDPQTQLQDDKDPMLILRGRVPEGRALDSEVDPDPEGDLGMPAQPHSPTGEAQHSGGVGAGTGHMGLEGLQVLRTLPGTGSPCTASALEVLGPRSAWELPGPHRPSQQGVSRGSPWQWVWAKAVGGHLRRLGLPTPGVRGPVFGEPSAPPHTSGVSLGESRSSEVDVSDLGSRNYSARTDFYCLVSKDDM

SEQ ID NO: 1029177 - protein, 401 aa, Homo sapiens
KVLIKNTQRHKPGPHRAWRCIHSSLGAVDTPWGPAKGRVCSQRRTNDQHLPPGGEELEPWVKANLSEVLVSSVLGVNVTSTEVYGAFTCSIQNISFSSFTLQRAGPTSHVAAVLASLLVLLALLLAALLYVKCRLNVLLWYQDAYGEVEINDGKLYDAYVSYSDCPEDRKFVNFILKPQLERRRGYKLFLDDRDLLPRAEPSADLLVNLSRCRRLIVVLSDAFLSRAWCSHSFREGLCRLLELTRRPIFITFEGQRRDPAHPALRLLRQHRHLVTLLLWRPGSVTPSSDFWKEVQLALPRKVRYRPVEGDPQTQLQDDKDPMLILRGRVPEGRALDSEVDPDPEGDLGVRGPVFGEPSAPPHTSGVSLGESRSSEVDVSDLGSRNYSARTDFYCLVSKDDM

SEQ ID NO: 1029178 - protein, 398 aa, Homo sapiens
MPGVCDRAPDFLSPSEDQVLRPALGSSVALNCTAWVVSGPHCSLPSVQWLKDGLPLGIGGHYSLHEYSWVKANLSEVLVSSVLGVNVTSTEVYGAFTCSIQNISFSSFTLQRAGPTSHVAAVLASLLVLLALLLAALLYVKCRLNVLLDGKLYDAYVSYSDCPEDRKFVNFILKPQLERRRGYKLFLDDRDLLPRAEPSADLLVNLSRCRRLIVVLSDAFLSRAWCSHSFREGLCRLLELTRRPIFITFEGQRRDPAHPALRLLRQHRHLVTLLLWRPGSVTPSSDFWKEVQLALPRKVRYRPVEGDPQTQLQDDKDPMLILRGRVPEGRALDSEVDPDPEGDLGVRGPVFGEPSAPPHTSGVSLGESRSSEVDVSDLGSRNYSARTDFYCLVSKDDM

SEQ ID NO: 1029179 - protein, 410 aa, Homo sapiens; identical to SEQ ID NO: 1029172

SEQ ID NO: 1029180 - protein, 354 aa, Homo sapiens
MPGVCDRAPDFLSPSEDQVLRPALGSSVALNCTAWVVSGPHCSLPSVQWLKDGLPLGIGGHYSLHEYSWPYKPRGCGAGLPPGPAGPAAGRPALCQVPSQRAALVPGRVWGGGDKRDCPEDRKFVNFILKPQLERRRGYKLFLDDRDLLPRAEPSADLLVNLSRCRRLIVVLSDAFLSRAWCSHSFREGLCRLLELTRRPIFITFEGQRRDPAHPALRLLRQHRHLVTLLLWRPGSVTPSSDFWKEVQLALPRKVRYRPVEGDPQTQLQDDKDPMLILRGRVPEGRALDSEVDPDPEGDLGVRGPVFGEPSAPPHTSGVSLGESRSSEVDVSDLGSRNYSARTDFYCLVSKDDM

SEQ ID NO: 1029181 - protein, 479 aa, Homo sapiens [sequence omitted]

SEQ ID NO: 1029182 - protein, 167 aa, Homo sapiens
MPGVCDRAPDFLSPSEDQVLRPALGSSVALNCTAWVVSGPHCSLPSVQWLKDGLPLGIGGHYSLHEYSWVKANLSEVLVSSVLGVNVTSTEVYGAFTCSIQNISFSSFTLQRAGPTSHVAAVLASLLVLLALLLAALLYVKCRLNVLLQGTSFQNSKRAMPCLLPRE

SEQ ID NO: 1029183 - protein, 106 aa, Homo sapiens
MGPSPAPSRTSASPPSLFRELALQATWLRCWPPSWSCWPCCWPPCSMSSAVSTCCSRARLSRIQRERCHVCCRESECGRPPGVLESGCSGSVKGSAGSPACLRVGG

SEQ ID NO: 1029184 - protein, 410 aa, Homo sapiens; identical to SEQ ID NO: 1029172

SEQ ID NO: 1029185 - protein, 281 aa, Homo sapiens [sequence omitted]

SEQ ID NO: 1029186 - protein, 467 aa, Homo sapiens
KVLIKNTQRHKPGPHRAWRCIHSSLGAVDTPWGPAKGRVCSQRRTNDQHLPPGGEELEPGVCDRAPDFLSPSEDQVLRPALGSSVALNCTAWVVSGPHCSLPSVQWLKDGLPLGIGGHYSLHEYSWVKANLSEVLVSSVLGVNVTSTEVYGAFTCSIQNISFSSFTLQRAGPTSHVAAVLASLLVLLALLLAALLYVKCRLNVLLWYQDAYGEVEINDGKLYDAYVSYSDCPEDRKFVNFILKPQLERRRGYKLFLDDRDLLPRAEPSADLLVNLSRCRRLIVVLSDAFLSRAWCSHSFREGLCRLLELTRRPIFITFEGQRRDPAHPALRLLRQHRHLVTLLLWRPGSVTPSSDFWKEVQLALPRKVRYRPVEGDPQTQLQDDKDPMLILRGRVPEGRALDSEVDPDPEGDLGVRGPVFGEPSAPPHTSGVSLGESRSSEVDVSDLGSRNYSARTDFYCLVSKDDM

SEQ ID NO: 1029187 - protein, 410 aa, Homo sapiens; identical to SEQ ID NO: 1029172

SEQ ID NO: 1029188 - protein, 365 aa, Homo sapiens
MPGVCDRAPDFLSPSEDQVLRPALGSSVALNCTAWVVSGPHCSLPSVQWLKDGLPLGIGGHYSLHEYSWPYKPRGCGAGLPPGPAGPAAGRPALCQVPSQRAALVPGRVWGGGDKRREALRRLRLLQRLPRGPQVRELHPKAAAGAASGLQALPGRPDLLPRAEPSADLLVNLSRCRRLIVVLSDAFLSRAWCSHSFREGLCRLLELTRRPIFITFEGQRRDPAHPALRLLRQHRHLVTLLLWRPGSVTPSSDFWKEVQLALPRKVRYRPVEGDPQTQLQDDKDPMLILRGRVPEGRALDSEVDPDPEGDLGVRGPVFGEPSAPPHTSGVSLGESRSSEVDVSDLGSRNYSARTDFYCLVSKDDM

SEQ ID NO: 1029189 - protein, 169 aa, Homo sapiens
MPGVCDRAPDFLSPSEDQVLRPALGSSVALNCTAWVVSGPHCSLPSVQWLKDGLPLGIGGHYSLHEYSWVKANLSEVLVSSVLGVNVTSTEVYGAFTCSIQNISFSSFTLQRAGPTSHVAAVLASLLVLLALLLAALLYVKCRLNVLLWYQDAYGEVEINATAPRTASS

SEQ ID NO: 1029190 - protein, 410 aa, Homo sapiens; identical to SEQ ID NO: 1029172

SEQ ID NO: 1029191 - protein, 113 aa, Homo sapiens
MAALGSPSHTFRGLLRELRYLSAATGRPYRDTAAYRYLVKAFRAHRVTSEKLCRAQHELHFQAATYLCLLRSIRKHVALHQEFHGKGERSVEESAGLVGLKLPHQPGGKGWEP

SEQ ID NO: 1029192 - protein, 113 aa, Homo sapiens
MAALGSPAHTFRGLLRELRYLSAATGRPYRDTAAYRYLVKAFRAHRVTSEKLCRAQHELHFQAATYLCLLRSIRKHVALHQEFHGKGERSVEESAGLVGLKLPHQPGGKGWEP

SEQ ID NO: 1029193 - protein, 110 aa, Homo sapiens
MRLHAAACAAAMSLVIPEKFQHILRVLNTNIDGRRKIAFAITAIKGVGRRYAHVVLRKADIDLTKRAGELTEDEVERVITIMQNPRQYKIPDWFLNRPEGCKGWKIPARS

SEQ ID NO: 1029194 - protein, 110 aa, Homo sapiens; identical to SEQ ID NO: 1029193

SEQ ID NO: 1029195 - protein, 110 aa, Homo sapiens; identical to SEQ ID NO: 1029193

SEQ ID NO: 1029196 - protein, 110 aa, Homo sapiens; identical to SEQ ID NO: 1029193

SEQ ID NO: 1029197 - protein, 66 aa, Homo sapiens
EENPGGISGLCQGCNGYIRAAELRHVMATLGEKLPDGELDEMIREADMDGDGQVNYEEFVQMMTAK

SEQ ID NO: 1029198 - protein, 66 aa, Homo sapiens; identical to SEQ ID NO: 1029197

SEQ ID NO: 1029199 - protein, 124 aa, Homo sapiens
ARNIKVSDPKLFEMIKYCLLRTLKQCQTLREALIAAGKEIIWHGRTKEEPAHYCSICEVEVFDLLFVTNESNSRKTYIVHCQDCARKTSGNLENFVVLEQYKMEDLMQVYDQFTLAPPLPSASS

SEQ ID NO: 1029200 - protein, 214 aa, Homo sapiens
RHSPSPPHLTSPPPATDEGPAGGTLSGPAATAPPRLLDVGVQACPTHPPPPTAPRGHQSCRLGDSWSVKSRWCPCPQELGWASCARGVCAWSFCAWICIFIALLVETPRPVHPAKTPQAACGSRTLPPFPRCPLRARAATQACWLRPPLGQALAQPAEWGVVGQSPRSWAPAQAHRARPHPAAPRTATRGVLPLCPAPGTNSMFGVCLCLFFKK

SEQ ID NO: 1029201 - protein, 214 aa, Homo sapiens; identical to SEQ ID NO: 1029200

SEQ ID NO: 1029202 - protein, 314 aa, Homo sapiens
  misc_feature (152)..(152): Xaa can be any naturally occurring amino acid
  misc_feature (161)..(161): Xaa can be any naturally occurring amino acid
  misc_feature (166)..(166): Xaa can be any naturally occurring amino acid
  misc_feature (168)..(169): Xaa can be any naturally occurring amino acid
  misc_feature (171)..(171): Xaa can be any naturally occurring amino acid
  misc_feature (174)..(174): Xaa can be any naturally occurring amino acid
  misc_feature (186)..(186): Xaa can be any naturally occurring amino acid
  misc_feature (201)..(201): Xaa can be any naturally occurring amino acid
  misc_feature (206)..(207): Xaa can be any naturally occurring amino acid
  misc_feature (212)..(212): Xaa can be any naturally occurring amino acid
  misc_feature (217)..(217): Xaa can be any naturally occurring amino acid
  misc_feature (219)..(219): Xaa can be any naturally occurring amino acid
  misc_feature (226)..(226): Xaa can be any naturally occurring amino acid
  misc_feature (232)..(232): Xaa can be any naturally occurring amino acid
  misc_feature (242)..(242): Xaa can be any naturally occurring amino acid
  misc_feature (254)..(255): Xaa can be any naturally occurring amino acid
  misc_feature (272)..(272): Xaa can be any naturally occurring amino acid
  misc_feature (283)..(283): Xaa can be any naturally occurring amino acid
  misc_feature (309)..(309): Xaa can be any naturally occurring amino acid
GFQPFIQTRTQKNTRHPLTLSGGGTLWRKDTAGLATALTSDHSGLPLPEMSVGWGLSATPRPSVCSGSAAVLAPGITVPESPAHPGTGRVIMGWTCLCWGLLIPKHLKSGSREQAMGTCTSNRGPPSTVRDGDEKQSSTKRPPQGQSVHDSXRMVMSGLVXFTSTXGXXIXLVXLSPMIFGRYRPXAIPFHQRSSLAVLKXIFSLXXVPWKXINKFXTXRIMAFTXKTRFSXVPEGGLSRGXSLLRRRFSSGPXXWGLTLGFPQPWMTLAVXVSLLSWRALMXSASHVCTLPMTLSTPDVPQNLSVMSXMESRR

SEQ ID NO: 1029203 - protein, 118 aa, Homo sapiens
GFQPFIQTRTQKNTRHPLTLSGGGTLWRKDTAGLATALTSDHSGLPLPEMSVGWGLSATPRPSVCSGSAAVLAPGITVPESPAHPGTGRVIMGWTCLCWGLLIPKHLKSGSREQAMGT

SEQ ID NO: 1029204 - protein, 131 aa, Homo sapiens
IGPDIAHGGAVNKRLVLLVDEFKELVYHQITILMVKVTKRKHDNEGSGSKRPKVEYSEEELKTHISKGTLGKFTVAHAGKRPAGLTGLKSGLKKQELWEALHQALPGTDQRPRVQLPFRSVARLPGLVLSQ

SEQ ID NO: 1029205 - protein, 621 aa, Homo sapiens [sequence omitted]

SEQ ID NO: 1029206 - protein, 646 aa, Homo sapiens
ASRRRDSGRLFFLQPRCAHRGLRAQKCGRPAPGVDAMVLCPVIGKLLHKRVVLASASPRRQEILSNAGLRFEVVPSKFKEKLDKASFATPYGYAMETAKQKALEVANRLYQKDLRAPDVVIGADTIVTVGGLILEKPVDKQDAYRMLSRLSGREHSVFTGVAIVHCSSKDHQLDTRVSEFYEETKVKFSELSEELLWEYVHSGEPMDKAGGYGIQALGGMLVESVHGDFLNVVGFPLNHFCKQLVKLYYPPRPEDLRRSVKHDSIPAADTFEDLSDVEGGGSEPTQRDAGSRDEKAEAGEAGQATAEAECHRTRETLPPFPTRLLELIEGFMLSKGLLTACKLKVFDLLKDEAPQKAADIASKVDASACGMERLLDICAAMGLLEKTEQGYSNTETANVYLASDGEYSLHGFIMHNNDLTWNLFTYLEFAIREGTNQHHRALGKKAEDLFQDAYYQSPETRLRFMRAMHGMTKLTACQVATAFNLSRFSSACDVGGCTGALARELAREYPRMQVTVFDLPDIIELAAHFQPPGPQAVQIHFAAGDFFRDPLPSAELYVLCRILHDWPDDKVHKLLSRVAESCKPGAGLLLVETLLDEEKRVAQRALMQSLNMLVQTEGKERSLGEYQCLLELQVDRPVPKYHRTVT

SEQ ID NO: 1029207 - protein, 544 aa, Homo sapiens
ASRRRDSGRLFFLQPRCAHRGLRAQKCGRPAPGVDAMVLCPVIGKLLHKRVVLASASPRRQEILSNAGLRFEVVPSKFKEKLDKASFATPYGYAMETAKQKALEVANRLYQKDLRAPDVVIGADTIVTVGGLILEKPVDKQDAYRMLSRLSGREHSVFTGVAIVHCSSKDHQLDTRVSEFYEETKVKFSELSEELLWEYVHSGEPMDKAGGYGIQALGGMLVESVHGDFLNVVGFPLNHFCKQLVKLYYPPRPEDLRRSVKHDSIPAADTFEDLSDVEGGGSEPTQRDAGSRDEKAEAGEAGQATAEAECHRTRETLPPFPTRLLELIEGFMLSKGLLTACKLKVFDLLKDEAPQKAADIASKVDASACGMERLLDICAAMGLLEKTEQGYSNTETANVYLASDGEYSLHGFIMHNNDLTWNLFTYLEFAIREGTNQHHRALGKKAEDLFQDAYYQSPETRLRFMRAMHGMTKLTACQVATAFNLSRFSSACDVGGCTGALARELAREYPRMQVTVFDLPDIIELAAHFQPPGPQAVTEHAGAD

SEQ ID NO: 1029208 - protein, 398 aa, Homo sapiens
ASRRRDSGRLFFLQPRCAHRGLRAQKCGRPAPGVDAMVLCPVIGKLLHKRVVLASASPRRQEILSNAGLRFEVVPSKFKEKLDKASFATPYGYAMETAKQKALEVANRLYQKDLRAPDVVIGADTIVTVGGLILEKPVDKQDAYRMLSRLSGREHSVFTGVAIVHCSSKDHQLDTRVSEFYEETKVKFSELSEELLWEYVHSGEPMDKAGGYGIQALGGMLVESVHGDFLNVVGFPLNHFCKQLVKLYYPPRPEDLRRSVKHDSIPAADTFEDLSDVEGGGSEPTQRDAGSRDEKAEAGEAGQATAEAECHRTRETLPPFPTRLLELIEGFMLSKGLLTACKLKVFDLLKDEAPQKAADIASKVDASACGMERLLDICAAMGLLEKTEQGYRTQRVLL

SEQ ID NO: 1029209 - protein, 235 aa, Homo sapiens
CQICKNRNAEDLFMFERGFALSPRLEDPRLAGQDSSSLLSPLQARGRPAAGGDPPSRQTAAVTVPSTRQGLSPSPHSSLHLPIFCTISSVFPPWDAIAAAHPWMPTGYGVAVLWAASISPALVQRLSRAGPPQPLLRELKCVCKHPPPRAQAGQTHTHPVRPSWAHAHCGCRELSASTFPPCSAPSCCSRPVSRPSDLSSPSGAHTAPFPPWPLHQGMAGPTWGWAGVEPFNSQP

SEQ ID NO: 1029210 - protein, 110 aa, Homo sapiens
MEWQFSGRLPSLLPWCVCKHPPPRAQAGQTHTHPVRPSWAHAHCGCRELSASTFPPCSAPSCCSRPVSRPSDLSSPSGAHTAPFPPWPLHQGMAGPTWGWAGVEPFNSQP

SEQ ID NO: 1029211 - protein, 636 aa, Homo sapiens
ASRRRDSGRLFFLQPRCAHRGLRAQKCGRPAPGVDAMVLCPVIGKLLHKRVVLASASPRRQEILSNAGLRFEVVPSKFKEKLDKASFATPYGYAMETAKQKALEVANRLYQKDLRAPDVVIGADTIVTVGGLILEKPVDKQDAYRMLSRLSGREHSVFTGVAIVHCSSKDHQLDTRVSEFYEETKVKFSELSEELLWEYVHSGEPMDKAGGYGIQALGGMLVESVHGDFLNVVGFPLNHFCKQLVKLYYPPRPEDLRRSVKHDSIPAADTFEDLSDVEGGGSEPTQRDAGSRDEKAEAGEAGQATAEAECHRTRETLPPFPTRLLELIEGFMLSKGLLTACKLKVFDLLKDEAPQKAADIASKVDASACGMERLLDICAAMGLLEKTEQGYSNTETANVYLASDGEYSLHGFIMHNNDLTWNLFTYLEFAIREGTNQHHRALGKKAEDLFQDAYYQSPETRLRFMRAMHGMTKLTACQVATAFNLSRFSSACDVGGCTGALARELAREYPRMQVTVFDLPDIIELAAHFQPPGPQAVQIHFAAGDFFRDPLPSAELYVLCRILHDWPDDKVHKLLSRVAESVLSSCCLLCPLCPAEGSPPGWPGLQLSAVSLASQGPACCWWRRSWMRRRGWRSAP

SEQ ID NO: 1029212 - protein, 630 aa, Homo sapiens
ASRRRDSGRLFFLQPRCAHRGLRAQKCGRPAPGVDAMVLCPVIGKLLHKRVVLASASPRRQEILSNAGLRFEVVPSKFKEKLDKASFATPYGYAMETAKQKALEVANRLYQKDLRAPDVVIGADTIVTVGGLILEKPVDKQDAYRMLSRLSGREHSVFTGVAIVHCSSKDHQLDTRVSEFYEETKVKFSELSEELLWEYVHSGEPMDKAGGYGIQALGGMLVESVHGDFLNVVGFPLNHFCKQLVKLYYPPRPEDLRRSVKHDSIPAADTFEDLSDVEGGGSEPTQRDAGSRDEKAEAGEAGQATAEAECHRTRETLPPFPTRLLELIEGFMLSKGLLTACKLKVFDLLKDEAPQKAADIASKVDASACGMERLLDICAAMGLLEKTEQGYSNTETANVYLASDGEYSLHGFIMHNNDLTWNLFTYLEFAIREGTNQHHRALGKKAEDLFQDAYYQSPETRLRFMRAMHGMTKLTACQVATAFNLSRFSSACDVGGCTGALARELAREYPRMQVTVFDLPDIIELAAHFQPPGPQAVQIHFAAGDFFRDPLPSAELYVLCRILHDWPDDKVHKLLSRVAESCKPGAGLLLVETLLDEEKRVAQRALMQSLNMLVQTEGKERSLLAGRRLL

SEQ ID NO: 1029213 - protein, 694 aa, Homo sapiens
ASRRRDSGRLFFLQPRCAHRGLRAQKCGRPAPGVDAMVLCPVIGKLLHKRVVLASASPRRQEILSNAGLRFEVVPSKFKEKLDKASFATPYGYAMETAKQKALEVANRLYQKDLRAPDVVIGADTIVTVGGLILEKPVDKQDAYRMLSRLSGREHSVFTGVAIVHCSSKDHQLDTRVSEFYEETKVKFSELSEELLWEYVHSGEPMDKAGGYGIQALGGMLVESVHGDFLNVVGFPLNHFCKQLVKLYYPPRPEDLRRSVKHDSIPAADTFEDLSDVEGGGSEPTQRDAGSRDEKAEAGEAGQATAEAECHRTRETLPPFPTRLLELIEGFMLSKGLLTACKLKVFDLLKDEAPQKAADIASKVDASACGMERLLDICAAMGLLEKTEQGYSNTETANVYLASDGEYSLHGFIMHNNDLTWNLFTYLEFAIREGTNQHHRALGKKAEDLFQDAYYQSPETRLRFMRAMHGMTKLTACQVATAFNLSRFSSACDVGGCTGALARELAREYPRMQVTVFDLPDIIELAAHFQPPGPQAVQIHFAAGDFFRDPLPSAELYVLCRILHDWPDDKVHKLLSRVAESVLSSCCLLCPLCPAEGSPPGWPGLQLSAVSLRGRPAAGGDAPPSRQTAAVTVPSTRQGLSPSPHSSLHLPIFCTISSVFPPWDAIAAAHPWMPTGYGVAVLWAASISPALVRL

SEQ ID NO: 1029214 - protein, 206 aa, Homo sapiens
ASRRRDSGRLFFLQPRCAHRGLRAQKCGRPAPGVDAMVLCPVIGKLLHKRVVLASASPRRQEILSNAGLRFEVVPSKFKEKLDKASFATPYGYAMETAKQKALEVANRLYQKDLRAPDVVIGADTIVTVGGLILEKPVDKQDAYRMLSRLSGREHSVFTGVAIVHCSSKDHQLDTRVSEFYEETKVKFSELSEELLWEYVHSGEPM

SEQ ID NO: 1029215 - protein, 142 aa, Homo sapiens [sequence omitted]

SEQ ID NO: 1029216 - protein, 78 aa, Homo sapiens
ASRRRDSGRLFFLQPRCAHRGLRAQKCGRPAPGVDAMVLCPVIGKLLHKRVVLASASPRRQEILSNAGLRFEVVPSNV

SEQ ID NO: 1029217 - protein, 296 aa, Homo sapiens
MFLLKHLAPRMNRTGCSFLWKISRQAGIFCMSPSRADDAVHKACPSCAQSLPVAFRWLSCPQLLYTGSLGIADVHNVHLRLRPPMEGLPGSSVFALDLRCEISWMICSAIVFGEGLPMPRLLDHSTPVIPRPLKVIGNDGSLDSVHGLAKGLAQLLHAVSIHDDGMPTEGLAPLLVDVHLVLQWGLGFTFWLQADLTVLGTWANQMVLSQALIGSHLPNGTWGRPHYKSPLTAPRLPSKANRSQVAGHCQKYLARCRPIPQAGPEALAPGSHVATSVKALFRDRVPVQVGADLPQV

SEQ ID NO: 1029218 - protein, 704 aa, Homo sapiens
ASRRRDSGRLFFLQPRCAHRGLRAQKCGRPAPGVDAMVLCPVIGKLLHKRVVLASASPRRQEILSNAGLRFEVVPSKFKEKLDKASFATPYGYAMETAKQKALEVANRLYQKDLRAPDVVIGADTIVTVGGLILEKPVDKQDAYRMLSRLSGREHSVFTGVAIVHCSSKDHQLDTRVSEFYEETKVKFSELSEELLWEYVHSGEPMDKAGGYGIQALGGMLVESVHGDFLNVVGFPLNHFCKQLVKLYYPPRPEDLRRSVKHDSIPAADTFEDLSDVEGGGSEPTQRDAGSRDEKAEAGEAGQATAEAECHRTRETLPPFPTRLLELIEGFMLSKGLLTACKLKVFDLLKDEAPQKAADIASKVDASACGMERLLDICAAMGLLEKTEQGYSDPAGFALRIFAGGSHSGKVTWSLGRARKEGHTFCPSALRNAAFPERVNTETANVYLASDGEYSLHGFIMHNNDLTWNLFTYLEFAIREGTNQHHRALGKKAEDLFQDAYYQSPETRLRFMRAMHGMTKLTACQVATAFNLSRFSSACDVGGCTGALARELAREYPRMQVTVFDLPDIIELAAHFQPPGPQAVQIHFAAGDFFRDPLPSAELYVLCRILHDWPDDKVHKLLSRVAESCKPGAGLLLVETLLDEEKRVAQRALMQSLNMLVQTEGKERSLGEYQCLLELHGFHQVQVVHLGGVLDAILATKVAP

SEQ ID NO: 1029219 - protein, 804 aa, Homo sapiens
ASRRRDSGRLFFLQPRCAHRGLRAQKCGRPAPGVDAMVLCPVIGKLLHKRVVLASASPRRQEILSNAGLRFEVVPSKFKEKLDKASFATPYGYAMETAKQKALEVANRLYQKDLRAPDVVIGADTIVTVGGLILEKPVDKQDAYRMLSRLSGREHSVFTGVAIVHCSSKDHQLDTRVSEFYEETKVKFSELSEELLWEYVHSGEPMDKAGGYGIQALGGMLVESVHGDFLNVVGFPLNHFCKQLVKLYYPPRPEDLRRSVKHDSIPAADTFEDLSDVEGGGSEPTQRDAGSRDEKAEAGEAGQATAEAECHRTRETLPPFPTRLLELIEGFMLSKGLLTACKLKVFDLLKDEAPQKAADIASKVDASACGMERLLDICAAMGLLEKTEQGYSNTETANVYLASDGEYSLHGFIMHNNDLTWNLFTYLEFAIREGTNQHHRALGKKAEDLFQDAYYQSPETRLRFMRAMHGMTKLTACQVATAFNLSRFSSACDVGGCTGALARELAREYPRMQVTVFDLPDIIELAAHFQPPGPQAVQIHFAAGDFFRDPLPSAELYVLCRILHDWPDDKVHKLLSRVAESVLSSCCLLCPLCPAEGSPPGWPGLQLSAVSLRGRPAAGGDAPPSRQTAAVTVPSTRQGLSPSPHSSLHLPIFCTISSVFPPWDAIAAAHPWMPTGYGVAVLWAASISPALVQRLSRAGPPQPLLLGLKCVCKHPPPRAQAGQTHTHPVRPSWAHAHCGCRELSASTFPPCSAPSCCSRPVSRPSDLSSPSGAHTAPFPPWPLHQGMAGPTWGWAGVEPFNSQP

SEQ ID NO: 1029220 - protein, 126 aa, Homo sapiens
PRGGGTLAACFFCMPRCAHRGLRAQKCGRPAPGVDAMVLCPVIGKLLHKRVVLASASPRRQEILSNAGLRFEVVPSKFKEKLDKASFATPYGYAMETAKQKALEVANRLYQARGPCPSALMKIPLL

SEQ ID NO: 1029221 - protein, 146 aa, Homo sapiens
TSTCLSYSKTQPMTPNRGPLSPPNDLRPSHVISLPLHNAPHTRPTNQHTNHIPMMARCNTRKHIPRPPHTTCPKRPSIRDNPIYYLRSFFLRRIFLSLLPLQPSPYPPIRRALAPNRHHPAKSPRSPTPKHIRITRIRSINHLSSP

SEQ ID NO: 1029222 - protein, 51 aa, Homo sapiens
MQHNKTTLNIDTHPDPAPYVSCTDTTSRPSNHNTDTRSSPVQHHRYRATPP

SEQ ID NO: 1029223 - protein, 104 aa, Homo sapiens
  misc_feature (6)..(6): Xaa can be any naturally occurring amino acid
  misc_feature (17)..(17): Xaa can be any naturally occurring amino acid
  misc_feature (43)..(43): Xaa can be any naturally occurring amino acid
SSSRPXPPPPPPPAGAXSPAPAPPPAPPPPPPPKAPLRAPPFXPPPFFPRRIPPSPFPPPPRPSPPIRRPPAPPRPPPAKSPRSPTPKHIRITRIRSINHLSSP

SEQ ID NO: 1029224 - protein, 146 aa, Homo sapiens; identical to SEQ ID NO: 1029221

SEQ ID NO: 1029225 - protein, 136 aa, Homo sapiens
GLIKTRPFPLKGAFNLLITPAKPMVFLPPQKALKLGFLPTPYPYPIWGVLPRKPFQGPPPPLSKKASPRDNPIYYLRSFFLRRIFLSLLPLQPSPYPPIRRALAPNRHHPAKSPRSPTPKHIRITRIRSINHLSSP

SEQ ID NO: 1029226 - protein, 146 aa, Homo sapiens; identical to SEQ ID NO: 1029221

SEQ ID NO: 1029227 - protein, 146 aa, Homo sapiens; identical to SEQ ID NO: 1029221

SEQ ID NO: 1029228 - protein, 275 aa, Homo sapiens
MGNFRGHALPGTFFFIIGLWWCTKSILKYICKKQKRTCYLGSKTLFYRLEILEGITIVGMALTGMAGEQFIPGGPHLMLYDYKQGHWNQLLGWHHFTMYFFFGLLGVADILCFTISSLPVSLTKLMLSNALFVEAFIFYNHTHGREMLDIFVHQLLVLVVFLTGLVAFLEFLVRNNVLLELLRSSLILLQGSWFFQIGFVLYPPSGGPAWDLMDHENILFLTICFCWHYAVTIVIVGMNYAFITWLVKSRLKRLCSSEVGLLKNAEREQESEEEM

SEQ ID NO: 1029229 - protein, 291 aa, Homo sapiens
MTNDSEGKMGFKHPKIMGNFRGHALPGTFFFIIGLWWCTKSILKYICKKQKRTCYLGSKTLFYRLEILEGITIVGMALTGMAGEQFIPGGPHLMLYDYKQGHWNQLLGWHHFTMYFFFGLLGVADILCFTISSLPVSLTKLMLSNALFVEAFIFYNHTHGREMLDIFVHQLLVLVVFLTGLVAFLEFLVRNNVLLELLRSSLILLQGSWFFQIGFVLYPPSGGPAWDLMDHENILFLTICFCWHYAVTIVIVGMNYAFITWLVKSRLKRLCSSEVGLLKNAEREQESEEEM

SEQ ID NO: 1029230 - protein, 216 aa, Homo sapiens [sequence omitted]

SEQ ID NO: 1029231 - protein, 291 aa, Homo sapiens; identical to SEQ ID NO: 1029229

SEQ ID NO: 1029232 - protein, 111 aa, Homo sapiens
MTQKGKWDLNTQKIGFVLYPPSGGPAWDLMDHENILFLTICFCWHYAVTIVIVGMNYAFITWLTSGPHLLRGWKAFKISASIQGNALPHVSSPPEPKEDYCLFLFQNASYP

SEQ ID NO: 1029233 - protein, 111 aa, Homo sapiens; identical to SEQ ID NO: 1029232

SEQ ID NO: 1029234 - protein, 291 aa, Homo sapiens; identical to SEQ ID NO: 1029229

SEQ ID NO: 1029235 - protein, 291 aa, Homo sapiens; identical to SEQ ID NO: 1029229

SEQ ID NO: 1029236 - protein, 273 aa, Homo sapiens
MTNDSEGKMGFKHPKIMGNFRGHALPGTFFFIIGLWWCTKSILKYICKKQKRTCYLGSALTGMAGEQFIPGGPHLMLYDYKQGHWNQLLGWHHFTMYFFFGLLGVADILCFTISSLPVSLTKLMLSNALFVEAFIFYNHTHGREMLDIFVHQLLVLVVFLTGLVAFLEFLVRNNVLLELLRSSLILLQGSWFFQIGFVLYPPSGGPAWDLMDHENILFLTICFCWHYAVTIVIVGMNYAFITWLVKSRLKRLCSSEVGLLKNAEREQESEEEM

SEQ ID NO: 1029237 - protein, 291 aa, Homo sapiens; identical to SEQ ID NO: 1029229

SEQ ID NO: 1029238 - protein, 291 aa, Homo sapiens; identical to SEQ ID NO: 1029229

SEQ ID NO: 1029239 - protein, 310 aa, Homo sapiens
MTNDSEGKMGFKHPKIMGNFRGHALPGTFFFIIGLWWCTKSILKYICKKQKRTCYLGSKTLFYRLEILEGITIVGMALTGMAGEQFIPGGPHLMLYDYKQGHWNQLLGWHHFTMYFFFGLLGVADILCFTISSLPVSLTKLMLSNALFVEAFIFYNHTHGREMLDIFVHQLLVLVVFLTGLVAFLEFLVRNNVLLELLRSSLILLQGSWFFQIGFVLYPPSGGPAWDLMDHENILFLTICFCWHYAVTIVIVGMNYAFITWLTSGPHLLRGWKAFKISASIQGNALPHVSSPPEPKEDYCLFLFQNASYP

SEQ ID NO: 1029240 - protein, 198 aa, Homo sapiens [sequence omitted]

SEQ ID NO: 1029241 - protein, 291 aa, Homo sapiens; identical to SEQ ID NO: 1029229

SEQ ID NO: 1029242 - protein, 310 aa, Homo sapiens; identical to SEQ ID NO: 1029239

SEQ ID NO: 1029243 - protein, 277 aa, Homo sapiens
SLARNMDRLSLDEEHYNRQEEWRRQLPESLGEGLRQGLSRLGISLLGAIAGIVDQPMQNFQKTSEAQASAGHKAKGVISGVGKGIMGVFTKPIGGAAELVSQTGYGILHGAGLSQLPKQRHQPSDLHADQAPNSHVKYVWKMLQSLGRPEVHMALDVVLVRGSGQEHEGCLLLTSEVLFVVSVSEDTQQQAFPVTEIDCAQDSKQNNLLTVQLKQPRVACDVEVRFRKQGNQDELAREVEEQAGHWYLGISELQPLDVAAGDHGDLLLRGGSVEAGC

SEQ ID NO: 1029244 - protein, 305 aa, Homo sapiens
SLARNMDRLSLDEEHYNRQEEWRRQLPESLGEGLRQGLSRLGISLLGAIAGIVDQPMQNFQKTSEAQASAGHKAKGVISGVGKGIMGVFTKPIGGAAELVSQTGYGILHGAGLSQLPKQRHQPSDLHADQAPNSHVKYVWKMLQSLGRPEVHMALDVVLVRGSGQEHEGCLLLTSEVLFVVSVSEDTQQQAFPVTEIDCAQDSKQNNLLTVQLKQPRVACDVEVDGVRERLSEQQYNRLVDYITKTSCHLAPSCSSMQIPCPVVAAEPPPSTVKTYHYLVDPHFAQVFLSKFTMVKNKALRKGFP

SEQ ID NO: 1029245 - protein, 305 aa, Homo sapiens; identical to SEQ ID NO: 1029244

SEQ ID NO: 1029246 - protein, 95 aa, Homo sapiens
DTQADGAPHSARSWAALPASEVVRGDTQHGDTQRLVTGGVDHVAQGLLGVLDAATLGVAVAQEHPATMTAAHRTRTHSRFTLMSTVTRFYNANFH

SEQ ID NO: 1029247 - protein, 178 aa, Homo sapiens
FFRKAFLKERKFPGPPEKSINKIGHALHAHDPFFKSITIPFKVQTLARSLGLQMPVVVQSMYIFKSPLIRTPPSCTRSPWAGCWACGSQWRMPRWRTAVSGSSLAPTPGPWSSSMEKWYTRASRTSLTARARPTLSTSWRPLAPPGARRTGSSQQLNCPFPNCTPKGSRRAGALAPPG

SEQ ID NO: 1029248 - protein, 159 aa, Homo sapiens
FFRKAFLIRKEISWSLRRNPSTKLATLCTPTTPFSRASHIPFKVQPLARSLGLQMPVVVQSMYIFKQPHFGGEVSPHQDASFLYTEPLGRVLGVWIAVEDATLENGCLWFIPGSHTRALVLIHGEVVHKSKQNLSDRSRQAYTFHLMEASGTTWSPENW

SEQ ID NO: 1029249 - protein, 113 aa, Homo sapiens
NDPLAGERLSLVIVLHTSGVSRRMVRAPVGSAPGTSFLGSEPARDNSLFVPTPVQRGALVLIHGEVVHKSKQNLSDRSRQAYTFHLMEASGTTWSPENWLQPTAELPFPQLYT

SEQ ID NO: 1029250 - protein, 212 aa, Homo sapiens
FFRKAFLIRKEISWSLRRNPSTKLATLCTPTTPFSRASHIPFKVQPLARSLGLQMPVVVQSMYIFKQPHFGGEVSPHQDASFLYTEPLGRVLGVWIAVEDATLENGCLWFIPGSHTSGVSRRMVRAPVGSAPGTSFLGSEPARDNSLFVPTPVQRGALVLIHGEVVHKSKQNLSDRSRQAYTFHLMEASGTTWSPENWLQPTAELPFPQLYT

SEQ ID NO: 1029251 - protein, 246 aa, Homo sapiens
FFRKAFLIRKEISWSLRRNPSTKLATLCTPTTPFSRASHIPFKVQPLARSLGLQMPVVVQSMYIFKQPHFGGEVSPHQDASFLYTEPLGRVLGVWIAVEDATLENGCLWFIPGSHTSEEPCLFCPLGTPHPLGRGTLRKEEFKALHLGLQGGVSRRMVRAPVGSAPGTSFLGSEPARDNSLFVPTPVQRGALVLIHGEVVHKSKQNLSDRSRQAYTFHLMEASGTTWSPENWLQPTAELPFPQLYT

SEQ ID NO: 1029252 - protein, 265 aa, Homo sapiens
QPPYLHLAELTASQFLEIWKHFDADGNGYIEGKELENFFQELEKARKGSGMMSKSDNFGEKMKEFMQKYDKNSDGKIEMAELAQILPTEENFLLCFRQHVGSSAEFMEAWRKYDTDRSGYIEANELKGFLSDLLKKANRPYDEPKLQEYTQTILRMFDLNGDGKLGLSEMSRLLPVQENFLLKFQGMKLTSEEFNAIFTFYDKDRSGYIDEHELDALLKDLYEKNKKEMNIQQLTNYRKSVMSLAEAGKLYRKDLEIVLCSEPPM

SEQ ID NO: 1029253 - protein, 235 aa, Homo sapiens
QPPYLHLAELTASQFLEIWKHFDADGNGYIEGKELENFFQELEKARKGSGMLAQILPTEENFLLCFRQHVGSSAEFMEAWRKYDTDRSGYIEANELKGFLSDLLKKANRPYDEPKLQEYTQTILRMFDLNGDGKLGLSEMSRLLPVQENFLLKFQGMKLTSEEFNAIFTFYDKDRSGYIDEHELDALLKDLYEKNKKEMNIQQLTNYRKSVMSLAEAGKLYRKDLEIVLCSEPPM

SEQ ID NO: 1029254 - protein, 132 aa, Homo sapiens
PRVGTRGSTHASPRVATRRKKRRNNGRAKKGRGHVQPIRCTNCARCVPKDKAIKKFVIRNIVEAAAVRDISEASVFDAYVLPKLYVKLHYCVSCAIHSKVVRNRSREARKDRTPPPRFRPAGAAPRPPPKPM

SEQ ID NO: 1029255 - protein, 115 aa, Homo sapiens [sequence omitted]

SEQ ID NO: 1029256 - protein, 115 aa, Homo sapiens [sequence omitted]

SEQ ID NO: 1029257 - protein, 115 aa, Homo sapiens
MTKKRRNNGRAKKGRGHVQPIRCTNCARCVPKDKAIKKFVIRNIVEAAAVRDISEASVFDAYVLPKLYVKLHYCVSCVIHSKVVRNRSREARKDRTPPPRFRPAGAAPRPPPKPM

SEQ ID NO: 1029258 - protein, 115 aa, Homo sapiens; identical to SEQ ID NO: 1029257

SEQ ID NO: 1029259 - protein, 115 aa, Homo sapiens [sequence omitted]

SEQ ID NO: 1029260 - protein, 115 aa, Homo sapiens; identical to SEQ ID NO: 1029257

SEQ ID NO: 1029261 - protein, 115 aa, Homo sapiens; identical to SEQ ID NO: 1029257

SEQ ID NO: 1029262 - protein, 132 aa, Homo sapiens; identical to SEQ ID NO: 1029254

SEQ ID NO: 1029263 - protein, 107 aa, Homo sapiens
MTKKRRNNGRAKKGRGHVQPIRCTNCARCVPKDKAIKKFVIRNIVEAAAVRDISEASVFDAYVLPKLYVKLHYCVSCAIHSKVVRNRSREARKDRTPPPATTRLWQV

SEQ ID NO: 1029264 - protein, 115 aa, Homo sapiens [sequence omitted]

SEQ ID NO: 1029265 - protein, 124 aa, Homo sapiens
  misc_feature (2)..(2): Xaa can be any naturally occurring amino acid
EXRTRVPPKMTKKRRNNGRAKKGRGHVQPIRCTNCARCVPKDKAIKKFVIRNIVEAAAVRDISEASVFDAYVLPKLYVKLHYCVSCAIHSKVVRNRSREARKDRTPPPRFRPAGAAPRPPPKPM

SEQ ID NO: 1029266 - protein, 115 aa, Homo sapiens
MPKKRRNNGRAKKGRGHVQPIRCTNCARCVPKDKAIKKFVIRNIVEAAAVRDISEASVFDAYVLPKLYVKLHYCVSCAIHSKVVRNRSREARKDRTPPPRFRPAGAAPRPPPKPM

SEQ ID NO: 1029267 - protein, 115 aa, Homo sapiens [sequence omitted]

SEQ ID NO: 1029268 - protein, 132 aa, Homo sapiens
MTKKRRNNGRAKKGRGHVRDHVHDMCWNNCDLNGVPGDKAQWIQDTVLLPIEQVSGGQYLSGNIRDRRDISEASVFDAYVLPKLYVKLHYCVSCAIHSKVVRNRSREARKDRTPPPRFRPAGAAPRPPPKPM

SEQ ID NO: 1029269 - protein, 115 aa, Homo sapiens; identical to SEQ ID NO: 1029257

SEQ ID NO: 1029270 - protein, 115 aa, Homo sapiens; identical to SEQ ID NO: 1029257

SEQ ID NO: 1029271 - protein, 115 aa, Homo sapiens [sequence omitted]

SEQ ID NO: 1029272 - protein, 569 aa, Homo sapiens
MAAAAPVAADDDERRRRPGAALEDSRSQEGANGEAESGELSRLRAELAGALAEMETMKAVAEVSESTKAEAVAAVQRQCQEEVASLQAILKDSISSYEAQITALKQERQQQQQDCEEKERELGRLKQLLSRAYPLDSLEKQMEKAHEDSEKLREIVLPMEKEIEELKAKLLRAEELIQEIQRRPRHAPSLHGSTELLPLSRDPSPPLEPLEELSGDGGPAAEAFAHNCDDSASISSFSLGGGVGSSSSLPQSRQGLSPEQEETASLVSTGTLVPEGIYLPPPGYQLVPDTQWEQLQTEGRQLQKDLESVSRERDELQEGLRRSNEDCAKQMQVLLAQVQNSEQLLRTLQGTVSQAQERVQLQMAELVTTHKCLHHEVKRLNEENQGLRAEQLPSSAPQGSQQEQGEEESLPSSVPELQQLLCCTRQEARARLQAQEHGAERLRIEIVTLREALEEETVARASLEGQLRVQREETEVLEASLCSLRTEMERVQQEQSKAQLPDLLSEQRAKVLRLQAELETSEQVQRDFVRLSQALQVRLERIRQAETLEQVRSIMDEAPLTDVRDIKDT

SEQ ID NO: 1029273 - protein, 149 aa, Homo sapiens
TPRSPDSRANVCIEENMSLEELSEEDLKNKGEGEERGGRESHPLLRASPPRLYNGMLGTRTGGSSDCEPRIRPIPASHPQPAPRDPPTLTKEMHAARRRIRTRRSSNCSITSSHRVFPSSAGSSTQEKEEKDRFIWGSASCPPHPRLCG

SEQ ID NO: 1029274 - protein, 572 aa, Homo sapiens
  misc_feature (33)..(33): Xaa can be any naturally occurring amino acid
  misc_feature (72)..(72): Xaa can be any naturally occurring amino acid
MSSMSRVRVVCRVVVCARVVLVCHVYTCVISHXYSVVCVSMYVVYVRMYVIRIVSPYVSVCVSVSCVSRRVXCVSHMYVYVLCVSSVRVQAILKDSISSYEAQITALKQERQQQQQDCEEKERELGRLKQLLSRAYPLDSLEKQMEKAHEDSEKLREIVLPMEKEIEELKAKLLRAEELIQEIQRRPRHAPSLHGSTELLPLSRDPSPPLEPLEELSGDGGPAAEAFAHNCDDSASISSFSLGGGVGSSSSLPQSRQGLSPEQEETASLVSTGTLVPEGIYLPPPGYQLVPDTQWEQLQTEGRQLQKDLESVSRERDELQEGLRRSNEDCAKQMQVLLAQVQNSEQLLRTLQGTVSQAQERVQLQMAELVTTHKCLHHEVKRLNEENQGLRAEQLPSSAPQGSQQEQGEEESLPSSVPELQQLLCCTRQEARARLQAQEHGAERLRIEIVTLREALEEETVARASLEGQLRVQREETEVLEASLCSLRTEMERVQQEQSKAQLPDLLSEQRAKVLRLQAELETSEQVQRDFVRLSQALQVRLERIRQAETLEQVRSIMDEAPLTDVRDIKDT

SEQ ID NO: 1029275 - protein, 505 aa, Homo sapiens
MPIRRQMAMAVPLLSPVIMITRIPASRHSWMEPVTSLRGGSSMPTTPTNVRSVSYSRNLAESSRTISSRFGGVSRVARAKQRRVSRPVPHSLITAMIFSFTGPVSGTLGGANSHIVTAVDDALRGTLDKHLVAHSSPGRFGWGAKTDMDFLSRENSRVNSFFISWRITELQALALSTFERLLTSVLNTFIFSTRVVKCCLGGLADLLIDTFGLVEVQGGVIAEGTDGGQLHQPVILPWPDWLIILQDLSLWSVSGAGDGELIQEADVPIHLVNDKHLADRHLVGGEGACLVGTDDRGAAQGLYGGQASYNGILLCHPTGTQGQAGGDDCRKTFGDGSHSQGHGNLKVVDGPAEPGAPMDGVVEVANVDKPDSHTDEGDDLGELLPKLIQLLLQGGLVLFCGSHLVSDLPNLGAHTSGGHDAQGLAGCNVGAREKHVLLVLVDSSGVRNGLRVFDDRYRLACQDGLVNPQRGGFDGEDSDVCRDFVPHSHLHDVPRDDVPSLDPLH

SEQ ID NO: 1029276 - protein, 505 aa, Homo sapiens; identical to SEQ ID NO: 1029275

SEQ ID NO: 1029277 - protein, 160 aa, Homo sapiens [sequence omitted]

SEQ ID NO: 1029278 - protein, 105 aa, Homo sapiens
SAEETEVLEGECVLEVSWGSPTLAGQVGKGRGHGPDVSPCPDFPASLCSLRTEMERVQQEQSKAQLPDLLSEQRAKVLRLQAELETSEQVQRDFVRRQAAAFWSA

SEQ ID NO: 1029279 - protein, 503 aa, Homo sapiens
MAAAAPVAADDDERRRRPGAQAILKDSISSYEAQITALKQERQQQQQDCEEKERELGRLKQLLSRAYPLDSLEKQMEKAHEDSEKLREIVLPMEKEIEELKAKLLRAEELIQEIQRRPRHAPSLHGSTELLPLSRDPSPPLEPLEELSGDGGPAAEAFAHNCDDSASISSFSLGGGVGSSSSLPQSRQGLSPEQEETASLVSTGTLVPEGIYLPPPGYQLVPDTQWEQLQTEGRQLQKDLESVSRERDELQEGLRRSNEDCAKQMQVLLAQVQNSEQLLRTLQGTVSQAQERVQLQMAELVTTHKCLHHEVKRLNEENQGLRAEQLPSSAPQGSQQEQGEEESLPSSVPELQQLLCCTRQEARARLQAQEHGAERLRIEIVTLREALEEETVARASLEGQLRVQREETEVLEASLCSLRTEMERVQQEQSKAQLPDLLSEQRAKVLRLQAELETSEQVQRDFVRLSQALQVRLERIRQAETLEQVRSIMDEAPLTDVRDIKDT

SEQ ID NO: 1029280 - protein, 504 aa, Homo sapiens
LESSEQKRAVLRARSAREVLAQAILKDSISSYEAQITALKQERQQQQQDCEEKERELGRLKQLLSRAYPLDSLEKQMEKAHEDSEKLREIVLPMEKEIEELKAKLLRAEELIQEIQRRPRHAPSLHGSTELLPLSRDPSPPLEPLEELSGDGGPAAEAFAHNCDDSASISSFSLGGGVGSSSSLPQSRQGLSPEQEETASLVSTGTLVPEGIYLPPPGYQLVPDTQWEQLQTEGRQLQKDLESVSRERDELQEGLRRSNEDCAKQMQVLLAQVQNSEQLLRTLQGTVSQAQERVQLQMAELVTTHKCLHHEVKRLNEENQGLRAEQLPSSAPQGSQQEQGEEESLPSSVPELQQLLCCTRQEARARLQAQEHGAERLRIEIVTLREALEEETVARASLEGQLRVQREETEVLEASLCSLRTEMERVQQEQSKAQLPDLLSEQRAKVLRLQAELETSEQVQRDFVRLSQALQVRLERIRQAETLEQVRSIMDEAPLTDVRDIKDT

SEQ ID NO: 1029281 - protein, 569 aa, Homo sapiens; identical to SEQ ID NO: 1029272

SEQ ID NO: 1029282 - protein, 569 aa, Homo sapiens; identical to SEQ ID NO: 1029272

SEQ ID NO: 1029283 - protein, 342 aa, Homo sapiens
MAAAAPVAADDDERRRRPGAALEDSRSQEGANGEAESGELSRLRAELAGALAEMETMKAVAEVSESTKAEAVAAVQRQCQEEVASLQAILKDSISSYEAQITALKQERQQQQQDCEEKERELGRLKQLLSRAYPLDSLEKQMEKAHEDSEKLREIVLPMEKEIEELKAKLLRAEELIQEIQRRPRHAPSLHGSTELLPLSRDPSPPLEPLEELSGDGGPAAEAFAHNCDDSASISSFSLGGGVGSSSSLPQSRQGLSPEQEETASLVSTGTLVPEGIYLPPPGYQLVPDTQWEQLQTEGRQLQKDLESVSRERDELQEGLRRSNEDCAKQMQVLLAQVQNIR

SEQ ID NO: 1029284 - protein, 569 aa, Homo sapiens; identical to SEQ ID NO: 1029272

SEQ ID NO: 1029285 - protein, 379 aa, Homo sapiens
GRSVSAGDGEKGAHSGIVSTLEVEFTGLAGGHVESRTSRFLACPLQRDLRALGGGKGGQQEAVTGLSPEQEETASLVSTGTLVPEGIYLPPPGYQLVPDTQWEQLQTEGRQLQKDLESVSRERDELQEGLRRSNEDCAKQMQVLLAQVQNSEQLLRTLQGTVSQAQERVQLQMAELVTTHKCLHHEVKRLNEENQGLRAEQLPSSAPQGSQQEQGEEESLPSSVPELQQLLCCTRQEARARLQAQEHGAERLRIEIVTLREALEEETVARASLEGQLRVQREETEVLEASLCSLRTEMERVQQEQSKAQLPDLLSEQRAKVLRLQAELETSEQVQRDFVRLSQALQVRLERIRQAETLEQVRSIMDEAPLTDVRDIKDT

SEQ ID NO: 1029286 - protein, 569 aa, Homo sapiens; identical to SEQ ID NO: 1029272

SEQ ID NO: 1029287 - protein, 505 aa, Homo sapiens
MPIRRQMAMAVPLLSPVIMITRIPASRHSWMEPVTSLRGGSSMPTTPTNVRSVSYSRNLAESSRTISSRFGGVSRVARAKQRRVSRPVPHSLITAMIFSFTGPVSGTLGGANSHIVTAVDDALRGTLDKHLVAHSSPGRFGWGAIDNMDFLSRENSRVNSFFISWRITELQALALSTFERLLTSVLNTFIFSTRVVKCCLGGLADLLIDTFGLVEVQGGVIAEGTDGGQLHQPVILPWPDWLIILQDLSLWSVSGAGDGELIQEADVPIHLVNDKHLADRHLVGGEGACLVGTDDRGAAQGLYGGQASYNGILLCHPTGTQGQAGGDDCRKTFGDGSHSQGHGNLKVVDGPAEPGAPMDGVVEVANVDKPDSHTDEGDDLGELLPKLIQLLLQGGLVLFCGSHLVSDLPNLGAHTSGGHDAQGLAGCNVGAREKHVLLVLVDSSGVRNGLRVFDDRYRLACQDGLVNPQRGGFDGEDSDVCRDFVPHSHLHDVPRDDVPSLDPLH

SEQ ID NO: 1029288 - protein, 159 aa, Homo sapiens
MELPAVNLKVILLGHWLLTTWGCIVFSGSYAWANFTILALGVWAVAQRDSIDAISMFLGGLLATIFLDIVHISIFYPRVSLTDTGRFGVGMAILSLLLKPLSCCFVYHMYRERGGELLVHTGFLGSSQDRSAYQTIDSAEAPADPFAVPEGRSQDARGY

SEQ ID NO: 1029289 - protein, 104 aa, Homo sapiens [sequence omitted]

SEQ ID NO: 1029290 - protein, 184 aa, Homo sapiens
MELPAVNLKVILLGHWLLTTCFWRHFSAKPRLETIELTCALCKLRSAAHRAQLGCIVFSGSYAWANFTILALGVWAVAQRDSIDAISMFLGGLLATIFLDIVHISIFYPRVSLTDTGRFGVGMAILSLLLKPLSCCFVYHMYRERGGFLGSSQDRSAYQTIDSAEAPADPFAVPEGRSQDARGY

SEQ ID NO: 1029291 - protein, 134 aa, Homo sapiens
MELGCIVFSGSYAWANFTILALGVWAVAQRDSIDAISMFLGGLLATIFLDIVHISIFYPRVSLTDTGRFGVGMAILSLLLKPLSCCFVYHMYRERGGFLGSSQDRSAYQTIDSAEAPADPFAVPEGRSQDARGY

SEQ ID NO: 1029292 - protein, 149 aa, Homo sapiens
MELPAVNLKVILLGHWLLTTWGCIVFSGSYAWANFTILALGVWAVAQRDSIDAISMFLGGLLATIFLDIVHISIFYPRVSLTDTGRFGVGMAILSLLLKPLSCCFVYHMYRERGVLRSLSRSATDDDSQSAQILAVQRQINHEVLTTAE

SEQ ID NO: 1029293 - protein, 152 aa, Homo sapiens
MELPAVNLKVILLGHWLLTTWGCIVFSGSYAWANFTILALGVWAVAQRDSIDAISMFLGGLLATIFLDIVHISIFYPRVSLTDTGRFGVGMAILSLLLKPLSCCFVYHMYRERGGFLGSSQDRSAYQTIDSAEAPADPFAVPEGRSQDARGY

SEQ ID NO: 1029294 - protein, 159 aa, Homo sapiens; identical to SEQ ID NO: 1029288

SEQ ID NO: 1029295 - protein, 104 aa, Homo sapiens [sequence omitted]

SEQ ID NO: 1029296 - protein, 152 aa, Homo sapiens; identical to SEQ ID NO: 1029293

SEQ ID NO: 1029297 - protein, 82 aa, Homo sapiens
VAATGGAGPGKFVPRVRSLGAPRGCGAGALGLSRDGAACCEPEGDSPRSLAADNLAEGLHTLQELGGRRGSAHQSSPGPSPQ

SEQ ID NO: 1029298 - protein, 171 aa, Homo sapiens
  misc_feature (5)..(5): Xaa can be any naturally occurring amino acid
  misc_feature (10)..(10): Xaa can be any naturally occurring amino acid
HSWEXGGNTXVIYLGCGKSLWGRTSHLRAYLRWPFLENRPFVCNWMYCGKRFTRSDELQRHRRTHTGEKKFVCPECSKRFMRSDHLAKHIKTHQNKKGIHSSSTVLASVEAARDDTLITAGGTTLILANIQQGSVSGIGTVNTSATSNQDILTNTEIPLQLVTVSGNETME

SEQ ID NO: 1029299 - protein, 171 aa, Homo sapiens; identical to SEQ ID NO: 1029298
  misc_feature (5)..(5): Xaa can be any naturally occurring amino acid
  misc_feature (10)..(10): Xaa can be any naturally occurring amino acid

SEQ ID NO: 1029300 - protein, 181 aa, Homo sapiens
MRQFINPAWFVLMLLVGSCHLSGDSVQISLSLMRGQYRRPHICVSCDATISLQHAFQESLERSRDVGHTLVELSAEVRLGTMTAVSTDVPHRSGYMEPTPAPPTGGYTGAAHVERSSLMYETSLYIVEEASSLRCCGQLDGYPPIRRTFSFPDYFEEGCQSSDELLLVQVFTVTPGIVRLD

SEQ ID NO: 1029301 - protein, 37 aa, Homo sapiens
MVCSNASCWQLPPVRRFCPDLFVPSVVFSQPYSSSSA

SEQ ID NO: 1029302 - protein, 89 aa, Homo sapiens
VKYRLEASLVGFVLFRTFHGNSSETFGPSWRLHCQREGHSAAAQVTQPELTAHSHPFRFLTFLKIANDRMCGRVSHKGPLGPCLADPDG

SEQ ID NO: 1029303 - protein, 398 aa, Homo sapiens
MSEGNAAGEPSTPGGPRPLLTGARGLIGRRPAPPLTPGRLPSIRSRDLTLGGVKKKTFTPNIISRKIKEEPKEEVTVKKEKRERDRDRQREGHGRGRGRPEVIQSHSIFEQGPAEMMKKKGNWDKTVDVSDMGPSHIINIKKEKRETDEETKQILRMLEKDDFLDDPGLRNDTRNMPVQLPLAHSGWLFKEENDEPDVKPWLAGPKEEDMEVDIPAVKVKEEPRDEEEEAKMKAPPKAARKTPGLPKDVSVAELLRELSLTKEEELLFLQLPDTLPGQPPTQDIKPIKTEVQGEDGQVVLIKQEKDREAKLAENACTLADLTEGQVGKLLIRKSGRVQLLLGKVTLDVTMGTACSFLQELVSVGLGDSRTGEMTVLGHVKHKLVCSPDFESLLDHKHR

SEQ ID NO: 1029304 - protein, 398 aa, Homo sapiens; identical to SEQ ID NO: 1029303

SEQ ID NO: 1029305 - protein, 398 aa, Homo sapiens; identical to SEQ ID NO: 1029303

SEQ ID NO: 1029306 - protein, 167 aa, Homo sapiens
GSPFNPTITKTPGLPKDVSVAELLRELSLTKEEELLFLQLPDTLPGQPPTQDIKPIKTEVQGEDGQVVLIKQEKDREAKLAENACTLADLTEGQVGKLLIRKSGRVQLLLGKVTLDVTMGTACSFLQELVSVGLGDSRTGEMTVLGHVKHKLVCSPDFESLLDHKHR

SEQ ID NO: 1029307 - protein, 127 aa, Homo sapiens
RLVALQVRLRLAVLSRGPGNMSEGNAAGEPSTPGGPRPLLTGARGLIGRRPAPPLTPGRLPSIRSRDLTLGGVKKKTFTPNIISRKIKEEPKEEVTVKKEKRGDGTSLLLGTWPCYLFLYLCLNLFH

SEQ ID NO: 1029308 - protein, 127 aa, Homo sapiens; identical to SEQ ID NO: 1029307

SEQ ID NO: 1029309 - protein, 398 aa, Homo sapiens; identical to SEQ ID NO: 1029303

SEQ ID NO: 1029310 - protein, 399 aa, Homo sapiens
MSEGNAAGEPSTPGGPRPLLTGARGLIGRRPAPPLTPGRLPSIRSRDLTLGGVKKKTFTPNIISRKIKEEPKEEVTVKKEKRERDRDRQREGHGRGRGRPEVIQSHSIFEQGPAEMMKKKGNWDKTVDVSDMGPSHIINIKKEKRETDEETKQILRMLEKDDFLDDPGLRNDTRNMPVQLPLAHSGWLFKEENDEPDVKPWLAGPKEEDMEVDIPAVKVKEEPRDEEEEAKMKAPPKAARKTPGLPKDVSVAELLRELSLTKEEELLFLQLPDTLPGQPPTQDIKPIKTEVQGEDGQVVLIKQEKDREAKLAENACTLADLTEGQVGKLLIRKSGRVQLLLGKVTLDVTMGTACSFLQELVSVGLGDSRTGEMTVLGHVKHKLVCSPDFESLLDHKHRC

SEQ ID NO: 1029311 - protein, 398 aa, Homo sapiens; identical to SEQ ID NO: 1029303

SEQ ID NO: 1029312 - protein, 398 aa, Homo sapiens; identical to SEQ ID NO: 1029303

SEQ ID NO: 1029313 - protein, 398 aa, Homo sapiens; identical to SEQ ID NO: 1029303

SEQ ID NO: 1029314 - protein, 399 aa, Homo sapiens; identical to SEQ ID NO: 1029310

SEQ ID NO: 1029315 - protein, 477 aa, Homo sapiens [sequence omitted]

SEQ ID NO: 1029316 - protein, 252 aa, Homo sapiens
MLMAWCRGPVLLCLRQGLGTNSFLHGLGQEPFEGARSLCCRSSPRDLRDGEREHEAAQRKAPGAESCPSLPLSISDIGTGCLSSLENLRLPTLREESSPRELEDSSGDQGRCGPTHQGSEDPSMLSQAQSATEVEERHVSPSCSTSRERPFQAGELILAETGEGETKFKKLFRLNNFGLLNSNWGAVPFGKIVGKFPGQILRSSFGKQYMLRRPALEDYVVLMKRGTAITFPKGSFGYVKSSCYFACFLPTS

SEQ ID NO: 1029317 - protein, 367 aa, Homo sapiens
MLMAWCRGPVLLCLRQGLGTNSFLHGLGQEPFEGARSLCCRSSPRDLRDGEREHEAAQRKAPGAESCPSLPLSISDIGTGCLSSLENLRLPTLREESSPRELEDSSGDQGRCGPTHQGSEDPSMLSQAQSATEVEERHVSPSCSTSRERPFQAGELILAETGEGETKFKKLFRLNNFGLLNSNWGAVPFGKIVGKFPGQILRSSFGKQYMLRRPALEDYVVLMKRGTAITFPKDINMILSMMDINPGDTVLEAGSGSGGMSLFLSKAVGSQGRVISFEVRKDHHDLAKKNYKHWRDSWKLSHVEEWPDNVDFIHKDISGATEDIKSLTFDAVALDMLNPHVTLPVFYPHLKHGGVCAVYVVKWNSHL

SEQ ID NO: 1029318 - protein, 252 aa, Homo sapiens; identical to SEQ ID NO: 1029316

SEQ ID NO: 1029319 - protein, 393 aa, Homo sapiens
MLMAWCRGPVLLCLRQGLGTNSFLHGLGQEPFEGARSLCCRSSPRDLRDGEREHEAAQRKAPGAESCPSLPLSISDIGTGCLSSLENLRLPTLREESSPRELEDSSGDQGRCGPTHQGSEDPSMLSQAQSATEVEERHVSPSCSTSRERPFQAGELILAETGEGETKFKKLFRLNNFGLLNSNWGAVPFGKIVGKFPGQILRSSFGKQYMLRRPALEDYVVLMKRGTAITFPKDINMILSMMDINPGDTVLEAGSGSGGMSLFLSKAVGSQGRVISFEVRKDHHDLAKKNYKHWRDSWKLSHVEEWPDNVDFIHKDISGATEDIKSLTFDAVALDMLNPHVTLPVFYPHLKHGGVCAVYVVKKNRILIFHMDHFPMLLDQYTGNLVIQLFLSS

SEQ ID NO: 1029320 - protein, 477 aa, Homo sapiens [sequence omitted]

SEQ ID NO: 1029321 - protein, 477 aa, Homo sapiens [sequence omitted]

SEQ ID NO: 1029322 - protein, 477 aa, Homo sapiens [sequence omitted]

SEQ ID NO: 1029323 - protein, 255 aa, Homo sapiens
MLMAWCRGPVLLCLRQGLGTNSFLHGLGQEPFEGARSLCCRSSPRDLRDGEREHEAAQRKAPGAESCPSLPLSISDIGTGCLSSLENLRLPTLREESSPRELEDSSGDQGRCGPTHQGSEDPSMLSQAQSATEVEERHVSPSCSTSRERPFQAGELILAETGEGETKFKKLFRLNNFGLLNSNWGAVPFGKIVGKFPGQILRSSFGKQYMLRRPALEDYVVLMKRGTAITFPKVMDGDKVCIGFRRGKDRCSTQS

SEQ ID NO: 1029324 - protein, 433 aa, Homo sapiens
MLMAWCRGPVLLCLRQGLGTNSFLHGLGQEPFEGARSLCCRSSPRDLRDGEREHEAAQRKAPGAESCPSLPLSISDIGTGCLSSLENLRLPTLREESSPRELEDSSGDQGRCGPTHQGSEDPSMLSQAQSATEVEERHVSPSCSTSRERPFQAGELILAETGEGETKFKKLFRLNNFGLLNSNWGAVPFGKIVGKFPGQILRSSFGKQYMLRRPALEDYVVLMKRGTAITFPKDINMILSMMDINPGDTVLEAGSGSGGMSLFLSKAVGSQGRVISFEVRKDHHDLAKKNYKHWRDSWKLSHVEEWPDNVDFIHKDISGATEDIKSLTFDAVALDMLNPHVTLPVFYPHLKHGGVCAVYVVNITQVIELLDGIRTCELALSCEKISEVIVRDWLVCLAKQKNGILAQKVESKINTDVQLDSQEKIGVKGRIAF

SEQ ID NO: 1029325 - protein, 477 aa, Homo sapiens [sequence omitted]

SEQ ID NO: 1029326 - protein, 477 aa, Homo sapiens [sequence omitted]

SEQ ID NO: 1029327 - protein, 477 aa, Homo sapiens [sequence omitted]

SEQ ID NO: 1029328 - protein, 465 aa, Homo sapiens
MLMAWCRGPVLLCLRQGLGTNSFLHGLGQEPFEGARSLCCRSSPRDLRDGEREHEAAQRKAPGAESCPSLPLSISDIGTGCLSSLENLRLPTLREESSPRELEDSSGDQGRCGPTHQGSEDPSMLSQAQSATEVEERHVSPSCSTSRERPFQAGELILAETGEGETKFKKLFRLNNFGLLNSNWGAVPFGKIVGKFPGQILRSSFGKQYMLRRPALEDYVVLMKRGTAITFPKDINMILSMMDINPGDTVLEAGSGSGGMSLFLSKAVGSQGRVISFEVRKDHHDLAKKNYKHWRDSWKLSHVEEWPDNVDFIHKDISGATEDIKSLTFDAVALDMLNPHVTLPVFYPHLKHGGVCAVYVVNITQVIELLDGIRTCELALSCEKISEVIVRDWLVCLAKQKNGILAQKVESKINTDVQLDSQEKIGVKGELFQEDDHEESHSDFPYGSFPYVARPVHWQPGHTGE

SEQ ID NO: 1029329 - protein, 149 aa, Homo sapiens
MLSRLQELRKEEETLLRLKAALHDQLNRLKVTPRPSPAPPPFLPSDHFPPTWASVVTTCCGQLLRYSLAVVAPIYRFTNKQVEELALQSMISSRRGDEMLSSHTVPEQSHDMLVHVDNEASINQTTLELSTKSHVTEEEEEEEEEESDS

SEQ ID NO: 1029330 - protein, 68 aa, Homo sapiens
MLSRLQELRKEEETLLRLKAALHDQLNRLKMLVHVDNEASINQTTLELSTKSHVTEEEEEEEEEESDS

SEQ ID NO: 1029331 - protein, 107 aa, Homo sapiens
MLSRLQELRKEEETLLRLKAALHDQLNRLKVEELALQSMISSRRGDEMLSSHTVPEQSHDVSLIKCRPRRECKVCSAPMLLGWWKNCCKSHYLAQRALRSADNSFLV

SEQ ID NO: 1029332 - protein, 103 aa, Homo sapiens
MLSRLQELRKEEETLLRLKAALHDQLNRLKVEELALQSMISSRRGDEMLSSHTVPEQSHDMLVHVDNEASINQTTLELSTKSHVTEEEEGDWILKNVLKDSTS

SEQ ID NO: 1029333 - protein, 107 aa, Homo sapiens; identical to SEQ ID NO: 1029331

SEQ ID NO: 1029334 - protein, 139 aa, Homo sapiens
  misc_feature (120)..(120): Xaa can be any naturally occurring amino acid
  misc_feature (131)..(131): Xaa can be any naturally occurring amino acid
MLSRLQELRKEEETLLRLKAALHDQLNRLKVEELALQSMISSRRGDEMLSSHTVPEQSHDMLVHVDNEASINQTTLELSTKSHVTEEEEEAEKMNHIPKVGGIAGFSVIRIAFLSLTLLXKPIILLCAPAXSLNVMHEL

SEQ ID NO: 1029335 - protein, 133 aa, Homo sapiens
EDPLFIVWTECRADSSPEVGYVTRQHAEPASGTAQGGGDAAAVEGSPARPAEPPQGDPAALSCPSSIPPERPFPPNLGLCGDHLLRPASPLLTSCGGANLEVYKQTGSESPGEFAVRFLGPIFQNRDLSKSRV

SEQ ID NO: 1029336 - protein, 68 aa, Homo sapiens; identical to SEQ ID NO: 1029330

SEQ ID NO: 1029337 - protein, 318 aa, Homo sapiens
PPTPRGKRHLANMMGEDSETFTQEDIDRATGYLFPSGLFEKRARPVMKHPEQIFPRQRAIQWGEDGRPFHYLFYTGKQSYYSLMHDVYGMLLNLEKHQSHLQAKSLLPEKTVTRDVIGSRWLIKEELEEMLVEKLSDLDYMQFIRLLEKLLTSQCGAAEEEFVQRFRRSVTLESKKQLIEPVQYDEQGMAFSKSEGKRKTAKAEAIVYKHGSGRIKVNGIDYQLYFPITQDREQLMFPFHFVDRLGKHDVTCTVSGGGRSAQAGAIRLAMAKALCSFVTEDEVEWMRQAGLLTTDPRVRERKKPGQEGARRKFTWKKR

SEQ ID NO: 1029338 - protein, 181 aa, Homo sapiens
PPTPRGKRHLANMMGEDSETFTQEDIDRATGYLFPSGLFEKRARPVMKHPEQIFPRQRAIQWGEDGRPFHYLFYTGKQSYYSFDYQLYFPITQDREQLMFPFHFVDRLGKHDVTCTVSGGGRSAQAGAIRLAMAKALCSFVTEDEVEWMRQAGLLTTDPRVRERKKPGQEGARRKFTWKKR

SEQ ID NO: 1029339 - protein, 235 aa, Homo sapiens [sequence omitted]

SEQ ID NO: 1029340 - protein, 235 aa, Homo sapiens
MHLHAGLKSSVKDAEVSSCQYSSGKATLERSSTQTIDKSQQMQVHLHLLMNFYCLQYMQFIRLLEKLLTSQCGAAEEEFVQRFRRSVTLESKKQLIEPVQYDEQGMAFSKSEGKRKTAKAEAIVYKHGSGRIKVNGIDYQLYFPITQDREQLMFPFHFVDRLGKHDVTCTVSGGGRSAQAGAIRLAMAKALCSFVTEDEVEWMRQAGLLTTDPRVRERKKPGQEGARRKFTWKKR

SEQ ID NO: 1029341 - protein, 299 aa, Homo sapiens
MMGEDSETFTQEDIDRATGYLFPSGLFEKRARPVMKHPEQIFPRQRAIQWGEDGRPFHYLFYTGKQSYYSLMHDVYGMLLNLEKHQSHLQAKSLLPEKTVTRDVIGSRWLIKEELEEMLVEKLSDLDYMQFIRLLEKLLTSQCGAAEEEFVQRFRRSVTLESKKQLIEPVQYDEQGMAFSKSEGKRKTAKAEAIVYKHGSGRIKVNGIDYQLYFPITQDREQLMFPFHFVDRLGKHDVTCTVSGGGRSAQAGAIRLAMAKALCSFVTEDEVEWMRQGMSLGGTGMVAQYWLYMFICFLS

SEQ ID NO: 1029342 - protein, 647 aa, Homo sapiens [sequence omitted]

SEQ ID NO: 1029343 - protein, 187 aa, Homo sapiens
AFEWPRPRVPTLKAHPQASAAGSSGPWKPHPSPALLAGIPSSLETREALVQYVTMVIFTCSAKHAAVSAGQFDSCAWMPNLPPSMQLPPPTSKGLATCEGFIATLPPVNATCDVILALWLLSKEPGDQRPLGTYPDEHFTEEAPRRSIATFQSRLAQISRGIQERNRGLVLPYTYLDPPLIENSVSI

SEQ ID NO: 1029344 - protein, 571 aa, Homo sapiens
MAEFRVRVSTGEAFGAGTWDKVSVSIVGTRGESPPLPLDNLGKEFTAGAEEDFQVTLPEDVGRVLLLRVHKAPPVLPLLGPLAPDAWFCRWFQLTPPRGGHLLFPCYQWLEGAGTLVLQEGTAKVSWADHHPVLQQQRQEELQARQEMYQWKAYNPGWPHCLDEKTVEDLELNIKYSTAKNANFYLQAGSAFAEMKIKGLLDRKGLWRSLNEMKRIFNFRRTPAAEHAFEHWQEDAFFASQFLNGLNPVLIRRCHYLPKNFPVTDAMVASVLGPGTSLQAELEKGSLFLVDHGILSGIQTNVINGKPQFSAAPMTLLYQSPGCGPLLPLAIQLSQTPGPNSPIFLPTDDKWDWLLAKTWVRNAEFSFHEALTHLLHSHLLPEVFTLATLRQLPHCHPLFKLLIPHTRYTLHINTLARELLIVPGQVVDRSTGIGIEGFSELIQRNMKQLNYSLLCLPEDIRTRGVEDIPGYYYRDDGMQIWGAVERFVSEIIGIYYDVILALWLLSKEPGDQRPLGTYPDEHFTEEAPRRSIATFQSRLAQISRGIQERNRGLVLPYTYLDPPLIENSVSI

SEQ ID NO: 1029345 - protein, 132 aa, Homo sapiens
  misc_feature (45)..(46): Xaa can be any naturally occurring amino acid
  misc_feature (58)..(58): Xaa can be any naturally occurring amino acid
  misc_feature (61)..(61): Xaa can be any naturally occurring amino acid
  misc_feature (70)..(70): Xaa can be any naturally occurring amino acid
  misc_feature (73)..(73): Xaa can be any naturally occurring amino acid
  misc_feature (75)..(75): Xaa can be any naturally occurring amino acid
  misc_feature (81)..(82): Xaa can be any naturally occurring amino acid
  misc_feature (91)..(92): Xaa can be any naturally occurring amino acid
  misc_feature (97)..(97): Xaa can be any naturally occurring amino acid
  misc_feature (100)..(100): Xaa can be any naturally occurring amino acid
  misc_feature (104)..(104): Xaa can be any naturally occurring amino acid
  misc_feature (127)..(127): Xaa can be any naturally occurring amino acid
MAEFRVRVSTGEAFGAGTWDKVSVSIVGTRGESPPLPLDNLGKEXXPAGLPDGGHIQXDRXAGGLIAPEXALXCXAAAATXXAAPPKLLCXXCCGGXPLXPRGXPMGYLALLCDFPSLDYSAQQGSXRKHTP

SEQ ID NO: 1029346 - protein, 676 aa, Homo sapiens
MAEFRVRVSTGEAFGAGTWDKVSVSIVGTRGESPPLPLDNLGKEFTAGAEEDFQVTLPEDVGRVLLLRVHKAPPVLPLLGPLAPDAWFCRWFQLTPPRGGHLLFPCYQWLEGAGTLVLQEGTAKVSWADHHPVLQQQRQEELQARQEMYQWKAYNPGWPHCLDEKTVEDLELNIKYSTAKNANFYLQAGSAFAEMKIKGLLDRKGLWRSLNEMKRIFNFRRTPAAEHAFEHWQEDAFFASQFLNGLNPVLIRRCHYLPKNFPVTDAMVASLLGPGTSLQAELEKGSLFLVDHGILSGIQTNVINGKPQFSAAPMTLLYQSPGCGPLLPLAIQLSQTPGPNSPIFLPTDDKWDWLLAKTWVRNAEFSFHEALTHLLHSHLLPEVFTLATLRQLPHCHPLFKLLIPHTRYTLHINTLARELLIVPGQVVDRSTGIGIEGFSELIQRNMKQLNYSLLCLPEDIRTRGVEDIPGYYYRDDGMQIWGAVERFVSEIIGIYYPSDESVQDDRELQAWVREIFSKGFLNQESSGIPSSLETREALVQYVTMVIFTCSAKHAAVSAGQFDSCAWMPNLPPSMQLPPPTSKGLATCEGFIATLPPVNATCDVILALWLLSKEPGDQRPLGTYPDEHFTEEAPRRSIATFQSRLAQISRGIQERNRGLVLPYTYLDPPLIENSVSI

SEQ ID NO: 1029347 - protein, 320 aa, Homo sapiens
MDENMDESDKRKCSRSPKKIKIEPDSEKDEVKGSDAAKGADQNEMDISKITEKKDQDVKELLDSDSDKPCKEEPMEVDDDMKTESHVNCQESSQVDVVNVSEGFHLRTSYKKKTKSSKLDGLLERRIKQFTLEEKQRLEKIKLEGGIKGIGKTSTNSSKNLSESPVITKAKEGCQSDSMRQEQSPNANNDQPEDLIQGCSESDSSVLRMSDPSHTTNKLYPKDRVLDDVSIRSPETKCPKQNSIENDIEEQVSDLASRGQEPSKTYKQQGNDSLIDDSKLTSADDIGTWICKEPEKPSHTGRQVNTIGPSIKSAYTFINA

SEQ ID NO: 1029348 - protein, 332 aa, Homo sapiens
EREEKEKVKKKEKKQEEEETMQQATWVKYTFPVKHQVWKQKGEEYRVTGYGGWSWISKTHVYRFVPKLPGNTNVNYRKSLEGTKNNMDENMDESDKRKCSRSPKKIKIEPDSEKDEVKGSDAAKGADQNEMDISKITEKKDQDVKELLDSDSDKPCKEEPMEVDDDMKTESHVNCQESSQVDVVNVSEGFHLRTSYKKKTKSSKLDGLLERRIKQFTLEEKQRLEKIKLEGGIKGIGKTSTNSSKNLSESPVITKAKEGCQSDSMRQEQSPNANNDQPEDLIQGCSESDSSVLRMSDPSHTTNKLYPKDRVLDDVSIRSPETKCPKQNSIEQ

SEQ ID NO: 1029349 - protein, 182 aa, Homo sapiens
MDVTKKNKRDGTEVTERIVTETVTTRLTSLPPKGGTSNGYAKTASLGGGSRLEKQSLTHGSSGYINSTGSTRGHASTSSYRRAHSPASTLPNSPGSTFERKTHVTRHAYEGSSSGNSSPEYPRKEFASSSTRGRSQTRESEIRVRLQMEQVSDPPVTRVSMPVCSSELCTLLHESACSHRSS

SEQ ID NO: 1029350 - protein, 1497 aa, Homo sapiens
MDVTKKNKRDGTEVTERIVTETVTTRLTSLPPKGGTSNGYAKTASLGGGSRLEKQSLTHGSSGYINSTGSTRGHASTSSYRRAHSPASTLPNSPGSTFERKTHVTRHAYEGSSSGNSSPEYPRKEFASSSTRGRSQTRESEIRVRLQSASPSTRWTELDDVKRLLKGSRSASVSPTRNSSNTLPIPKKGTVETKIVTASSQSVSGTYDATILDANLPSHVWSSTLPAGSSMGTYHNNMTTQSSSLLNTNAYSAGSVFGVPNNMASCSPTLHPGLSTSSSVFGMQNNLAPSLTTLSHGTTTTSTAYGVKKNMPQSPAAVNTGVSTSAACTTSVQSDDLLHKDCKFLILEKDNTPAKKEMELLIMTKDSGKVFTASPASIAATSFSEDTLKKEKQAAYNADSGLKAEANGDLKTVSTKGKTTTADIHSYSSSGGGGSGGGGGVGGAGGGPWGPAPAWCPCGSCCSWWKWLLGLLLTWLLLLGLLFGLIALAEEVRKLKARVDELERIRRSILPYGDSMDRIEKDRLQGMAPAAGADLDKIGLHSDSQEELWMFVRKKLMMEQENGNLRGSPGPKGDMGSPGPKGDRGFPGTPGIPGPLGHPGPQGPKGQKGSVGDPGMEGPMGQRGREGPMGPRGEAGPPGSGEKGERGAAGEPGPHGPPGVPGSVGPKGSSGSPGPQGPPGPVGLQGLRGEVGLPGVKGDKGPVGPPGPKGDQGEKGPRGLTGEPGMRGLPGAVGEPGAKGAMGPAGPDGHQGPRGEQGLTGMPGIRGPPGPSGDPGKPGLTGPQGPQGLPGTPGRPGIKGEPGAPGKIVTSEGSSMLTVPGPPGPPGAMGPPGPPGAPGPAGPAGLPGHQEVLNLQGPPGPPGPRGPPGPSIPGPPGPRGPPGEGLPGPPGPPGSFLSNSETFLFGPPGPPGPPGPKGDQGPPGPRGHQGEQGLPGFSTSGSSSFGLNLQGPPGPPGPQGPKGDKGDPGVPGALGIPSGPSEGGSSSTMYVSGPPGPPGPPGPPGSISSSGQEIQQYISEYMQSDSIRSYLSGVQGPPGPPGPPGPVTTITGETFDYSELASHVVSYLRTSGYGVSLFSSSISSEDILAVLQRDDVRQYLRQYLMGPRGPPGPPGASGDGSLLSLDYAELSSRILSYMSSSGISIGLPGPPGPPGLPGTSYEELLSLLRGSEFRGIVGPPGPPGPPGIPGNVWSSISVEDLSSYLHTAGLSFIPGPPGPPGPPGPRGPPGVSGALATYAAENSDSFRSELISYLTSPDVRSFIVGPPGPPGPQGPPGDSRLLSTDASHSRGSSSSSHSSSVRRGSSYSSSMSTGGGGAGSLGAGGAFGEAAGDRGPYGTDIGPGGGYGAAAEGGMYAGNGGLLGADFAGDLDYNELAVRVSESMQRQGLLQGMAYTVQGPPGQPGPQGPPGISKVFSAYSNVTADLMDFFQTYGAIQGPPGQKGEMGTPGPKGDRGPAGPPGHPGPPGPRGHKGEKGDKGDQVYAGRRRRRSIAVKP

SEQ ID NO: 1029351 - protein, 270 aa, Homo sapiens
GGLSLSLSLQGGGRRGCGASFSKPSSAILVAAATHALAAAMTEQMTLRGTLKGHNGWVTQIATTPQFPDMILSASRDKTIIMWKLTRDETNYGIPQRALRGHSHFVSDVVISSDGQFALSGSWDGTLRLWDLTTGTTTRRFVGHTKDVLSVAFSSDNRQIVSGSRDKTIKLWNTLGVCKYTVQDESHSEWVSCVRFSPNSSNPIIVSCGWDKLVKVWNLANCKLKTNHIGHTGYLNTVTVSPDGSLCASGGKDGQAMLWDLNERQNTFTR

SEQ ID NO: 1029352 - protein, 220 aa, Homo sapiens
GGLSLSLSLQGGGRRGCGASFSKPSSAILVAAATHALAAAMTEQMTLRGTLKGHNGWVTQIATTPQFPDMILSASRDKTIIMWKLTRDETNYGIPQRALRGHSHFVSDVVISSDGQFALSGSWDGTLRLWDLTTGTTTRRFVGHTKDVLSVAFSSDNRQIVSGSRDKTIKLWNTLGVCKYTVQDESHSEWVSCEHFLPPGSTVYRIMWPGPGKRWALAYC

SEQ ID NO: 1029353 - protein, 229 aa, Homo sapiens
GGLSLSLSLQGGGRRGCGASFSKPSSAILVAAATHALAAAMTEQMTLRGTLKGHNGWVTQIATTPQFPDMILSASRDKTIIMWKLTRDETNYGIPQRALRGHSHFVSDVVISSDGQFALSGSWDGTLRLWDLTTGTTTRRFVGHTKDVLSVAFSSDNRQIVSGSRDNHSAMRSPVWLPHPFPHNWPPTSVAWSASPPPPTFLSPPTPRPTRARPRSPLTPPLTGLPSLP

SEQ ID NO: 1029354 - protein, 235 aa, Homo sapiens
HRNPHRNLSSKPYAPHVRVIETLTQIATTPQFPDMILSASRDKTIIMWKLTRDETNYGIPQRALRGHSHFVSDVVISSDGQFALSGSWDGTLRLWDLTTGTTTRRFVGHTKDVLSVAFSSDNRQIVSGSRDKTIKLWNTLGVCKYTVQDESHSEWVSCVRFSPNSSNPIIVSCGWDKLVKVWNLANCKLKTNHIGHTGYLNTVTVSPDGSLCASGGKDGQAMLWDLNERQNTFTR

SEQ ID NO: 1029355 - protein, 135 aa, Homo sapiens
GGLSLSLSLQGGGRRGCGASFSKPSSAILVAAATHALAAAMTEQMTLRGTLKGHNGWVTQIATTPQFPDMILSASRDKTIIMWKLTRDETNYGIPQRALRGHSHFVSDEPIPSDGQFALSGYCDGTVRVCDLHAY

SEQ ID NO: 1029356 - protein, 244 aa, Homo sapiens
  misc_feature (37)..(37): Xaa can be any naturally occurring amino acid
  misc_feature (59)..(60): Xaa can be any naturally occurring amino acid
  misc_feature (64)..(64): Xaa can be any naturally occurring amino acid
MTLRGTLKGHNGWVTQIATTPQFPDIDPSSRALLEIXDTIYPLCGNTGHQRGLTDTQHXXGKFXTMPWRPIAGSTSPHFVSDVVISSDGQFALSGSWDGTLRLWDLTTGTTTRRFVGHTKDVLSVAFSSDNRQIVSGSRDKTIKLWNTLGVCKYTVQDESHSEWVSCVRFSPNSSNPIIVSCGWDKLVKVWNLANCKLKTNHIGHTGYLNTVTVSPDGSLCASGGKDGQAMLWDLNERQNTFTR

SEQ ID NO: 1029357 - protein, 270 aa, Homo sapiens; identical to SEQ ID NO: 1029351

SEQ ID NO: 1029358 - protein, 267 aa, Homo sapiens
AGTGRSLRIGRRGCGASFSKPSSAILVAAATHALAAAMTEQMTLRGTLKGHNGWVTQIATTPQFPDMILSASRDKTIIMWKLTRDETNYGIPQRALRGHSHFVSDVVISSDGQFALSGSWDGTLRLWDLTTGTTTRRFVGHTKDVLSVAFSSDNRQIVSGSRDKTIKLWNTLGVCKYTVQDESHSEWVSCVRFSPNSSNPIIVSCGWDKLVKVWNLANCKLKTNHIGHTGYLNTVTVSPDGSLCASGGKDGQAMLWDLNERQNTFTR

SEQ ID NO: 1029359 - protein, 189 aa, Homo sapiens
GGLSLSLSLQGGGRRGCGASFSKPSSAILVAAATHALAAAMTEQMTLRGTLKGHNGWVTQIATTPQFPDMILSASRDKTIIMWKLTRDETNYGIPQRALRGHSHFVSDVVISSDGQFALSGSWDGTLRLWDLTTGTTTRRFVGHTKDVLSVAFSSDNRQIVSGSRDASGGKDGQAMLWDLNERQNTFTR

SEQ ID NO: 1029360 - protein, 204 aa, Homo sapiens
MTLLILSASRDKTIIMWKLTRDETNYGIPQRALRGHSHFVSDVVISSDGQFALSGSWDGTLRLWDLTTGTTTRRFVGHTKDVLSVAFSSDNRQIVSGSRDKTIKLWNTLGVCKYTVQDESHSEWVSCVRFSPNSSNPIIVSCGWDKLVKVWNLANCKLKTNHIGHTGYLNTVTVSPDGSLCASGGKDGQAMLWDLNERQNTFTR

SEQ ID NO: 1029361 - protein, 172 aa, Homo sapiens
MVEAKALPIPTSVLGRAFNLTQRHRDGTLRLWDLTTGTTTRRFVGHTKDVLSVAFSSDNRQIVSGSRDKTIKLWNTLGVCKYTVQDESHSEWVSCVRFSPNSSNPIIVSCGWDKLVKVWNLANCKLKTNHIGHTGYLNTVTVSPDGSLCASGGKDGQAMLWDLNERQNTFTR

SEQ ID NO: 1029362 - protein, 117 aa, Homo sapiens
MTERNCRLRVSALISILNRAGDECVFLAILGWIESRVNANGNIPRVVGAKIIDSSKVVHETHLTKCGCSMLVASFIAANHAANALVIVLLVGLGTYRWLKALMERWAKTRKAGRPNA

SEQ ID NO: 1029363 - protein, 214 aa, Homo sapiens
MSGLSFSEMEGCRNLLGLLDNDEIMALCDTVTNRLVQPQDRQDAVHAILAYSQSAEELLRRRKVHREVIFKYLATQGIVIPPATEKHNLIQHAKDYWQKQPQLKLKETPEPVTKTEDIHLFQQQVKEDKKAEKVDFRRLGEEFCHWFFGLLNSQNPFLGPPQDEWGPQHFWHDVKLRFYYNTSEQNVMDYHGAEIVSLRLLSLVKEEFLFLSPN

SEQ ID NO: 1029364 - protein, 214 aa, Homo sapiens; identical to SEQ ID NO: 1029363

SEQ ID NO: 1029365 - protein, 233 aa, Homo sapiens
HTSQTTYHLDQPISRPYRQVSFPDDDEEIVRINPREKIWMTGYEDYRHAPVRGKYPDPSEDADSSYVRFAKGEVPKHDYNYPYVDSSDFGLGEDPKGRGGSVIKTQPSRGKSRRRKEDGERSRCVYCRDMFNHEENRRGHCQDAPDSVRTCIRRVSCMWCADSMLYHCMSDPEGDYTDPCSCDTSDEKFCLRWMALIALSFLAPCMCCYLPLRACYHCGVMCRCCGGKHKAAA

SEQ ID NO: 1029366 - protein, 233 aa, Homo sapiens; identical to SEQ ID NO: 1029365

SEQ ID NO: 1029367 - protein, 158 aa, Homo sapiens
  misc_feature (2)..(2): Xaa can be any naturally occurring amino acid
  misc_feature (35)..(35): Xaa can be any naturally occurring amino acid
  misc_feature (45)..(45): Xaa can be any naturally occurring amino acid
  misc_feature (47)..(47): Xaa can be any naturally occurring amino acid
  misc_feature (59)..(59): Xaa can be any naturally occurring amino acid
  misc_feature (108)..(108): Xaa can be any naturally occurring amino acid
  misc_feature (110)..(110): Xaa can be any naturally occurring amino acid
  misc_feature (113)..(113): Xaa can be any naturally occurring amino acid
HXVLLTHHHRQWVHVLQLQPAAATPAVRTDPQYKXAAGVRNPQQXLXAQPQVTMQQPAXHVQGQEPLTASMLASAPPQEQKQMLGERLFPLIQAMHPTLAGKRTGRLXEXDNXDPLHMLESPESLRSKVDEAVAVLQAPPAKEAAQKAVNSATGVPTV

SEQ ID NO: 1029368 - protein, 105 aa, Homo sapiens
MGDVEKGKKIFVQKCAQCHTVEKGGKHKTGPNLHGLFGRKTGQAAGFSYTDANKNKGITWGEDTLMEYLENPKKYIPGTKMIFAGIKKKGERADLIAYLKKATNE

SEQ ID NO: 1029369 - protein, 105 aa, Homo sapiens
MGDVEKGKKIFIMKCSQYHTVEKGGKHKTGPNLHGLFGRKTGQAPGYSYTAANKNKGIIWGEDTLMEYLENPKKYIPGTKMIFVGIKKKEERADLIAYLKKATNE

SEQ ID NO: 1029370 - protein, 145 aa, Homo sapiens
VALYTGYLSADRVSLDMREWGRPASERECSLCQRLKRELNMGDVEKGKKIFIMKCSQCHTVEKGGKHKTGPNLHGLFGRKTGQAPGYSYTAANKNKGIIWGEDTLMEYLENPKKYIPGTKMIFVGIKKKEERADLIAYLKKATNE

SEQ ID NO: 1029371 - protein, 327 aa, Homo sapiens
VALYTGYLSADRVSLDMREWGRPASERECSLCQRLKRELNMGDVEKGKEEIKKRDNWDDDDDEKKEEAEVKPEVKISEKKKNSREDKKKERHQKKRQEDITRRDTWDDDDDDQKRGADDKTQSLTISETTQIRSRRPTADPTGTTTHRPSKTLPTQRDSLDAMTDDPTPRPPEVTTPRYTFQNTTTHFAEKQHDDQTRNPQPTPPTHLQPHASLGTDERLPGPPTHATQAGKHPEVDTSLETKQQSAAADNRDTNRHTDRARGPNTAGITGSSRDQNEGYPSNQRHLQHPPSPYTTRHPQRPTPGHAAQTHDPDHGPTSGNTNAAHS

SEQ ID NO: 1029372 - protein, 105 aa, Homo sapiens
MGDVEKGKKIFVQKCAQCHTVEKGGKHKTGPNLHGLFGRKTGQAAGFSYTDANKNKGITWGEDTLMEYLENPKKYIPGTKMIFVGIKKKEERADLIAYLKKATNE

SEQ ID NO: 1029373 - protein, 105 aa, Homo sapiens; identical to SEQ ID NO: 1029369

SEQ ID NO: 1029374 - protein, 105 aa, Homo sapiens; identical to SEQ ID NO: 1029369

SEQ ID NO: 1029375 - protein, 105 aa, Homo sapiens; identical to SEQ ID NO: 1029369

SEQ ID NO: 1029376 - protein, 106 aa, Homo sapiens
  misc_feature (36)..(36): Xaa can be any naturally occurring amino acid
MKDRLPGGTPMRYMETASQMNGREESFTGLYGEQEXIQSQRPPGVTLIDRAGLNKNKGIIWGEDTLMEYLENPKKYIPGTKMIFVGIKKKEERADLIAYLKKATNE

SEQ ID NO: 1029377 - protein, 376 aa, Homo sapiens
MLLPPGSLSRPRTFSSQPLQTKLMTHNGLFRPIPYVTAVSADEPTASQQPPQAQLHRYNGLFRPSSCLPAFSPGPELSQVDLTRPSSCFFAASPGPAPASWWPLQAQPLPPVSLYSPNVCLTADSSRPASTSLWTPQAKLPTFQQLLHTQLLPPSGLFRPSSCFTRAFPGPTFVSWQPSLARFLPVSQQPRQAQVLPHTGLSTSSLCLTVASPGPTPVPGRHLRAQNLLKSDSLVPTAASWWPMKAQNLLKLTFPGPAPASCQRLQAQPLPHGGFSRPTSSSWLGLQAQLLPHNSLFWPSSCPAHGGQCRPKTSSSQTLQAHLLLPGGMNRPSFDLRTASAGPALASQGLFPGPALASWQLPQAKFLPACQQPQQA

SEQ ID NO: 1029378 - protein, 376 aa, Homo sapiens; identical to SEQ ID NO: 1029377

SEQ ID NO: 1029379 - protein, 376 aa, Homo sapiens; identical to SEQ ID NO: 1029377

SEQ ID NO: 1029380 - protein, 376 aa, Homo sapiens; identical to SEQ ID NO: 1029377

SEQ ID NO: 1029381 - protein, 376 aa, Homo sapiens; identical to SEQ ID NO: 1029377

SEQ ID NO: 1029382 - protein, 376 aa, Homo sapiens; identical to SEQ ID NO: 1029377

SEQ ID NO: 1029383 - protein, 376 aa, Homo sapiens; identical to SEQ ID NO: 1029377

SEQ ID NO: 1029384 - protein, 383 aa, Homo sapiens
MCLNLLAQLLPPGSLSRPRTFSSQPLQTKLMTHNGLFRPIPYVTAVSADEPTASQQPPQAQLHRYNGLFRPSSCLPAFSPGPELSQVDLTRPSSCFFAASPGPAPASWWPLQAQPLPPVSLYSPNVCLTADSSRPASTSLWTPQAKLPTFQQLLHTQLLPPSGLFRPSSCFTRAFPGPTFVSWQPSLARFLPVSQQPRQAQVLPHTGLSTSSLCLTVASPGPTPVPGRHLRAQNLLKSDSLVPTAASWWPMKAQNLLKLTFPGPAPASCQRLQAQPLPHGGFSRPTSSSWLGLQAQLLPHNSLFWPSSCPAHGGQCRPKTSSSQTLQAHLLLPGGMNRPSFDLRTASAGPALASQGLFPGPALASWQLPQAKFLPACQQPQQA

SEQ ID NO: 1029385 - protein, 383 aa, Homo sapiens; identical to SEQ ID NO: 1029384

SEQ ID NO: 1029386 - protein, 386 aa, Homo sapiens
MEPQGATQQEVLLPPGSLSRPRTFSSQPLQTKLMTHNGLFRPIPYVTAVSADEPTASQQPPQAQLHRYNGLFRPSSCLPAFSPGPELSQVDLTRPSSCFFAASPGPAPASWWPLQAQPLPPVSLYSPNVCLTADSSRPASTSLWTPQAKLPTFQQLLHTQLLPPSGLFRPSSCFTRAFPGPTFVSWQPSLARFLPVSQQPRQAQVLPHTGLSTSSLCLTVASPGPTPVPGRHLRAQNLLKSDSLVPTAASWWPMKAQNLLKLTFPGPAPASCQRLQAQPLPHGGFSRPTSSSWLGLQAQLLPHNSLFWPSSCPAHGGQCRPKTSSSQTLQAHLLLPGGMNRPSFDLRTASAGPALASQGLFPGPALASWQLPQAKFLPACQQPQQA

SEQ ID NO: 1029387 - protein, 353 aa, Homo sapiens
MTHNGLFRPIPYVTAVSADEPTASQQPPQAQLHRYNGLFRPSSCLPAFSPGPELSQVDLTRPSSCFFAASPGPAPASWWPLQAQPLPPVSLYSPNVCLTADSSRPASTSLWTPQAKLPTFQQLLHTQLLPPSGLFRPSSCFTRAFPGPTFVSWQPSLARFLPVSQQPRQAQVLPHTGLSTSSLCLTVASPGPTPVPGRHLRAQNLLKSDSLVPTAASWWPMKAQNLLKLTFPGPAPASCQRLQAQPLPHGGFSRPTSSSWLGLQAQLLPHNSLFWPSSCPAHGGQCRPKTSSSQTLQAHLLLPGGMNRPSFDLRTASAGPALASQGLFPGPALASWQLPQAKFLPACQQPQQA

SEQ ID NO: 1029388 - protein, 376 aa, Homo sapiens; identical to SEQ ID NO: 1029377

SEQ ID NO: 1029389 - protein, 376 aa, Homo sapiens; identical to SEQ ID NO: 1029377

SEQ ID NO: 1029390 - protein, 230 aa, Homo sapiens
MLLPPGSLSRPRTFSSQPLQTKLMTHNGLFRPIPYVTAVSADEPTASQQPPQAQLHRYNGLFRPSSCLPAFSPGPELSQVDLTRPSSCFFAASPGPAPASWWPLQAQPLPPVSLYSPNVCLTADSSRPASASQWTLQTQMVSHCGILRRSSCLSAASPGPAPPASQWPLSAQPSSWLSAAFPGPAFDFWQPLQAQNLISSRPLQARPPASRRPARARPRPRPHSGLSTPS

SEQ ID NO: 1029391 - protein, 416 aa, Homo sapiens
MLLPPGSLSRPRTFSSQPLQTKLMTHNGLFRPIPYVTAVSADEPTASQQPPQAQLHRYNGLFRPSSCLPAFSPGPELSQVDLTRPSSCFFAASPGPASCLPKACTGPASASQRTLQAQLAVASLRPPESKAPASRPLRQAQLPPASGLFRPMGLIPDNGLSRPSFSLPAASPGPEPPQVGLSRPTCTLRASSPGPALLPGCVSRPDSCLSTTSLDSVPTHLLGGPGRPTTSLSQAPQAQLRPRGGLSRLSSWPSDDICRPQMASGRWAPLGPAWASRRPLQAQIVPKSVSPGLAPASRRPLQAQVVLKSAWKWAWKSSKSASPGPAPSSRRPLQVQNFLESASPGPAPPASQWPLSAQPSSWLSAAFPGPAFDFWQPLQAQNLISSRPLQARPPASRRPARARPRPRPHSGLSTPS

SEQ ID NO: 1029392 - protein, 339 aa, Homo sapiens
MAYLGPYPTSRQSPQMSLLPHNSLHRHSSIVTMASLDPAPASQPSLQALNFLKSTSPGPAPASWWPLQAQPLPPVSLYSPNVCLTADSSRPASTSLWTPQAKLPTFQQLLHTQLLPPSGLFRPSSCFTRAFPGPTFVSWQPSLARFLPVSQQPRQAQVLPHTGLSTSSLCLTVASPGPTPVPGRHLRAQNLLKSDSLVPTAASWWPMKAQNLLKLTFPGPAPASCQRLQAQPLPHGGFSRPTSSSWLGLQAQLLPHNSLFWPSSCPAHGGQCRPKTSSSQTLQAHLLLPGGMNRPSFDLRTASAGPALASQGLFPGPALASWQLPQAKFLPACQQPQQA

SEQ ID NO: 1029393 - protein, 290 aa, Homo sapiens
MLLPPGSLSRPRTFSSQPLQTKLMTHNGLFRPIPYVTAVSADEPTASQQPPQAQLHRYNGLFRPSSCLPAFSPGPELSQVDLTRPSSCFFAASPGPAPASWWPLQAQPLPPVSLYSPNVCLTADSSRPASTSLWTPQAKLPTFQQLLHTQLLPPSGLFRPSSCFTRAFPGPTFVSWQPSLARFLPVSQQPRQAQVLPHTGLSTSSLCLTVASPGPTPVPGRHLRAQNLLKSDSLVPTAASWWPMKAQNLLKLTFPGPAPASCQRLQAQPLPHGGFSRPTSSSGLSLYKLR

SEQ ID NO: 1029394 - protein, 244 aa, Homo sapiens
  misc_feature (7)..(7): Xaa can be any naturally occurring amino acid
  misc_feature (35)..(35): Xaa can be any naturally occurring amino acid
GKRPRYXPLRIVSQRDSLRLGTHTTAREPLLPRTXPGPNNVFGLSSCPAPSGPGRPTTSLSQAPQAQLRPRGGLSRLSSWPSDDICRPQMASGRWAPLGPAWASRRPLQAQIVPKSVSPGLAPASRRPLQAQVVLKSAWKWAWKSSKSASPGPAPSSRRPLQVQNFLESASPGPAPPASQWPLSAQPSSWLSAAFPGPAFDFWQPLQAQNLISSRPLQARPPASRRPARARPRPRPHSGLSTPS

SEQ ID NO: 1029395 - protein, 307 aa, Homo sapiens
MASLDPAPASQPSLQALNFLKSTSPGPAPASWWPLQAQPLPPVSLYSPNVCLTADSSRPASTSLWTPQAKLPTFQQLLHTQLLPPSGLFRPSSCFTRAFPGPTFVSWQPSLARFLPVSQQPRQAQVLPHTGLSTSSLCLTVASPGPTPVPGRHLRAQNLLKSDSLVPTAASWWPMKAQNLLKLTFPGPAPASCQRLQAQPLPHGGFSRPTSSSWLGLQAQLLPHNSLFWPSSCPAHGGQCRPKTSSSQTLQAHLLLPGGMNRPSFDLRTASAGPALASQGLFPGPALASWQLPQAKFLPACQQPQQA

SEQ ID NO: 1029396 - protein, 175 aa, Homo sapiens
MASLDPAPASQPSLQALNFLKSTSPGPAHASLQPLQAQLLHLGGPSRPSLCLPSASTVPTSASQQILHAQHLPHCGPPKPSSQPFSSFYTPSSCHPVASLGQAHASQGPFQAQLLSHGNLPWPDSCLSPSSLDRPRSCLTLASLHPAYASRWPLQAQLLSQDVISGPKTYSSQTL

SEQ ID NO: 1029397 - protein, 161 aa, Homo sapiens
MLLPPGSLSRPRTFSSQPLQTKLMTHNGLFRPIPYVTAVSADEPTASQQPPQAQLHRYNGLFRPSSCLPAFSPGPELSQVDLTRPSSCFFAASPGPAPASWWPLQAQPLPPVSLYSPNVCLTADSSRPASTSLWTPQRARLFPIQNRPSARAFTSGISYDM

SEQ ID NO: 1029398 - protein, 114 aa, Homo sapiens
MLLPPGSLSRPRTFSSQPLQTKLMTHNGLFRPIPYVTAVSADEPTASQQPPQAQLHRYNGLFRPSSCLPAFSPGPELSQVDLTRPSSCFFAASPGPAPASWWPLQAQPLPPVGL

SEQ ID NO: 1029399 - protein, 231 aa, Homo sapiens
MLLPPGSLSRPRTFSSQPLQTKLMTHNGLFRPIPYVTAVSADEPTASQQPPQAQLHRYNGLFRPSSCLPAFSPGPELSQVDLTRPSSCFFAASPGPASCLPKACTGPASASQRTLQAQLAVASLRPPESKAPASRPLRQAQLPPASGLFRPMGLIPDNGLSRPSFSLPAASPGPEPPQVGLSRPTCTLRASSPGPALLPGCVSRPDSCLPTTSLDSAPAQLPAALVGPQLP

SEQ ID NO: 1029400 - protein, 231 aa, Homo sapiens; identical to SEQ ID NO: 1029399

SEQ ID NO: 1029401 - protein, 105 aa, Homo sapiens
MLLPPGSLSRPRTFSSQPLQTKLMTHNGLFRPIPYVTAVSADEPTASQQPPQAQLHRYNGLFRPSSCLPAFSPGPELSQVDLTVSLCCPRLECSSAMLYAHLCGW

SEQ ID NO: 1029402 - protein, 34 aa, Homo sapiens
MAPTSRQPLQAQSFLQSASTDHAHEADMLIRDAY

SEQ ID NO: 1029403 - protein, 45 aa, Homo sapiens
MASLDPAPASQPSLQALNFQAQLLSCVGLYRPGIILSTASIGPAS

SEQ ID NO: 1029404 - protein, 376 aa, Homo sapiens; identical to SEQ ID NO: 1029377

SEQ ID NO: 1029405 - protein, 376 aa, Homo sapiens; identical to SEQ ID NO: 1029377

SEQ ID NO: 1029406 - protein, 376 aa, Homo sapiens; identical to SEQ ID NO: 1029377

SEQ ID NO: 1029407 - protein, 376 aa, Homo sapiens; identical to SEQ ID NO: 1029377

SEQ ID NO: 1029408 - protein, 376 aa, Homo sapiens; identical to SEQ ID NO: 1029377

SEQ ID NO: 1029409 - protein, 376 aa, Homo sapiens
MLLPPGSLSRPRTFSSQPLQTKLMTHNGLFRPIPYVTAVSADEPTASQQPPQAQLHRYNGLFRPSSCLPAFSPGPELSQVDLTRPSSCFFAASPGPAPASWWPLQAQPLPPVSLYSPNVCLTADSSRPASASLWTPQAKLPTFQQLLHTQLLPPSGLFRPSSCFTRAFPGPTFVSWQPSLARFLPVSQQPRQAQVLPHTGLSTSSLCLTVASPGPTPVPGRHLRAQNLLKSDSLVPTAASWWPMKAQNLLKLTFPGPAPASCQRLQAQPLPHGGFSRPTSSSWLGLQAQLLPHNSLFWPSSCPAHGGQCRPKTSSSQTLQAHLLLPGGMNRPSFDLRTASAGPALASQGLFPGPALASWQLPQAKFLPACQQPQQA

SEQ ID NO: 1029410 - protein, 393 aa, Homo sapiens
MEMKCLINVNVLKSFGPMLLPPGSLSRPRTFSSQPLQTKLMTHNGLFRPIPYVTAVSADEPTASQQPPQAQLHRYNGLFRPSSCLPAFSPGPELSQVDLTRPSSCFFAASPGPAPASWWPLQAQPLPPVSLYSPNVCLTADSSRPASTSLWTPQAKLPTFQQLLHTQLLPPSGLFRPSSCFTRAFPGPTFVSWQPSLARFLPVSQQPRQAQVLPHTGLSTSSLCLTVASPGPTPVPGRHLRAQNLLKSDSLVPTAASWWPMKAQNLLKLTFPGPAPASCQRLQAQPLPHGGFSRPTSSSWLGLQAQLLPHNSLFWPSSCPAHGGQCRPKTSSSQTLQAHLLLPGGMNRPSFDLRTASAGPALASQGLFPGPALASWQLPQAKFLPACQQPQQA

SEQ ID NO: 1029411 - protein, 339 aa, Homo sapiens
MAYLGPYPTSRQSPQMSLLPHNSLHRHSSIVTMASLDPAPASQPSLQALNFLKSTSPGPAHASLQPLQAQLLHLGGPSRPSLCLTADSSRPASTSLWTPQAKLPTFQQLLHTQLLPPSGLFRPSSCFTRAFPGPTFVSWQPSLARFLPVSQQPRQAQVLPHTGLSTSSLCLTVASPGPTPVPGRHLRAQNLLKSDSLVPTAASWWPMKAQNLLKLTFPGPAPASCQRLQAQPLPHGGFSRPTSSSWLGLQAQLLPHNSLFWPSSCPAHGGQCRPKTSSSQTLQAHLLLPGGMNRPSFDLRTASAGPALASQGLFPGPALASWQLPQAKFLPACQQPQQA

SEQ ID NO: 1029412 - protein, 353 aa, Homo sapiens; identical to SEQ ID NO: 1029387

SEQ ID NO: 1029413 - protein, 376 aa, Homo sapiens; identical to SEQ ID NO: 1029377

SEQ ID NO: 1029414 - protein, 416 aa, Homo sapiens
MLLPPGSLSRPRTFSSQPLQTKLMTHNGLFRPIPYVTAVSADEPTASQQPPQAQLHRYNGLFRPSSCLPAFSPGPELSQVDLTRPSSCFFAASLRPSLLPPEGLHRPSLCLTADSPSPASCCFTAASRVQSSCLSAASAGPAPACQWPLQAHGAHSSQRPFQAQFFPSGGLSGPRTSSSRPLQTHLHPPGVLSGPSSSSWLRLQARLLPPNNVFGLSSCPAPSGPGRPTTSLSQAPQAQLRPRGGLSRLSSWPSDDICRPQMASGRWAPLGPAWASRRPLQAQIVPKSVSPGLAPASRRPLQAQVVLKSAWKWAWKSSKSASPGPAPSSRRPLQVQNFLESASPGPAPPASQWPLSAQPSSWLSAAFPGPAFDFWQPLQAQNLISSRPLQARPPASRRPARARPRPRPHSGLSTPS

SEQ ID NO: 1029415 - protein, 175 aa, Homo sapiens; identical to SEQ ID NO: 1029396

SEQ ID NO: 1029416 - protein, 263 aa, Homo sapiens
MAYLGPYPTSRQSPQMSLLPHNSLHRHSSIVTMASLDPLPPSGLFRPSSCFTRAFPGPTFVSWQPSLARFLPVSQQPRQAQVLPHTGLSTSSLCLTVASPGPTPVPGRHLRAQNLLKSDSLVPTAASWWPMKAQNLLKLTFPGPAPASCQRLQAQPLPHGGFSRPTSSSWLGLQAQLLPHNSLFWPSSCPAHGGQCRPKTSSSQTLQAHLLLPGGMNRPSFDLRTASAGPALASQGLFPGPALASWQLPQAKFLPACQQPQQA

SEQ ID NO: 1029417 - protein, 253 aa, Homo sapiens
MLLPPGSLSRPRTFSSQPLQTKLMTHNGLFRPIPYVTAVSADEPTASQQPPQAQLHRYNGLFRPSSCLPAFSPGPELSQVDLTRPSSCFFAASPGPAPASWWPLQAQPLPPVSLYSPNVCLTADSSRPASASQWTLQTQMVSHCGILRRSSCLSAASPGPAPPASQWPLSAQPSSCLPAAFPSPAFDFWWPLQASTRPSLLPLEGLHGPGLGLGLTADSPRPASSRLTAASPVQSSCLSATSAGPAPACQWPL

SEQ ID NO: 1029418 - protein, 345 aa, Homo sapiens
MAYLGPYPTSRQPPQMSLLPHNSLHRHSSIVTMASLDPAPASQPSLQALNFQAQLMLLCSLSRPSSCILVAPPGPASASRQPLQSQRLPHSRFFTPSISTSLWTPQAKLPTFQQLLHTQLLPPSGLFRPSSCFTRAFPGPTFVSWQPSLARFLPVSQQPRQAQVLPHTGLSTSSLCLTVASPGPTPVPGRHLRAQNLLKSDSLVPTAASWWPMKAQNLLKLTFPGPAPASCQRLQAQPLPHGGFSRPTSSSWLGLQAQLLPHNSLFWPSSCPAHGGQCRPKTSSSQTLQAHLLLPGGMNRPSFDLRTASAGPALASQGLFPGPALASWQLPQAKFLPACQQPQQA

SEQ ID NO: 1029419 - protein, 303 aa, Homo sapiens
MLLPPGSLSRPRTFSSQPLQTKLMTHNGLFRPIPYVTAVSADEPTASQQPPQAQLHRYNGLFRPSSCLPAFSPGPELSQVDLTRPSSCFFAASPGPAPASWWPLQAQPLPPVSLYSPNVCLTADSSRPASASLWTPQAKLPTFQQLLHTQLLPPSGLFRPSSCFTRAFPGPTFVSWQPSLARFLPVSQQPRQAQVLPHTGLSTSSLCLTVASPGPTPVPGRHLRAQNLLKSDSLVPTAASQQILHAQYLPHCGPPKPSSQPFSSFYTPSSCHPVASLGQAHASQGPFQAQLLSHGNLPGQIPA

SEQ ID NO: 1029420 - protein, 153 aa, Homo sapiens
MLLPPGSLSRPRTFSSQPLQTKLMTHNGLFRPIPYVTAVSADEPTASQQPPQAQLHRYNGLFRPSSCLPAFSPGPELSQVDLTRPSSCFFAASPGPAPASWWPLQAQPLPPVSLYSPNVCLTADSSRPASASLWTPQAKLPTFSSFYTPSSKA

SEQ ID NO: 1029421 - protein, 231 aa, Homo sapiens
MLLPPGSLSRPRTFSSQPLQTKLMTHNGLFRPIPYVTAVSADEPTASQQPPQAQLHRYNGLFRPSSCLPAFSPGPELSQVDLTRPSSCFFAASPGPASCLPKACTGPASASQRTLQAQLAVASLRPPESKAPASRPLRQAQLPPASGLFRPMGLIPDNGLSRPSFSLPAASPGPEPPQVGLSRPTCTLRASSPGPALLPGCVSRPDSCLSTTSLDSVPTHLLAALVGPQLP

SEQ ID NO: 1029422 - protein, 100 aa, Homo sapiens
YPGAAPGLRTFSSQPLQTKLMTHNGLFRPIPYVTAASADEPTASQQPPQAQLHRYNGLFRPSSCLPAFSPGPELSQVSLCCPRLECSSAIAADCSLNLPG

SEQ ID NO: 1029423 - protein, 28 aa, Homo sapiens
MVSISDFLIRACEYPGACIFAKTVIKVA

SEQ ID NO: 1029424 - protein, 186 aa, Homo sapiens
VLVGHRAAVNVVDFDDKYMFLHLGIELVKVWNTSTCEFVRPLKGHKRGPACFPGQGQAGNEWAHLPPLSDLWDIECGACLRVLEGHEELVRCIRFDNKRIVSGAYDGKIKVWDLVAALDPRAPAGTLCLRTLVEHSGRVFRLQFDEFQIVSSSHDDTILIWDFLNDPAAQAEPPRSPSRTYTYISR

SEQ ID NO: 1029425 - protein, 186 aa, Homo sapiens; identical to SEQ ID NO: 1029424

SEQ ID NO: 1029426 - protein, 186 aa, Homo sapiens; identical to SEQ ID NO: 1029424

SEQ ID NO: 1029427 - protein, 28 aa, Homo sapiens
MVSISDFLIRACEYPGACIFAKTVIKVA

SEQ ID NO: 1029428 - protein, 28 aa, Homo sapiens
MVSISDFLIRACEYPGACIFAKTVIKVA

SEQ ID NO: 1029429 - protein, 128 aa, Homo sapiens
  misc_feature (23)..(23): Xaa can be any naturally occurring amino acid
CDDETCEGSAKSNIAKYYELTMXLSLLVSRTLGYTISRETQNLQVPYFVDKNFDKAYRGASLHDLEKTIEKDYIDYIQTSCWKEKQQKSELTNLAGLYRDERLKQKAESLKLENCEKLSKLIGLRRGG

SEQ ID NO: 1029430 - protein, 358 aa, Homo sapiens
MAATLGSGERWTEAYIDAVRRNKYPEDTPPESHDPCGCCNCMKAQKEKKSENEWTQTRQGEGNSTYSEEQLLGVQRIKKCRNYYEILGVSRDASDEELKKAYRKLALKFHPDKNCAPGATDAFKAIGNAFAVLSNPDKRLRYDEYGDEQVTFTAPRARPYNYYRDFEADITPEELFNVFFGGHFPTGNIHMFSNVTDDTYYYRRRHRHERTQTQKEEEEEKPQTTYSAFIQLLPVLVIVIISVITQLLATNPPYSLFYKSTLGYTISRETQNLQVPYFVDKNFDKAYRGASLHDLEKTIEKDYIDYIQTSCWKEKQQKSELTNLAGLYRDERLKQKAESLKLENCEKLSKLIGLRRGG

SEQ ID NO: 1029431 - protein, 358 aa, Homo sapiens; identical to SEQ ID NO: 1029430

SEQ ID NO: 1029432 - protein, 358 aa, Homo sapiens; identical to SEQ ID NO: 1029430

SEQ ID NO: 1029433 - protein, 356 aa, Homo sapiens
MAATLGSGERWTEAYIDAVRRNKYPEDTPPESHDPCGCCNCMKAQKEKKSENEWTQTRQGEGNSTYSEEQLLGVQRIKKCRNYYEILGVSRDASDEELKKAYRKLALKFHPDKNCAPGATDAFKAIGNAFAVLSNPDKRLRYDEYGDEQVTFTAPRARPYNYYRDFEADITPEELFNVFFGGHFPTGNIHMFSNVTDDTYYYRRRHRHERTQTQKEEEEEKPQTTYSAFIQLLPVLVIVIISVITQLLATNPPYSLFYKSTLGYTISRETQNLQVPYFVDKNFDKAYRGASLHDLEKTIEKDYIDYIQTSCWKEKQQKSELTNLAGLYRDERLKQKAESLKLENCEKLSKLPPPPP

SEQ ID NO: 1029434 - protein, 358 aa, Homo sapiens; identical to SEQ ID NO: 1029430

SEQ ID NO: 1029435 - protein, 344 aa, Homo sapiens
MAATLGSGERWTEAYIDAVRRNKYPEDTPPESHDPCGCCNCMKAQKEKKSENEWTQTRQGEGNSTYSEEQLLGVQRIKKCRNYYEILGVSRDASDEELKKAYRKLALKFHPDKNCAPGATDAFKAIGNAFAVLSNPDKRLRYDEYGDEQVTFTAPRARPYNYYRDFEADITPEELFNVFFGGHFPTGNIHMFSNVTDDTYYYRRRHRHERTQTQKEEEEEKPQTTYSAFIQLLPVLVIVIISVITQLLATNPPYSLFYKSTLGYTISRETQNLQVPYFVDKNFDKAYRGASLHDLEKTIEKDYIDYIQTSCWKEKQQRFWHSPCFRTSAQQMSFEERILRSRKQ

SEQ ID NO: 1029436 - protein, 358 aa, Homo sapiens; identical to SEQ ID NO: 1029430

SEQ ID NO: 1029437 - protein, 258 aa, Homo sapiens
MSGLRPGRVRGTPRTVRNSCLGYKAIGNAFAVLSNPDKRLRYDEYGDEQVTFTAPRARPYNYYRDFEADITPEELFNVFFGGHFPTGNIHMFSNVTDDTYYYRRRHRHERTQTQKEEEEEKPQTTYSAFIQLLPVLVIVIISVITQLLATNPPYSLFYKSTLGYTISRETQNLQVPYFVDKNFDKAYRGASLHDLEKTIEKDYIDYIQTSCWKEKQQKSELTNLAGLYRDERLKQKAESLKLENCEKLSKLIGLRRGG

SEQ ID NO: 1029438 - protein, 645 aa, Homo sapiens
MSCQISCKSRGRGGGGGGFRGFSSGSAVVSGGSRRSTSSFSCLSRHGGGGGGFGGGGFGSRSLVGLGGTKSISISVAGGGGGFGAAGGFGGRGGGFGGGSGFGGGSGFGGGSGFSGGGFGGGGFGGGRFGGFGGPGGVGGLGGPGGFGPGGYPGGIHEVSVNQSLLQPLNVKVDPEIQNVKAQEREQIKTLNNKFASFIDKVRFLEQQNQVLQTKWELLQQMNVGTRPINLEPIFQGYIDSLKRYLDGLTAERTSQNSELNNMQDLVEDYKKKYEDEINKRTAAENDFVTLKKDVDNAYMIKVELQSKVDLLNQEIEFLKVLYDAEISQIHQSVTDTNVILSMDNSRNLDLDSIIAEVKAQYEEIAQRSKEEAEALYHSKYEELQVTVGRHGDSLKEIKIEISELNRVIQRLQGEIAHVKKQCKNVQDAIADAEQRGEHALKDARNKLNDLEEALQQAKEDLARLLRDYQELMNVKLALDVEIATYRKLLEGEECRMSGDLSSNVTVSVTSSTISSNVASKAAFGGSGGRGSSSGGGYSSGSSSYGSGGRQSGSRGGSGGGGSISGGGYGSGGGSGGRYGSGGGSKGGSISGGGYGSGGGKHSSGGGSRGGSSSGGGYGSGGGGSSSVKGSSGEAFGSSVTFSFR

SEQ ID NO: 1029439 - protein, 197 aa, Homo sapiens
MRAACSSLEEQLPSGTGQLCSESQTRRTDPYSSACTDRNRSIESQRRTTQPQHAPRPMITKRDQEVTPSDRKEQTNSTARTKRTTIHTENSTHHENNNRPRPHANTPMNKNPHSATITSSKQKRGRRGDEAQTPHNTTDREQPGERPETRATPAKPRAESTTHRAKQQHKQQPERHNSKQNEQHKKDHRTEATDTAK

SEQ ID NO: 1029440 - protein, 116 aa, Homo sapiens
MASVPSYPRPTYGIQDMPSWTRLTSHLAAPVHSAAVPTSLWVVGTIALLGFSVLGGAHLVLPLQLFPIVASHTWGHGRGYPWPLKGGPKPHLNPGNATNSNCPLDMADRLWSNWEE

SEQ ID NO: 1029441 - protein, 188 aa, Homo sapiens
MRAACSSLEEQLPSGTGQLCSAPSGPAPSPGPPSPPPLAANPHLPPVPSPPHYSSTPAAAGLPWAEWGAVLPLASVPSYPRPTYGIQDMPSWTRLTSHLAAPVHSAAVPTSLWVVGTIALLGFSVLGGAHLVLPLQLFPIVASHTWGHGRGYPWPLKGGPKPHLNPGNATNSNCPLDMADRLWSNWEE

SEQ ID NO: 1029442 - protein, 188 aa, Homo sapiens
MRAACSSLEEQLPSGTGQLCSAPSGPAPSPGPPSPPPLAANPHLPPVPSPPHYSSTPAAAGLPWAEWGAVLPLASVPSYPRHTYGIQDMPSWTRLTSHLAAPVHSAAVPTSLWVVGTIALLGFSVLGGAHLVLPLQLFPIVASHTWGHGRGYPWPLKGGPKPHLNPGNATNSNCPLDMADRLWSNWEE

SEQ ID NO: 1029443 - protein, 188 aa, Homo sapiens; identical to SEQ ID NO: 1029441

SEQ ID NO: 1029444 - protein, 170 aa, Homo sapiens
RGSRCLVWPYKGIVRGSGIKIWTYVLQWAIIQPITMGMIWKRKVTLMQKGEPKEGALGKAGGYNPEPEIFLPSFFIFYFFLRQSFALLPRLVSNSWAQAILLSQPPKVLGLQACPTMPRLIFTFNQTKIGLLLELLWLQLKESPCSHITRKHLLYAKNMVDLALQLLQIS

SEQ ID NO: 1029445 - protein, 559 aa, Homo sapiens
MRLHRLRARLSAVACGLLLLLVRGQGQDSASPIRTTHTGQVLGSLVHVKGANAGVQTFLGIPFAKPPLGPLRFAPPEPPESWSGVRDGTTHPAMCLQDLTAVESEFLSQFNMTFPSDSMSEDCLYLSIYTPAHSHEGSNLPVMVWIHGGALVFGMASLYDGSMLAALENVVVVIIQYRLGVLGFFSTGDKHATGNWGYLDQVAALRWVQQNIAHFGGNPDRVTIFGESAGGTSVSSLVVSPISQGLFHGAIMESGVALLPGLIASSADVISTVVANLSACDQVDSEALVGCLRGKSKEEILAINKPFKMIPGVVDGVFLPRHPQELLASADFQPVPSIVGVNNNEFGWLIPKVMRIYDTQKEMDREASQAALQKMLTLLMLPPTFGDLLREEYIGDNGDPQTLQAQFQEMMADSMFVIPALQVAHFQCSRAPVYFYEFQHQPSWLKNIRPPHMKADHGDELPFVFRSFFGGNYIKFTEEEEQLSRKMMKYWANFARNGNPNGEGLPHWPLFDQEEQYLQLNLQPAVGRALKAHRLQFWKKALPQKIQELEEPEERHTEL

SEQ ID NO: 1029446 - protein, 86 aa, Homo sapiens
QGAQVWHSGAPSDPHTALLGWHVYRNPNGEGLPHWPLFDQEEQYLQLNLQPAVGRALKAHRLQFWKKALPQKIQELEEPEERHTEL

SEQ ID NO: 1029447 - protein, 543 aa, Homo sapiens
MRLHRLRARLSAVACGLLLLLVRGQGQDSASPIRTTHTGQVLGSLVHVKGANAGVQTFLGIPFAKPPLGPLRFAPPEPPESWSGVRDGTTHPAMCLQDLTAVESEFLSQFNMTFPSDSMSEDCLYLSIYTPAHSHEGSNLPVMVWIHGGALVFGMASLYDGSMLAALENVVVVIIQYRLGVLGFFSTGDKHATGNWGYLDQVAALRWVQQNIAHFGGNPDRVTIFGESAGGTSVSSLVVSPISQGLFHGAIMESGVALLPGLIASSADVISTVVANLSACDQVDSEALVGCLRGKSKEEILAINKPFKMIPGVVDGVFLPRHPQELLASADFQPVPSIVGVNNNEFGWLIPKVMRIYDTQKEMDREASQAALQKMLTLLMLPPTFGDLLREEYIGDNGDPQTLQAQFQEMMADSMFVIPALQVAHFQCSRAPVYFYEFQHQPSWLKNIRPPHMKADHVKFTEEEEQLSRKMMKYWANFARNGNPNGEGLPHWPLFDQEEQYLQLNLQPAVGRALKAHRLQFWKKALPQKIQELEEPEERHTEL

SEQ ID NO: 1029448 - protein, 3210 aa, Homo sapiens
MSWALEEWKEGLPTRTLQKIQELEGQLDKLKKEKQQRQFQLDSLEAAPQKQTQKVENEKTEGTNLKRENQRLMEICESLEKTKQKISHELQVKESQVNFQEGQLNSGKKQIEKLEQELKRCKSELERSQQAAQSADVSLNPCNTPQKIFTTPLTPSQYYSGSKYEDLKEKYNKEVEERKRLEAEVKALQAKKASQTLPQATMNHRDIARHQASSSVFSWQQEKTPSHLSSNSQRTPIRRDFSASYFSGELEVTPSRSTLQIGKRDANSSFFGNSSSPHLLDQLKAQNQELRNKINELELRLQGHEKEMKGQVNKFQELQLQLEKAKVELIEKEKVLNKCRDELVRTTAQYDQASTKYTALEQKLKKLTEDLSCQRQNAESARCSLEQKIKEKEKEFQEELSRQQRSFQTLDQECIQMKARLTQELQQAKNMHNVLQAELDKLTSVKQQLENNLEEFKQKLCRAEQAFQASQIKENELRRSMEEMKKENNLLKSHSEQKAREVCHLEAELKNIKQCLNQSQNFAEEMKAKNTSQETMLRDLQEKINQQENSLTLEKLKLAVADLEKQRDCSQDLLKKREHHIEQLNDKLSKTEKESKALLSALELKKKEYEELKEEKTLFSCWKSENEKLLTQMESEKENLQSKINHLETCLKTQQIKSHEYNERVRTLEMDRENLSVEIRNLHNVLDSKSVEVETQKLAYMELQQKAEFSDQKHQKEIENMCLKTSQLTGQVEDLEHKLQLLSNEIMDKDRCYQDLHAEYESLRDLLKSKDASLVTNEDHQRSLLAFDQQPAMHHSFANIIGEQGSMPSERSECRLEADQSPKNSAILQNRVDSLEFSLESQKQMNSDLQKQCEELVQIKGEIEENLMKAEQMHQSFVAETSQRISKLQEDTSAHQNVVAETLSALENKEKELQLLNDKVETEQAEIQELKKSNHLLEDSLKELQLLSETLSLEKKEMSSIISLNKREIEELTQENGTLKEINASLNQEKMNLIQKSESFANYIDEREKSISELSDQYKQEKLILLQRCEETGNAYEDLSQKYKAAQEKNSKLECLLNECTSLCENRKNELEQLKEAFAKEHQEFLTKLAFAEERNQNLMLELETVQQALRSEMTDNQNNSKSEAGGLKQEIMTLKEEQNKMQKEVNDLLQENEQLMKVMKTKHECQNLESEPIRNSVKERESERNQCNFKPQMDLEVKEISLDSYNAQLVQLEAMLRNKELKLQESEKEKECLQHELQTIRGDLETSNLQDMQSQEISGLKDCEIDAEEKYISGPHELSTSQNDNAHLQCSLQTTMNKLNELEKICEILQAEKYELVTELNDSRSECITATRKMAEEVGKLLNEVKILNDDSGLLHGELVEDIPGGEFGEQPNEQHPVSLAPLDESNSYEHLTLSDKEVQMHFAELQEKFLSLQSEHKILHDQHCQMSSKMSELQTYVDSLKAENLVLSTNLRNFQGDLVKEMQLGLEEGLVPSLSSSCVPDSSSLSSLGDSSFYRALLEQTGDMSLLSNLEGAVSANQCSVDEVFCSSLQTYVDSLKAENLVLSTNLRNFQGDLVKEMQLGLEEGLVPSLSSSCVPDSSSLSSLGDSSFYRALLEQTGDMSLLSNLEGVVSANQCSVDEVFCSSLQEENLTRKETPSAPAKGVEELESLCEVYRQSLEKLEEKMESQGIMKNKEIQELEQLLSSERQELDCLRKQYLSENEQWQQKLTSVTLEMESKLAAEKKQTEQLSLELEVARLQLQGLDLSSRSLLGIDTEDAIQGRNESCDISKEHTSETTERTPKHDVHQICDKDAQQDLNLDIEKITETGAVKPTGECSGEQSPDTNYEPPGEDKTQGSSECISELSFSGPNALVPMDFLGNQEDIHNLQLRVKETSNENLRLLHVIEDRDRKVESLLNEMKELDSKLHLQEVQLMTKIEACIELEKIVGELKKENSDLSEKLEYFSCDHQELLQRVETSEGLNSDLEMHADKSSREDIGDNVAKVNDSWKERFLDVENELSRIRSEKASIEHEALYLEADLEVVQTEKLCLEKDNENKQKVIVCLEEELSVVTSERNQLRGELDTMSKKTTALDQLSEKMKEKTQELESHQSECLHCIQVAEAEVKEKTELLQTLSSDVSELLKDKTHLQEKLQSLEKDSQALSLTKCELENQIAQLNKEKELLVKESESLQARLSESDYEKLNVSKALEAALVEKGEFALRLSSTQEEVHQLRRGIEKLRVRIEADEKKQLHIAEKLKERERENDSLKDKVENLERELQMSEENQELVILDAENSKAEVETLKTQIEEMARSLKVFELDLVTLRSEKENLTKQIQEKQGQLSELDKLLSSFKSLLEEKEQAEIQIKEESKTAVEMLQNQLKELNEAVAALCGDQEIMKATEQSLDPPIEEEHQLRNSIEKLRARLEADEKKQLCVLQQLKESEHHADLLKGRVENLERELEIARTNQEHAALEAENSKGEVETLKAKIEGMTQSLRGLELDVVTIRSEKEDLTNELQKEQERISELEIINSSFENILQEKEQEKVQMKEKSSTAMEMLQTQLKELNERVAALHNDQEACKAKEQNLSSQVECLELEKAQLLQGLDEAKNNYIVLQSSVNGLIQEVEDGKQKLEKKDEEISRLKNQIQDQEQLVSKLSQVEGEHQLWKEQNLELRNLTVELEQKIQVLQSKNASLQDTLEVLQSSYKNLENELELTKMDKMSFVEKVNKMTAKETELQREMHEMAQKTAELQEELSGEKNRLAGELQLLLEEIKSSKDQLKELTLENSELKKSLDCMHKDQVEKEGKVREEIAEYQLRLHEAEKKHQALLLDTNKQYEVEIQTYREKLTSKEECLSSQKLEIDLLKSSKEELNNSLKATTQILEELKKTKMDNLKYVNQLKKENERAQGKMKLLIKSCKQLEEEKEILQKELSQLQAAQEKQKTGTVMDTKVDELTTEIKELKETLEEKTKEADEYLDKYCSLLISHEKLEKAKEMLETQVAHLCSQQSKQDSRGSPLLGPVVPGPSPIPSVTEKRLSSGQNKASGKRQRSSGIWENGGGPTPATPESFSKKSKKAVMSGIHPAEDTEGTEFEPEGLPEVVKKGFADIPTGKTSPYILRRTTMATRTSPRLAAQKLALSPLSLGKENLAESSKPTAGGSRSQKVKVAQRSPVDSGTILREPTTKSVPVNNLPERSPTDSPREGLRVKRGRLVPSPKAGLESKGSENCKVQ

SEQ ID NO: 1029449 - protein, 126 aa, Homo sapiens
MCNNDQESEFPEGVLCSSSKKLIPVSIHCHHILSEKNSTGGAEQPSKNWNLKDGADVLCGLVEVGKYDEMEEKLDMPPGIFTYLLVPTMNNRFKRYALKICPFFSQVLKIQVPVSGSYVFWGENFI

SEQ ID NO: 1029450 - protein, 1320 aa, Homo sapiens
QNYSPQYDSYDVKSGGVAVGGLAGYPGPAGPPGPPGPPGTSGHPGSPGSPGYQGPPGEPGQAGPSGPPGPPGAIGPSGPAGKDGESGRPGRPGDRGLPGPPGIKGPAGIPGFPGMKGHRGFDGRNGEKGETGAPGLKGENGFQAKMELLDPWVQEGLLVSEDGQDFLGLQVLGVMTVLEAVMVNQALLVLLELPDSLDPLVLRVKLDLQGLLVQMVPLDKEENLDLRDTLVLKVLLALLGLMVVLVVKAKWVPLAFLELLDCWEPGVLQDQPVLMVLLDCEVVQVSLVRMVPKESPDHVVNAVRLVFQVFQELKAKMARMDHLETLVQMGFQELQEKGAPWVPEDLLDQMASQGRKALLESAVLQALQAPEELLENLAEMASLEVQEMRGMPGSPGGPGSDGKPGPPGSQGESGRPGPPGPSGPRGQPGVMGFPGPKGNDGAPGKNGERGGPGGPGPQGPPGKNGEYGPQGPPGPTGPGGDKGDTGPRGPQGLQGLPGTGGPPGENGKPGEPGPKGEAGAPGAPGGKGDAGAPGERGPPGLAGAPGLRGGAGPPGPEGGKGAAGPPGPPGAAGTPGLQGMPGERGGLGSPGPKGDKGEPGGPGADGVPGKDGPRGPTGPIGPPGPAGQPGDKGEGGAPGLPGIAGPRGSPGERGETGPPGPAGFPGAPGQNGEPGGKGERGAPGEKGEGGPPGVAGPPGGSGPAGPPGPQGVKGERGSPGGPGAAGFPGARGLPGPPGSNGNPGPPGPSGSPGKDGPPGPAGNTGAPGSPGVSGPKGDAGQPGEKGSPGVPRAHQELQAHLGLLGSLEHGVLQDHQACQVLGEALALRVSRVKVGNQELTVSVENVVPLDPRVFLVWLVQLVNLEEMETLDQMVFQAEMDLLVARVIVVKMALLVPLALLVIQAHLVLSVQLERVVTEEKVALLALLVLPVLLVPEVLLVLKAHVVTKVKQVNVELLASKDIEDSLVIQVPQVLQALLVSRVQSAVQDLQAPEDLLDPVDLLAKMEPVDIQVPLDHQGLEVTEVKEDLRAPQATQGNQALLDLLVPLVLAVVVLEPLPLLGLEVKKLAVLPLIMEMNQWNFKINTDEIMTSLKSVNGQIESLISPDGSRKTPLETAEDLKFCHPELKSGEYWVDPNQGCKLDAIKVFCNMETGETCISANPLNVPRKHWWTDSSAEKKHVWFGESMDGGFQFSYGNPELPEDVLDVQLAFLRLLSSRASQNITYHCKNSIAYMDQASGNVKKALKLMGSNEGEFKAEGNSKFTYTVLEDGCTKHTGEWSKTVFEYRTRKAVRLPIVDIAPYDIGGPDQEFGVDVGPVCFL

SEQ ID NO: 1029451 - protein, 117 aa, Homo sapiens
LRSEKQIQNKQQHTWSLQTTYHCKNSIAYMDQASGNVKKALKLMGSNEGEFKAEGNSKFTYTVLEDGCTKHTGEWSKTVFEYRTRKAVRLPIVDIAPYDIGGPDQEFGVDVGPVCFL

SEQ ID NO: 1029452 - protein, 1320 aa, Homo sapiens; identical to SEQ ID NO: 1029450

SEQ ID NO: 1029453 - protein, 941 aa, Homo sapiens
QNYSPQYDSYDVKSGGVAVGGLAGYPGPAGPPGPPGPPGTSGHPGSPGSPGYQGPPGEPGQAGPSGPPGPPGAIGPSGPAGKDGESGRPGRPGDRGLPGPPGIKGPAGIPGFPGMKGHRGFDGRNGEKGETGAPGLKGENGFQAKMELLDPWVQEGLLVSEDGQDFLGLQVLGVMTVLEAVMVNQALLVLLELPDSLDPLVLRVKLDLQGLLVQMVPLDKEENLDLRDTLVLKVLLALLGLMVVLVVKAKWVPLAFLELLDCWEPGVLQDQPVLMVLLDCEVVQVSLVRMVPKESPDHVVNAVRLVFQVFQELKAKMARMDHLETLVQMGFQELQEKGAPWVPEDLLDQMASQGRKALLESAVLQALQAPEELLENLAEMASLEVQEMRGMPGSPGGPGSDGKPGPPGSQGESGRPGPPGPSGPRGQPGVMGFPGPKGNDGAPGKNGERGGPGGPGPQGPPGKNGEYGPQGPPGPTGPGGDKGDTGPRGPQGLQGLPGTGGPPGENGKPGEPGPKGEAGAPGAPGGKGDAGAPGERGPPGLAGAPGLRGGAGPPGPEGGKGAAGPPGPPGAAGTPGLQGMPGERGGLGSPGPKGDKGEPGGPGADGVPGKDGPRGPTGPIGPPGPAGQPGDKGEGGAPGLPGIAGPRGSPGERGETGPPGPAGFPGAPGQNGEPGGKGERGAPGEKGEGGPPGVAGPPGGSGPAGPPGPQGVKGERGSPGGPGAAGFPGARGLPGPPGSNGNPGPPGPSGSPGKDGPPGPAGNTGAPGSPGVSGPKGDAGQPGEKGSPGGWTDSSAEKKHVWFGESMDGGFQFSYGNPELPEDVLDVQLAFLRLLSSRASQNITYHCKNSIAYMDQASGNVKKALKLMGSNEGEFKAEGNSKFTYTVLEDGCTKHTGEWSKTVFEYRTRKAVRLPIVDIAPYDIGGPDQEFGVDVGPVCFL

SEQ ID NO: 1029454 - protein, 1320 aa, Homo sapiens; identical to SEQ ID NO: 1029450

SEQ ID NO: 1029455 - protein, 589 aa, Homo sapiens
MEPATAPRPDMAPELTPEEEQATKQFLEEINKWTVQYNVSPLSWNVAVKFLMARKFDVLRAIELFHSYRETRRKEGIVKLKPHEEPLRSEILSGKFTILNVRDPTGASIALFTARLHHPHKSVQHVVLQALFYLLDRAVDSFETQRNGLVFIYDMCGSNYANFELDLGKKVLNLLKGAFPARLKKVLIVGAPIWFRVPYSIISLLLKDKVRERIQILKTSEVTQHLPRECLPENLGGYVKIDLATWNFQFLPQVNGHPDPFDEIILFSLPPALDWDSVHVPGPHAMTIQELVDYVNARQKQGIYEEYEDIRRENPVGTFHCSMSPGNLEKNRYGDVPCLDQTRVKLTKRSGHTQTDYINASFMDGYKQKNAYIGTQGPLENTYRDFWLMVWEQKVLVIVMTTRFEEGGRRKCGQYWPLEKDSRIRFGFLTVTNLGVENMNHYKKTTLEIHNTEERQKRQVTHFQFLSWPDYGVPSSAASLIDFLRVVRNQQSLAVSNMGARSKGQCPEPPIVVHCSAGIGRTGTFCSLDICLAQLEELGTLNVFQTVSRMRTHPGVRREGGHGILWPKPAGRGESVTLLRTSYLLASLP

SEQ ID NO: 1029456 - protein, 583 aa, Homo sapiens
MAPELTPEEEQATKQFLEEINKWTVQYNVSPLSWNVAVKFLMARKFDVLRAIELFHSYRETRRKEGIVKLKPHEEPLRSEILSGKFTILNVRDPTGASIALFTARLHHPHKSVQHVVLQALFYLLDRAVDSFETQRNGLVFIYDMCGSNYANFELDLGKKVLNLLKGAFPARLKKVLIVGAPIWFRVPYSIISLLLKDKVRERIQILKTSEVTQHLPRECLPENLGGYVKIDLATWNFQFLPQVNGHPDPFDEIILFSLPPALDWDSVHVPGPHAMTIQELVDYVNARQKQGIYEEYEDIRRENPVGTFHCSMSPGNLEKNRYGDVPCLDQTRVKLTKRSGHTQTDYINASFMDGYKQKNAYIGTQGPLENTYRDFWLMVWEQKVLVIVMTTRFEEGGRRKCGQYWPLEKDSRIRFGFLTVTNLGVENMNHYKKTTLEIHNTEERQKRQVTHFQFLSWPDYGVPSSAASLIDFLRVVRNQQSLAVSNMGARSKGQCPEPPIVVHCSAGIGRTGTFCSLDICLAQLEELGTLNVFQTVSRMRTQRAFSIQTPEQYYFCYKAILEFAEKEGMVSSGQNLLAVESQ

SEQ ID NO: 1029457 - protein, 593 aa, Homo sapiens
MEPATAPRPDMAPELTPEEEQATKQFLEEINKWTVQYNVSPLSWNVAVKFLMARKFDVLRAIELFHSYRETRRKEGIVKLKPHEEPLRSEILSGKFTILNVRDPTGASIALFTARLHHPHKSVQHVVLQALFYLLDRAVDSFETQRNGLVFIYDMCGSNYANFELDLGKKVLNLLKGAFPARLKKVLIVGAPIWFRVPYSIISLLLKDKVRERIQILKTSEVTQHLPRECLPENLGGYVKIDLATWNFQFLPQVNGHPDPFDEIILFSLPPALDWDSVHVPGPHAMTIQELVDYVNARQKQGIYEEYEDIRRENPVGTFHCSMSPGNLEKNRYGDVPCLDQTRVKLTKRSGHTQTDYINASFMDGYKQKNAYIGTQGPLENTYRDFWLMVWEQKVLVIVMTTRFEEGGRRKCGQYWPLEKDSRIRFGFLTVTNLGVENMNHYKKTTLEIHNTEERQKRQVTHFQFLSWPDYGVPSSAASLIDFLRVVRNQQSLAVSNMGARSKGQCPEPPIVVHCSAGIGRTGTFCSLDICLAQLEELGTLNVFQTVSRMRTQRAFSIQTPEQYYFCYKAILEFAEKEGMVSSGQNLLAVESQ

SEQ ID NO: 1029458 - protein, 593 aa, Homo sapiens; identical to SEQ ID NO: 1029457

SEQ ID NO: 1029459 - protein, 135 aa, Homo sapiens
MEPATAPRPDMAPELTPEEEQVSGPEAAALGVSGPPRPTPASASRVPALCSHGAAAPRSRARLAGLPHRRPRPRPPPPRRGTHGTLLPFPPLLSPRLTSLRRCPPHPTPYSRGKVPWIQGPSSRDLQNRCLPPAL

SEQ ID NO: 1029460 - protein, 543 aa, Homo sapiens
MEPATAPRPDMAPELTPEEEQATKQFLEEINKWTVQYNVSPLSWNVAVKFLMARKFDVLRAIELFHSYRETRRKEGIVKLKPHEEPLRSEILSGKFTILNVRDPTGASIALFTARLHHPHKSVQHVVLQALFYLLDRAVDSFETQRNGLVFIYDMCGSNYANFELDLGKKVLNLLKGAFPARLKKVLIVGAPIWFRVPYSIISLLLKDKVRERIQILKTSEVTQHLPRECLPENLGGYVKIDLATWNFQFLPQVNGHPDPFDEIILFSLPPALDWDSVHVPGPHAMTIQELVDYVNARQKQGIYEEYEDIRRENPVGTFHCSMSPGNLEKNRYGDVPCLDQTRVKLTKRSGHTQTDYINASFMDGYKQKNAYIGTQGPLENTYRDFWLMVWEQKSLGDCHDHPERQKRQVTHFQFLSWPDYGVPSSAASLIDFLRVVRNQQSLAVSNMGARSKGQCPEPPIVVHCSAGIGRTGTFCSLDICLAQLEELGTLNVFQTVSRMRTQRAFSIQTPEQYYFCYKAILEFAEKEGMVSSGQNLLAVESQ

SEQ ID NO: 1029461 - protein, 227 aa, Homo sapiens
MHRDDIAAWGYIRSLGKPGYCCGEERWKAYLALCVFSFEEGGRRKCGQYWPLEKDSRIRFGFLTVTNLGVENMNHYKKTTLEIHNTEERQKRQVTHFQFLSWPDYGVPSSAASLIDFLRVVRNQQSLAVSNMGARSKGQCPEPPIVVHCSAGIGRTGTFCSLDICLAQLEELGTLNVFQTVSRMRTQRAFSIQTPEQYYFCYKAILEFAEKEGMVSSGQNLLAVESQ

SEQ ID NO: 1029462 - protein, 479 aa, Homo sapiens
MEPATAPRPDMAPELTPEEEQATKQFLEEINKWTVQYNVSPLSWNVAVKFLMARKFDVLRAIELFHSYRETRRKEGIVKLKPHEEPLRSEILSGKFTILNVRDPTGASIALFTARLHHPHKSVQHVVLQALFYLLDRAVDSFETQRNGLVFIYDMCGSNYANFELDLGKKVLNLLKGAFPARLKKVLIVGAPIWFRVPYSIISLLLKDKVRERIQILKTSEVTQHLPRECLPENLGGYVKIDLATWNFQFLPQVNGHPDPFDEIILFSLPPALDWDSVHVPGPHAMTIQELVDYVNARQKQGIYEEYEDIRRENPVGTFHCSMSPGNLEKNRYGDVPCLDQTRVKLTKRSGHTQTDYINASFMDGYKQKNAYIGTQGPLENTYRDFWLMVWEQKVLVIVMTTRFEEGGRRKCGQYWPLEKDSRIRFGFLTVTNLGVENMNHYKKTTLEIHNTEVNPGFFFLTLLKQGENNYCNENLQRE

SEQ ID NO: 1029463 - protein, 193 aa, Homo sapiens
MEPATAPRPDMAPELTPEEEQATKQFLEEINKWTVQYNVSPLSWNVAVKFLMARKFDVLRAIELFHSYRETRRKEGIVKLKPHEEPLRSEILSGKFTILNVRDPTGASIALFTARLHHPHKSVQHVVLQALFYLLDRAVDRKISRVWWREPEAGEWREPGRWSLPGAKIAPLYSSLGDRLRFCLQRSIHSRRT

SEQ ID NO: 1029464 - protein, 593 aa, Homo sapiens; identical to SEQ ID NO: 1029457

SEQ ID NO: 1029465 - protein, 593 aa, Homo sapiens; identical to SEQ ID NO: 1029457

SEQ ID NO: 1029466 - protein, 583 aa, Homo sapiens; identical to SEQ ID NO: 1029456

SEQ ID NO: 1029467 - protein, 593 aa, Homo sapiens; identical to SEQ ID NO: 1029457

SEQ ID NO: 1029468 - protein, 251 aa, Homo sapiens
MEPATAPRPDMAPELTPEEEQATKQFLEEINKWTVQYNVSPLSWNVAVKFLMARKFDVLRAIELFHSYRETRRKEGIVKLKPHEEPLRSEILSGKFTILNVRDPTGASIALFTARLHHPHKSVQHVVLQALFYLLDRAVDSFETQRNGLVFIYDMCGSNYANFELDLGKKVLNLLKLPSSSTDLEKPQHSSMENIQHLEQTSPKASSLKCDKLLSSFPSKMQQFISGPKCPRSFYQQIKNHSRKTPVISTK

SEQ ID NO: 1029469 - protein, 144 aa, Homo sapiens
SPNSTAWPLSLEPECLPHLHQEKYTPSPSTPADTTRQRERALDSSRDSPPGNTRSLPREERRRTRATRGHSQGPREAMATPEATFCSTEVGENLGTMGPPGQCRTTSAHWQDNISSLAGKSLLRVRGCWGTRGLGKQGNKSSVC

SEQ ID NO: 1029470 - protein, 304 aa, Homo sapiens
MSLMVIIMACVGFFLLQGAWPQEGVHRKPSFLALPGHLVKSEETVILQCWSDVMFEHFLLHREGKFNNTLHLIGEHHDGVSKANFSIGPMMPVLTGTYRCYSSVPHSPYQLSAPSDPLDMVIIGLYEKPSLSAQPGPTVQAGENVSLSCSSRSSYDMYHLSREGEAHERRLPAVRSIHGTFQADFPLGPATHGGTYRCFGSFRDAPYEWSNSSDPLLVSVTGNPSNSWPSPTEPSSKTGNPRHLHVLIGTSVVKIPFTILLFFLLHRWCSDKKNAAVMDQEPAGNRTVNSEDSDEQDHQEVSYA

SEQ ID NO: 1029471 - protein, 267 aa, Homo sapiens
MSLMVIIMACVGFFLLQGAWPQEGVHRKPSFLALPGHLVKSEETVILQCWSDVMFEHFLLHREGKFNDTLHLIGEHHDGVSKANFSIGPMMPVLAGTYRCYGSVPHSPYQLSAPRSSYDMYHLSREGEAHERRLPAVRSINGTFQADFPLGPATHGGTYRCFGSFRDSPYEWSNSSDPLLVSVTGNPSNSWPSPTEPSSKTGNPRHLHVLIGTSVVKIPFTILLFFLLHRWCSDKKNAAVMDQEPAGNRTVNSEDSDEQDHQEVSYA

SEQ ID NO: 1029472 - protein, 105 aa, Homo sapiens
MSLMVIIMACVGFFLLQGAWPQEGVHRKPSFLALPGHLVKSEETVILQCWSDVMFEHFLLHREGKFNNTLHLIGEHHDGVSKANFSIGPMMPVLARDLQMLRLFP

SEQ ID NO: 1029473 - protein, 272 aa, Homo sapiens
MSLMVIIMACVGFFLLQGAWPQEGVHRKPSFLALPGHLVKSEETVILQCWSDVMFEHFLLHREGTYRCYGSVPHSPYQLSAPSDPLDMVIIGLYEKPSLSAQPGPTVQAGENVTLSCSSRSSYDMYHLSREGEAHERRLPAVRSINGTFQADFPLGPATHGGTYRCFGSFRDSPYEWSNSSDPLLVSVTGNPSNSWPSPTEPSSKTGNPRHLHVLIGTSVVKIPFTILLFFLLHRWCSDKKNAAVMDQEPAGNRTVNSEDSDEQDHQEVSYA

SEQ ID NO: 1029474 - protein, 150 aa, Homo sapiens
MSLMVIIMACVGFFLLQGAWPQEGVHRKPSFLALPGHLVKSEETVILQCWSDVMFEHFLLHREGKFNNTLHLIGEHHDGVSKANFSIGPMMPVLAGTYRCYGSVPHSPYQLSAPSDPLDMVIIGQRNIPGRLSSGPCHPRRDLQMLRLFP

SEQ ID NO: 1029475 - protein, 98 aa, Homo sapiens
MNQTAILICCLIFLTLSGIQGVPLSRTVRCTCISISNQPVNPRSLEKLEIIPASQFCPRVEIIATMKKKGEKRCLNPESKAIKNLLKAVSKEMSKRSP

SEQ ID NO: 1029476 - protein, 399 aa, Homo sapiens
MKGLQRSQILPTEEYEEAMSTMQVSQLDLFRLLDQNRDGHLQLREVLAQTRLGNGWWMTPESIQEMYAAIKADPDGDGVLSLQEFSNMDLRDFHKYMRSHKAESSELVRNSHHTWLYQGEGAHHIMRAIRQRVLRLTRLSPEIVELSEPLQVVRYGEGGHYHAHVDSGPVYPETICSHTKLVANESVPFETSCRQVSPNWGLPSILRPGTPMTQAQPCTVGVPLGMGPGDHWVIPVSPWEHPQLGTCSVPPLPYSYMTVLFYLNNVTGGGETVFPVADNRTYDEMSLIQDDVDLRDTRRHCDKGNLRVKPQQGTAVFWYNYLPDGQGWVGDVDDYSLHGGCLVTRGTKWIANNWINVDPSRARQALFQQEMARLAREGGTDSQPEWALDRAYRDARVEL

SEQ ID NO: 1029477 - protein, 646 aa, Homo sapiens
  misc_feature (1)..(1): Xaa can be any naturally occurring amino acid
XQAGTGPKSYDHPRSWSTKMQTILFPEARGRLHAGTEKLPLVYALMVPLLSASTLGTLASDLESVQLCPTATQLGKRSPSVGWGSRRRKAEPGADAGGSGRAQHPQAPSPSDRGARGPGGRCPGDCAARAPPRPLPWARARPGCHGGSGGDRPAAETAAAEEASRPQWAPPDHCQAQAAAGLGDGEDAPVRPLCKPRGICSRAYFLVLMVFVHLYLGNVLALLLFVHYSNGDESSDPGPQHRAQGPGPEPTLGPLTRLEGIKVGHERKVQLVTDRDHFIRTLSLKPLLFEIPGFLTDEECRLIIHLAQMKGLQRSQILPTEEYEEAMSTMQVSQLDLFRLLDQNRDGHLQLREVLAQTRLGNGWWMTPESIQEMYAAIKADPDGDGVLSLQEFSNMDLRDFHKYMRSHKAESSELVRNSHHTWLYQGEGAHHIMRAIRQRVLRLTRLSPEIVELSEPLQVVRYGEGGHYHAHVDSGPVYPETICSHTKLVANESVPFETSCRYMTVLFYLNNVTGGGETVFPVADNRTYDEMSLIQDDVDLRDTRRHCDKGNLRVKPQQGTAVFWYNYLPDGQGWVGDVDDYSLHGGCLVTRGTKWIANNWINVDPSRARQALFQQEMARLAREGGTDSQPEWALDRAYRDARVEL

SEQ ID NO: 1029478 - protein, 646 aa, Homo sapiens; identical to SEQ ID NO: 1029477
  misc_feature (1)..(1): Xaa can be any naturally occurring amino acid

SEQ ID NO: 1029479 - protein, 567 aa, Homo sapiens
  misc_feature (1)..(1): Xaa can be any naturally occurring amino acid
XQAGTGPKSYDHPRSWSTKMQTILFPEARGRLHAGTEKLPLVYALMVPLLSASTLGTLASDLESVQLCPTATQLGKRSPSVGWGSRRRKAEPGADAGGSGRAQHPQAPSPSDRGARGPGGRCPGDCAARAPPRPLPWARARPGCHGGSGGDRPAAETAAAEEASRPQWAPPDHCQAQAAAGLGDGEDAPVRPLCKPRGICSRAYFLVLMVFVHLYLGNVLALLLFVHYSNGDESSDPGPQHRAQGPGPEPTLGPLTRLEGIKVGHERKVQLVTDRDHFIRTLSLKPLLFEIPGFLTDEECRLIIHLAQMKGLQRSQILPTEEYEEAMSTMQVSQLDLFRLLDQNRDGHLQLREVLAQTRLGNGWWMTPESIQEMYAAIKADPDGDGVLSLQEFSNMDLRDFHKYMRSHKAESSELVRNSHHTWLYQGEGAHHIMRAIRQRVLRLTRLSPEIVELSEPLQVVRYGEGGHYHAHVDSGPVYPETICSHTKLVANESVPFETSCRQVSPNWGLPSILRPGTPMTQAQPCTVGVPLGMGPGDHWVIPVSDALTSPHKLFTQWLERGGYWSS

SEQ ID NO: 1029480 - protein, 440 aa, Homo sapiens
  misc_feature (1)..(1): Xaa can be any naturally occurring amino acid
XQAGTGPKSYDHPRSWSTKMQTILFPEARGRLHAGTEKLPLVYALMVPLLSASTLGTLASDLESVQLCPTATQLGKRSPSVGWGSRRRKAEPGADAGGSGRAQHPQAPSPSDRGARGPGGRCPGDCAARAPPRPLPWARARPGCHGGSGGDRPAAETAAAEEASRPQWAPPDHCQAQAAAGLGDGEDAPVRPLCKPRGICSRAYFLVLMVFVHLYLGNVLALLLFVHYSNGDESSDPGPQHRAQGPGPEPTLGPLTRLEGIKVGHERKVQLVTDRDHFIRTLSLKPLLFEIPGFLTDEECRLIIHLAQMKGLQRSQILPTEEYEEAMSTMQVSQLDLFRLLDQNRDGHLQLREVLAQTRLGNGWWMTPESIQEMYAAIKADPDGDGVLSLQEFSNMDLRDFHKYMRSHKAESSELVRNSHHTWLYQGEGAHHIMRAIRQR

SEQ ID NO: 1029481 - protein, 567 aa, Homo sapiens; identical to SEQ ID NO: 1029479
  misc_feature (1)..(1): Xaa can be any naturally occurring amino acid

SEQ ID NO: 1029482 - protein, 567 aa, Homo sapiens; identical to SEQ ID NO: 1029479
  misc_feature (1)..(1): Xaa can be any naturally occurring amino acid

SEQ ID NO: 1029483 - protein, 646 aa, Homo sapiens; identical to SEQ ID NO: 1029477
  misc_feature (1)..(1): Xaa can be any naturally occurring amino acid

SEQ ID NO: 1029484 - protein, 721 aa, Homo sapiens
  misc_feature (1)..(1): Xaa can be any naturally occurring amino acid
XQAGTGPKSYDHPRSWSTKMQTILFPEARGRLHAGTEKLPLVYALMVPLLSASTLGTLASDLESVQLCPTATQLGKRSPSVGWGSRRRKAEPGADAGGSGRAQHPQAPSPSDRGARGPGGRCPGDCAARAPPRPLPWARARPGCHGGSGGDRPAAETAAAEEASRPQWAPPDHCQAQAAAGLGDGEDAPVRPLCKPRGICSRAYFLVLMVFVHLYLGNVLALLLFVHYSNGDESSDPGPQHRAQGPGPEPTLGPLTRLEGIKVRTSLPRQRLQGPARLSPRGPALSPGPHAAPGAALRRSRALPLTRLLSLSGPGRLGPSWQRGLAPQLPAVRLFLEVGHERKVQLVTDRDHFIRTLSLKPLLFEIPGFLTDEECRLIIHLAQMKGLQRSQILPTEEYEEAMSTMQVSQLDLFRLLDQNRDGHLQLREVLAQTRLGNGWWMTPESIQEMYAAIKADPDGDGVLSLQEFSNMDLRDFHKYMRSHKAESSELVRNSHHTWLYQGEGAHHIMRAIRQRVLRLTRLSPEIVELSEPLQVVRYGEGGHYHAHVDSGPVYPETICSHTKLVANESVPFETSCRYMTVLFYLNNVTGGGETVFPVADNRTYDEMSLIQDDVDLRDTRRHCDKGNLRVKPQQGTAVFWYNYLPDGQGWVGDVDDYSLHGGCLVTRGTKWIANNWINVDPSRARQALFQQEMARLAREGGTDSQPEWALDRAYRDARVEL

SEQ ID NO: 1029485 - protein, 600 aa, Homo sapiens
  misc_feature (1)..(1): Xaa can be any naturally occurring amino acid
XQAGTGPKSYDHPRSWSTKMQTILFPEARGRLHAGTEKLPLVYALMVPLLSASTLGTLASDLESVQLCPTATQLGKRSPSVGWGSRRRKAEPGADAGGSGRAQHPQAPSPSDRGARGPGGRCPGDCAARAPPRPLPWARARPGCHGGSGGDRPAAETAAAEEASRPQWAPPDHCQAQAAAGLGDGEDAPVRPLCKPRGICSRAYFLVLMVFVHLYLGNVLALLLFVHYSNGDESSDPGPQHRAQGPGPEPTLGPLTRLEGIKVGHERKVQLVTDRDHFIRTLSLKPLLFEIPGFLTDEECRLIIHLAQMKGLQRSQILPTEEYEEAMSTMQVSQLDLFRLLDQNRDGHLQLREVLAQTRLGNGWWMTPESIQEMYAAIKADPDGDGVLSLQEFSNMDLRDFHKYMRSHKAESSELVRNSHHTWLYQGEGAHHIMRAIRQRVLRLTRLSPEIVELSEPLQVVRYGEGGHYHAHVDSGPVYPETICSHTKLVANESVPFETSCRYMTVLFYLNNVTGGGETVFPVADNRTYDEMSLIQDDVDLRDTRRHCDKGNLRVKPQQGTAVFWYNYLPDGQGWVGDVDDYSQPEWALDRAYRDARVEL

SEQ ID NO: 1029486 - protein, 251 aa, Homo sapiens
MDLRDFHKYMRSHKAESSELVRNSHHTWLYQGEGAHHIMRAIRQRVLRLTRLSPEIVELSEPLQVVRYGEGGHYHAHVDSGPVYPETICSHTKLVANESVPFETSCRYMTVLFYLNNVTGGGETVFPVADNRTYDEMSLIQDDVDLRDTRRHCDKGNLRVKPQQGTAVFWYNYLPDGQGWVGDVDDYSLHGGCLVTRGTKWIANNWINVDPSRARQALFQQEMARLAREGGTDSQPEWALDRAYRDARVEL

SEQ ID NO: 1029487 - protein, 459 aa, Homo sapiens
  misc_feature (1)..(1): Xaa can be any naturally occurring amino acid
XQAGTGPKSYDHPRSWSTKMQTILFPEARGRLHAGTEKLPLVYALMVPLLSASTLGTLASDLESVQLCPTATQLGKRSPSVGWGSRRRKAEPGADAGGSGRAQHPQAPSPSDRGARGPGGRCPGDCAARAPPRPLPWARARPGCHGGSGGDRPAAETAAAEEASRPQWAPPDHCQAQAAAGLGDGEDAPVRPLCKPRGICSRAYFLVLMVFVHLYLGNVLALLLFVHYSNGDESSDPGPQHRAQGPGPEPTLGPLTRLEGIKVRTSLPRQRLQGPARLSPRGPALSPGPHAAPGAALRRSRALPLTRLLSLSGPGRLGPSWQRGLAPQLPAVRLFLRWGTSVRSSWSPTGITSSEPSASSRCSSVSPPDTPGKGQGLRFGGHLEARCDHVTSIVEMAASEQPFQRNTKVKDLPRPRNRVTLPLIPTPCSPFFHHRAGRVSLRLVSKRFIAPVFRATWPP

SEQ ID NO: 1029488 - protein, 105 aa, Homo sapiens [sequence omitted]

SEQ ID NO: 1029489 - protein, 646 aa, Homo sapiens; identical to SEQ ID NO: 1029477
  misc_feature (1)..(1): Xaa can be any naturally occurring amino acid

SEQ ID NO: 1029490 - protein, 646 aa, Homo sapiens; identical to SEQ ID NO: 1029477
  misc_feature (1)..(1): Xaa can be any naturally occurring amino acid

SEQ ID NO: 1029491 - protein, 338 aa, Homo sapiens
MKGLQRSQILPTEEYEEAMSTMQVSQLDLFRLLDQNRDGHLQLREVLAQTRLGNGWWMTPESIQEMYAAIKADPDGDGVLSLQEFSNMDLRDFHKYMRSHKAESSELVRNSHHTWLYQGEGAHHIMRAIRQRVLRLTRLSPEIVELSEPLQVVRYGEGGHYHAHVDSGPVYPETICSHTKLVANESVPFETSCRYMTVLFYLNNVTGGGETVFPVADNRTYDEMSLIQDDVDLRDTRRHCDKGNLRVKPQQGTAVFWYNYLPDGQGWVGDVDDYSLHGGCLVTRGTKWIANNWINVDPSRARQALFQQEMARLAREGGTDSQPEWALDRAYRDARVEL

SEQ ID NO: 1029492 - protein, 567 aa, Homo sapiens; identical to SEQ ID NO: 1029479
  misc_feature (1)..(1): Xaa can be any naturally occurring amino acid

SEQ ID NO: 1029493 - protein, 310 aa, Homo sapiens
  misc_feature (1)..(1): Xaa can be any naturally occurring amino acid
XQAGTGPKSYDHPRSWSTKMQTILFPEARGRLHAGTEKLPLVYALMVPLLSASTLGTLASDLESVQLCPTATQLGKRSPSVGWGSRRRKAEPGADAGGSGRAQHPQAPSPSDRGARGPGGRCPGDCAARAPPRPLPWARARPGCHGGSGGDRPAAETAAAEEASRPQWAPPDHCQAQAAAGLGDGEDAPVRPLCKPRGICSRAYFLVLMVFVHLYLGNVLALLLFVHYSNGDESSDPGPQHRAQGPGPEPTLGPLTRLEGIKVGHERKVQLVTDRDHFIRTLSLKPLLFASPVSPAATAPAPSLPSVPWP

SEQ ID NO: 1029494 - protein, 359 aa, Homo sapiens
MAAVSGLVRRPLREVSGLLKRRFHWTAPAALQVTVRDAINQGMDEELERDEKVFLLGEEVAQYDGAYKVSRGLWKKYGDKRIIDTPISEMGFAGIAVGAAMAGLRPICEFMTFNFSMQAIDQVINSAAKTYYMSGGLQPVPIVFRGPNGASAGVAAQHSQCFAAWYGHCPGLKVVSPWNSEDAKGLIKSAIRDNNPVVVLENELMYGVPFEFPPEAQSKDFLIPIGKAKIERQGTHITVVSHSRPVGHCLEAAAVLSKEGVECEVINMRTIRPMDMETIEASVMKTNHLVTVEGGWPQFGVGAEICARIMEGPAFNFLDAPAVRVTGADVPMPYAKILEDNSIPQVKDIIFAIKKTLNI

SEQ ID NO: 1029495 - protein, 341 aa, Homo sapiens
MAAVSGLVRRPLREVTVRDAINQGMDEELERDEKVFLLGEEVAQYDGAYKVSRGLWKKYGDKRIIDTPISEMGFAGIAVGAAMAGLRPICEFMTFNFSMQAIDQVINSAAKTYYMSGGLQPVPIVFRGPNGASAGVAAQHSQCFAAWYGHCPGLKVVSPWNSEDAKGLIKSAIRDNNPVVVLENELMYGVPFEFPPEAQSKDFLIPIGKAKIERQGTHITVVSHSRPVGHCLEAAAVLSKEGVECEVINMRTIRPMDMETIEASVMKTNHLVTVEGGWPQFGVGAEICARIMEGPAFNFLDAPAVRVTGADVPMPYAKILEDNSIPQVKDIIFAIKKTLNI

SEQ ID NO: 1029496 - protein, 359 aa, Homo sapiens; identical to SEQ ID NO: 1029494

SEQ ID NO: 1029497 - protein, 418 aa, Homo sapiens
AAPGRGPRPTHTPPLAPPRGPFTRWAGGRVIAMRAPCHWPAPVEAGLLTSAGPSVVVWQRIEDTTKMAAVSGLVRRPLREVSGLLKRRFHWTAPAALQVTVRDAINQGMDEELERDEKVFLLGEEVAQYDGAYKVSRGLWKKYGDKRIIDTPISEMGFAGIAVGAAMAGLRPICEFMTFNFSMQAIDQVINSAAKTYYMSGGLQPVPIVFRGPNGASAGVAAQHSQCFAAWYGHCPGLKVVSPWNSEDAKGLIKSAIRDNNPVVVLENELMYGVPFEFPPEAQSKDFLIPIGKAKIERQGTHITVVSHSRPVGHCLEAAAVLSKEGVECEVINMRTIRPMDMETIEASVMKTNHLVTVEGGWPQFGVGAEICARIMEGISKKLVLEYSQAIVNIMYLNTYRIKRLKARSGQTTSTLNL

SEQ ID NO: 1029498 - protein, 317 aa, Homo sapiens
AAPGRGPRPTHTPPLAPPRGPFTRWAGGRVIAMRAPCHWPAPVEAGLLTSAGPSVVVWQRIEDTTKMAAVSGLVRRPLREVSGLLKRRFHWTAPAALQVTVRDAINQGMDEELERDEKVFLLGEEVAQYDGAYKVSRGLWKKYGDKRIIDTPISEMGFAGIAVGAAMAGLRPICEFMTFNFSMQAIDQVINSAAKTYYMSGGLQPVPIVFRGPNGASAGVAAQHSQCFAAWYGHCPGLKVVSPWNSEDAKGLIKSAIRDNNPVVVLENELMYGVPFEFPPEAQSKDFLIPIGKAKIERQGRLPHSSAHWNEVELKTL

SEQ ID NO: 1029499 - protein, 249 aa, Homo sapiens [sequence omitted]

SEQ ID NO: 1029500 - protein, 352 aa, Homo sapiens
AAPGRGPRPTHTPPLAPPRGPFTRWAGGRVIAMRAPCHWPAPVEAGLLTSAGPSVVVWQRIEDTTKMAAVSGLVRRPLREVSGLLKRRFHWTAPAALQVTVRDAINQGMDEELERDEKVFLLGEEVAQYDGAYKVSRGLWKKYGDKRIIDTPISEMGFAGIAVGAAMAGLRPICEFMTFNFSMQAIDQVINSAAKTYYMSGGLQPVPIVFRGPNGASAGVAAQHSQCFAAWYGHCPGLKVVSPWNSEDAKGLIKSAIRDNNPVVVLENELMYGVPFEFPPEAQSKDFLIPIGKAKIEGRTLYWGPSKRGRLTRAQKGRGGNPPDTAARPAHTPGAHGTHRKSTARRGHKHTK

SEQ ID NO: 1029501 - protein, 434 aa, Homo sapiens
AAPGRGPRPTHTPPLAPPRGPFTRWAGGRVIAMRAPCHWPAPVEAGLLTSAGPSVVVWQRIEDTTKMAAVSGLVRRPLREVSGLLKRRFHWTAPAALQVTVRDAINQGMDEELERDEKVFLLGEEVAQYDGAYKVSRGLWKKYGDKRIIDTPISEMGFAGIAVGAAMAGLRPICEFMTFNFSMQAIDQVINSAAKTYYMSGGLQPVPIVFRGPNGASAGVAAQHSQCFAAWYGHCPGLKVVSPWNSEDAKGLIKSAIRDNNPVVVLENELMYGVPFEFPPEAQSKDFLIPIGKAKIERQGTHITVVSHSRPVGHCLEAAAVLSKEGVECEVINMRTIRPMDMETIEASVMKTNHLVTVEGGWPQFGVGAEICARIMEGISKKLVLEYSQAIVNIMYLNTYRIKRLKARSGQTTSTLNLSCVQFPGCSCCSCHWC

SEQ ID NO: 1029502 - protein, 453 aa, Homo sapiens
AAPGRGPRPTHTPPLAPPRGPFTRWAGGRVIAMRAPCHWPAPVEAGLLTSAGPSVSRLAADRGHDQDGGGVWLGAETPSGGRQQRAACIPTRPLPTLRPAVIFLSPCQVSGLLKRRFHWTAPAALQVTVRDAINQGMDEELERDEKVFLLGEEVAQYDGAYKVSRGLWKKYGDKRIIDTPISEMGFAGIAVGAAMAGLRPICEFMTFNFSMQAIDQVINSAAKTYYMSGGLQPVPIVFRGPNGASAGVAAQHSQCFAAWYGHCPGLKVVSPWNSEDAKGLIKSAIRDNNPVVVLENELMYGVPFEFPPEAQSKDFLIPIGKAKIERQGTHITVVSHSRPVGHCLEAAAVLSKEGVECEVINMRTIRPMDMETIEASVMKTNHLVTVEGGWPQFGVGAEICARIMEGPAFNFLDAPAVRVTGADVPMPYAKILEDNSIPQVKDIIFAIKKTLNI

SEQ ID NO: 1029503 - protein, 306 aa, Homo sapiens
GSVNNPLVSISETRGLLTLPSVAWEGEFIVLFCISEMGFAGIAVGAAMAGLRPICEFMTFNFSMQAIDQVINSAAKTYYMSGGLQPVPIVFRGPNGASAGVAAQHSQCFAAWYGHCPGLKVVSPWNSEDAKGLIKSAIRDNNPVVVLENELMYGVPFEFPPEAQSKDFLIPIGKAKIERQGTHITVVSHSRPVGHCLEAAAVLSKEGVECEVINMRTIRPMDMETIEASVMKTNHLVTVEGGWPQFGVGAEICARIMEGPAFNFLDAPAVRVTGADVPMPYAKILEDNSIPQVKDIIFAIKKTLNI

SEQ ID NO: 1029504 - protein, 226 aa, Homo sapiens
  misc_feature (4)..(4): Xaa can be any naturally occurring amino acid
VNYXKFDKKQAVTVRIPGCSVAAQHSQCFAAWYGHCPGLKVVSPWNSEDAKGLIKSAIRDNNPVVVLENELMYGVPFEFPPEAQSKDFLIPIGKAKIERQGTHITVVSHSRPVGHCLEAAAVLSKEGVECEVINMRTIRPMDMETIEASVMKTNHLVTVEGGWPQFGVGAEICARIMEGPAFNFLDAPAVRVTGADVPMPYAKILEDNSIPQVKDIIFAIKKTLNI

SEQ ID NO: 1029505 - protein, 155 aa, Homo sapiens [sequence omitted]

SEQ ID NO: 1029506 - protein, 359 aa, Homo sapiens; identical to SEQ ID NO: 1029494

SEQ ID NO: 1029507 - protein, 359 aa, Homo sapiens; identical to SEQ ID NO: 1029494

SEQ ID NO: 1029508 - protein, 453 aa, Homo sapiens; identical to SEQ ID NO: 1029502

SEQ ID NO: 1029509 - protein, 317 aa, Homo sapiens
MDEELERDEKVFLLGEEVAQYDGAYKVSRGLWKKYGDKRIIDTPISEMGFAGIAVGAAMAGLRPICEFMTFNFSMQAIDQVINSAAKTYYMSGGLQPVPIVFRGPNGASAGVAAQHSQCFAAWYGHCPGLKVVSPWNSEDAKGLIKSAIRDNNPVVVLENELMYGVPFEFPPEAQSKDFLIPIGKAKIERQGTHITVVSHSRPVGHCLEAAAVLSKEGVECEVINMRTIRPMDMETIEASVMKTNHLVTVEGGWPQFGVGAEICARIMEGPAFNFLDAPAVRVTGADVPMPYAKILEDNSIPQVKDIIFAIKKTLNI

SEQ ID NO: 1029510 - protein, 156 aa, Homo sapiens
MLYGVPFEFPPEAQSKDFLIPIGKAKIERQGTHITVVSHSRPVGHCLEAAAVLSKEGVECEVINMRTIRPMDMETIEASVMKTNHLVTVEGGWPQFGVGAEICARIMEGPAFNFLDAPAVRVTGADVPMPYAKILEDNSIPQVKDIIFAIKKTLNI

SEQ ID NO: 1029511 - protein, 489 aa, Homo sapiens
MEKCDENILWLDYKNICKVVEVGSKIYVDDGLISLQVKQKGADFLVTEVENGGSLGSKKGVNLPGAAVDLPAVSEKDIQDLKFGVEQDVDMVFASFIRKASDVHEVRKVLGEKGKNIKIISKIENHEGVRRFDEILEASDGIMVARGDLGIEIPAEKVFLAQKMMIGRCNRAGKPVICATQMLESMIKKPRPTRAEGSDVANAVLDGADCIMLSGETAKGDYPLEAVRMQHLIAREAEAAIYHLQLFEELRRWRPLPGPHRSHRRGCRGGSFKCCSGAIIVLTKSGRSAHQVARYRPSAPIIAVTLGIPDSIRSCGPPVPVGIFPVLGAHGPMSRMCLWLEDVDLRVNFCHECLAMPEASSSKGDVRHMCLTWMCALGSRISPSSHAVYVPCACNWTPKMSPPSYDLEPEQTLTGHNPQGATNDGSKPGGRRTEAQESKARRRRRRDRTAQDRKTRRENQERHHGQARQEESEYDHNRRRSECTEQSER

SEQ ID NO: 1029512 - protein, 520 aa, Homo sapiens
REYFLKEEISSLGFKGRIGVCLVKITLDNAYMEKCDENILWLDYKNICKVVEVGSKIYVDDGLISLQVKQKGADFLVTEVENGGSLGSKKGVNLPGAAVDLPAVSEKDIQDLKFGVEQDVDMVFASFIRKASDVHEVRKVLGEKGKNIKIISKIENHEGVRRFDEILEASDGIMVARGDLGIEIPAEKVFLAQKMMIGRCNRAGKPVICATQMLESMIKKPRPTRAEGSDVANAVLDGADCIMLSGETAKGDYPLEAVRMQHLIAREAEAAIYHLQLFEELRRWRPLPGPHRSHRRGCRGGSFKCCSGAIIVLTKSGRSAHQVARYRPSAPIIAVTLGSPDSIRSCGPPVPVGIFPVLGAHGPMSRMCLWLEDVDLRVNFCHECLAMPEASSSKGDVRHMCLTWMCALGSRISPSSHAVYVPCACNWTPKMSPPSYDLEPEQTLTGHNPQGATNDGSKPGGRRTEAQESKARRRRRRDRTAQDRKTRRENQERHHGQARQEESEYDHNRRRSECTEQSER

SEQ ID NO: 1029513 - protein, 488 aa, Homo sapiens
MEKCDENILWLDYKNICKVVEVGSKIYVDDGLISLQVKQKGADFLVTEVENGGSLGSKKGVNLPGAAVDLPAVSEKDIQDLKFGVEQDVDMVFASFIRKASDVHEVRKVLGEKGKNIKIISKIENHEGVRRFDEILEASDGIMVARGDLGIEIPAEKVFLAQKMMIGRCNRAGKPVICATQMLESMIKKPRPTRAEGSDVANAVLDGADCIMLSGETAKGDYPLEAVRMQHLIAREAEAAIYHLQLFEELRRWRPLPGPHRSHRRGCRGGSFKCCSGAIIVLTKSGRSAHQVARYRPSAPIIAVTLGIPDSIRHVAHLYRGIFPVLGAHGPMSRMCLWLEDVDLRVNFCHECLAMPEASSSKGDVRHMCLTWMCALGSRISPSSHAVYVPCACNWTPKMSPPSYDLEPEQTLTGHNPQGATNDGSKPGGRRTEAQESKARRRRRRDRTAQDRKTRRENQERHHGQARQEESEYDHNRRRSECTEQSER

SEQ ID NO: 1029514 - protein, 503 aa, Homo sapiens
MVEKHKTELESLKHQQDALWTEKLQVLKQQYQTEMEKLREKCEQEKETLLKDKEIIFQAHIEEMNEKTLEKLDVKQTELESLSSELSEVLKARHKLEEELSVLKDQTDKMKQELEAKMDEQKNHHQQQVDSIIKEHEVSIQRTEKALKDQINQLELLLKERDKHLKEHQAHVENLEADIKRSEGELQQASAKLDVFQSYQSATHEQTKAYEEQLAQLQQKLLDLETERILLTKQVAEVEAQKKDVCTELDAHKIQVQDLMQQLEKQNSEMEQKVKSLTQVYESKLEDGNKEQEQTKQILVEKENMILQMREGQKKEIEILTQKLSAKEDSIHILNEEYETKFKNQEKKMEKVKQKAKEMQETLKKKLLDQEAKLKKELENTALELSQKEKQFNAKMLEMAQANSAGISDAVSRLETKQKEQIESLTEVHRRELNDVISIWEKKLNQQAEELQEIHEIQLQEKEQEVAELKQKILLFGCEKEEMNKEITWLEGKNVLSRIPPLT

SEQ ID NO: 1029515 - protein, 954 aa, Homo sapiens
RSELVTAYQMLQREKKKLQGILSQSQDKSLRRIAELREELQMDQQAKKHLQEEFDASLEEKDQYISVLQTQVSLLKQRLRNGPMNVDVLKPLPQLEPQAEVFTKEENPESDGEPVVEDGTSVKTLETLQQRVKRQENLLKRCKETIQSHKEQCTLLTSEKEALQEQLDERLQELEKIKDLHMAEKTKLITQLRDAKNLIEQLEQDKGMVIAETKRQMHETLEMKEEEIAQLRSRIKQMTTQGEELREQKEKSERAAFEELEKALSTAQKTEEARRKLKAEMDEQIKTIEKTSEEERISLQQELSRVKQEVVDVMKKSSEEQIAKLQKLHEKELARKEQELTKKLQTREREFQEQMKVALEKSQSEYLKISQEKEQQESLALEELELQKKAILTESENKLRDLQQEAETYRTRILELESSLEKSLQENKNQSKDLAVHLEAEKNKHNKEITVMVEKHKTELESLKHQQDALWTEKLQVLKQQYQTEMEKLREKCEQEKETLLKDKEIIFQAHIEEMNEKTLEKLDVKQTELESLSSELSEVLKARHKLEEELSVLKDQTDKMKQELEAKMDEQKNHHQQQVDSIIKEHEVSIQRTEKALKDQINQLELLLKERDKHLKEHQAHVENLEADIKRSEGELQQASAKLDVFQSYQSATHEQTKAYEEQLAQLQQKLLDLETERILLTKQVAEVEAQKKDVCTELDAHKIQVQDLMQQLEKQNSEMEQKVKSLTQVYESKLEDGNKEQEQTKQILVEKENMILQMREGQKKEIEILTQKLSAKEDSIHILNEEYETKFKNQEKKMEKVKQKAKEMQETLKKKLLDQEAKLKKELENTALELSQKEKQFNAKMLEMAQANSAGISDAVSRLETKQKEQIESLTEVHRRELNDVISIWEKKLNQQAEELQEIHEIQLQEKEQEVAELKQKILLFGCEKEEMNKEITWLEGKNVLSRIPPLT

SEQ ID NO: 1029516 - protein, 154 aa, Homo sapiens
SSGAATAPHPLKMFSCSKFVSTSLLGQEHLTAAEAVRYLAVVLKRPEILTDESLSSLAVSCPLTSLVYSRSFQTSAISRDIDTAAKFIGAGAATVGVAGSGAGIGTVFGSLIIGYARNPSLKQQLFSYAILGFALSEAMGLFCLMVAFLILFAM

SEQ ID NO: 1029517 - protein, 112 aa, Homo sapiens
MRVQIGKSDIRFDALILVPLIPSLVYSRSFQTSAISRDIDTAAKFIGAGAATVGVAGSGAGIGTVFGSLIIGYARNPSLKQQLFSYAILGFALSEAMGLFCLMVAFLILFAM

SEQ ID NO: 1029518 - protein, 178 aa, Homo sapiens
MLSALGMLAAGGAGLAVALHSAVSASDLELHPPSYPWSHRGLLSSLDHTSIRRGFQVYKQVCASCHSMDFVAYRHLVGVCYTEDEAKELAAEVEVQDGPNEDGEMFMRPGKLFDYFPKPYPNSEAARAANNGALPPDLSYIVRARALVVRTTSSPCSTGYCEATHRGCHCGEGLYFNP

SEQ ID NO: 1029519 - protein, 325 aa, Homo sapiens
MAAAAASLRGVVLGPRGAGLPGARARGLLCSARPGQLPLRTPQAVALSSKSGLSRGRKVMLSALGMLAAGGAGLAVALHSAVSASDLELHPPSYPWSHRGLLSSLDHTSIRRGFQVYKQVCASCHSMDFVAYRHLVGVCYTEDEAKELAAEVEVQDGPNEDGEMFMRPGKLFDYFPKPYPNSEAARAANNGALPPDLSYIVRARHGGEDYVFSLLTGYCEPPTGVSLREGLYFNPYFPGQAIAMAPPIYTDVLEFDDGTPATMSQIAKDVCTFLRWASEPEHDHRKRMGLKMLMMMALLVPLVYTIKRHKWSVLKSRKLAYRPPK

SEQ ID NO: 1029520 - protein, 188 aa, Homo sapiens
CVPGLPGKCNGEEIVDHNAVQRHWPVGTSDISVLMHDLELHPPSYPWSHRGLLSSLDHTSIRRGFQVYKQVCASCHSMDFVAYRHLVGVCYTEDEAKELAAEVEVQDGPNEDGEMFMRPGKLFDYFPKPYPNSEAARAANNGALPPDLSYIVRARALVVRTTSSPCSTGYCEATHRGCHCGEGLYFNP

SEQ ID NO: 1029521 - protein, 107 aa, Homo sapiens
GGFDSRGSPRADGSGGRAEEAKMAAAAASLRGVVLGPRGGGAPGRACPGSAVQRAARAAPATDTSGSGLVVEVWPFPRPESDAVSAGHAGGRGCGAGRGSAFGCECQ

SEQ ID NO: 1029522 - protein, 97 aa, Homo sapiens
GALRIPPSDGYARPVRMPNEDGEMFMRPGKLFDYFPKPYPNSEAARAANNGALPPDLSYIVRARALVVRTTSSPCSTGYCEATHRGCHCGEGLYFNP

SEQ ID NO: 1029523 - protein, 107 aa, Homo sapiens; identical to SEQ ID NO: 1029521

SEQ ID NO: 1029524 - protein, 265 aa, Homo sapiens
MLSALGMLAAGGAGLAVALHSAVSASDLELHPPSYPWSHRGLLSSLDHTSIRRGFQVYKQVCASCHSMDFVAYRHLVGVCYTEDEAKELAAEVEVQDGPNEDGEMFMRPGKLFDYFPKPYPNSEAARAANNGALPPDLSYIVRARYTGCPWGGAGEMGEGLTCAVELRSHGSGPEGIGGEDYVFSLLNGLLRSHPPGLSLRGRSLLQPLTFLAQAIAMAPPIYTDVLEFDDGTPATMSQIAKDVCTFLRWASEPEHDHRKRMGLR

SEQ ID NO: 1029525 - protein, 184 aa, Homo sapiens
MGAVPTPQKVAGPILSTPKREGAWSSGENWVGKTSPGGTTKKLSALGRQEAPTRRSMGGAPNFADEEAPSHGVFVSIEGEDPPSAGLVTLVLNDCREGTIGSLRGREDVDEHSRNDQTAGSKKRPQRPVLFPLVPQVLRERPDSGDSVTQWGKMAGLCRKKVGVHRVPPGSPQGCGHHKVGPED

SEQ ID NO: 1029526 - protein, 178 aa, Homo sapiens; identical to SEQ ID NO: 1029518

SEQ ID NO: 1029527 - protein, 178 aa, Homo sapiens; identical to SEQ ID NO: 1029518

SEQ ID NO: 1029528 - protein, 111 aa, Homo sapiens
MDFVAYRHLVGVCYTEDEAKELAAEVEVQDGPNEDGEMFMRPGKLFDYFPKPYPNSEAARAANNGALPPDLSYIVRARALVVRTTSSPCSTGYCEATHRGCHCGEGLYFNP

SEQ ID NO: 1029529 - protein, 163 aa, Homo sapiens
MLSALGMLAAGGAGLAVALHSAVSASDLELHPPSYPWSHRGLLSSLDHTSIRRGFQVYKQVCASCHSMDFVAYRHLVGVCYTEDEADGEMFMRPGKLFDYFPKPYPNSEAARAANNGALPPDLSYIVRARALVVRTTSSPCSTGYCEATHRGCHCGEGLYFNP

SEQ ID NO: 1029530 - protein, 299 aa, Homo sapiens
MLSALGMLAAGGAGLAVALHSAVSASDLELHPPSYPWSHRGLLSSLDHTSIRRGFQVYKQVCASCHSMDFVAYRHLVGVCYTEDEAKELAAEVEVQDGPNEDGEMFMRPGKLFDYFPKPYPNSEAARAANNGALPPDLSYIVRARYTGCPWGGAGEMGEGLTCAVELRSHGSGPEGIGGEDYVFSLLNGLLRSHPPGLSLRGRSLLQPLTFLAQAIAMAPPIYTDVLEFDDGTPATMSQIAKDVCTFLRWASEPEHDHRKRMGLKMLMMMALLVPLVYTIKRHKWSVLKSRKLAYRPPK

SEQ ID NO: 1029531 - protein, 268 aa, Homo sapiens
  misc_feature (168)..(168): Xaa can be any naturally occurring amino acid
  misc_feature (183)..(183): Xaa can be any naturally occurring amino acid
  misc_feature (185)..(186): Xaa can be any naturally occurring amino acid
MLSALGMLAAGGAGLAVALHSAVSASDLELHPPSYPWSHRGLLSSLDHTSIRRGFQVYKQVCASCHSMDFVAYRHLVGVCYTEDEAKELAAEVEVQDGPNEDGEMFMRPGKLFDYFPKPYPNSEAARAANNGALPPDLSYIVRARALVVRTTSSPCSTGYCEATHLFXISLIFYFNPYFFFFXFXXMAPPIYTDVLEFDDGTPATMSQIAKDVCTFLRWASEPEHDHRKRMGLKMLMMMALLVPLVYTIKRHKWSVLKSRKLAYRPPK

SEQ ID NO: 1029532 - protein, 110 aa, Homo sapiens
MLSALGMLAAGGAGLAVALHSAVSASDLELHPPSYPWSHRGLLSSLDHTSIRRGFQVYKQVCASCHSMDFVAYRHLVGVCYTEDEAKELAAEVEVQDGPNEWPLPSTQMS

SEQ ID NO: 1029533 - protein, 113 aa, Homo sapiens
MLSALGMLAAGGAGLAVALHSAVSASDRGCLHTPPAYPVVSPRGLLSSLDHTSIRRGFQVYKQVCASCHSMDFVAYRHLVGVCYTEDEAKELAAEVEVQDGPNEWPLPSTQMS

SEQ ID NO: 1029534 - protein, 103 aa, Homo sapiens
MLSALGMLAAGGAGLAVALHSAVSASDLELHPPSYPWSHRGLLSSLDHTSIRRGFQVYKQVCASCHSMDFVAYRHLVGVCYTEDEAYRKLGFRKVGGKKPAPN

SEQ ID NO: 1029535 - protein, 325 aa, Homo sapiens; identical to SEQ ID NO: 1029519

SEQ ID NO: 1029536 - protein, 325 aa, Homo sapiens; identical to SEQ ID NO: 1029519

SEQ ID NO: 1029537 - protein, 325 aa, Homo sapiens; identical to SEQ ID NO: 1029519

SEQ ID NO: 1029538 - protein, 178 aa, Homo sapiens; identical to SEQ ID NO: 1029518

SEQ ID NO: 1029539 - protein, 178 aa, Homo sapiens; identical to SEQ ID NO: 1029518

SEQ ID NO: 1029540 - protein, 107 aa, Homo sapiens; identical to SEQ ID NO: 1029521

SEQ ID NO: 1029541 - protein, 83 aa, Homo sapiens
LEFDDGRGHGNGLARKLFDYFPKPYPNSEAARAANNGALPPDLSYIVRARALVVRTTSSPCSTGYCEATHRGCHCGEGLYFNP

SEQ ID NO: 1029542 - protein, 331 aa, Homo sapiens
MLSALGMLAAGGAGLAVALHSAVSASDLELHPPSYPWSHRGLLSSLDHTSIRRGFQVYKQVCASCHSMDFVAYRHLVGVCYTEDEAKELAAEVEVQDGPNEDGEMFMRPGKLFDYFPKPYPNSEAARAANNGALPPDLSYIVRARYTGCPWGGAGEMGEGLTCAVELRSHGSGPEGIGGEDYVFSLLNGLLRSHPPGLSLRGRSLLQPLTFLAQAIAMAPPIYTDVLEFDDGTPATMSQIAKDVCTFLRWASEPEHDHRKRMGLKVKGLGGHGGYQRRAGSWAGLLPTPFSEPSLLQMLMMMALLVPLVYTIKRHKWSVLKSRKLAYRPPK

SEQ ID NO: 1029543 - protein, 131 aa, Homo sapiens
MLSALGMLAAGGAGLAVALHSAVSASDLELHPPSYPWSHRGLLSSLDHTSIRRGFQVYKQVCASCHSMDFVAYRHLVGVCYTEDEAKELAAEVEVQDGPNEDGEMFMRPGKLFDYFPKPYQKLAGRGGGCL

SEQ ID NO: 1029544 - protein, 171 aa, Homo sapiens
ARALTKAQLGLELEELEAAALLVQEEETALKAAHSVSGQQTLCSSSEASDSEDSDSSVSSGNEDSGSDSEQDELKDSPSETVSSLQGPFLEESSAFLIVDGGVRRNTAIQESDASQGKPLASSWPLGVSGPLIEELGEQLKTTVQVSEPKGTTAVNRSNIQERDGCQTPNN

SEQ ID NO: 1029545 - protein, 171 aa, Homo sapiens; identical to SEQ ID NO: 1029544

SEQ ID NO: 1029546 - protein, 356 aa, Homo sapiens
MAAPRVFPLSCAVQQYAWGKMGSNSEVARLLASSDPLAQIAEDKPYAELWMGTHPRGDAKILDNRISQKTLSQWIAENQDSLGSKVKDTFNGNLPFLFKVLSVETPLSIQAHPNKELAEKLHLQAPQHYPDANHKPEMAIALTPFQGLCGFRPVEEIVTFLKKVPEFQFLIGDEAATHLKQTMSHDSQAVASSLQSCFSHLMKSEKKVVVEQLNLLVKRISQQAAAGNNMEDIFGELLLQLHQQYPGDIGCFAIYFLNLLTLKPGEAMFLEANVPHAYLKGDCVECMACSDNTVRAGLTPKFIDVPTLCEMLSYTPSSSKDRLFLPTRSQEDPYLSIYDPPVPDFTIMKTEVSEGL

SEQ ID NO: 1029547 - protein, 287 aa, Homo sapiens
MAAPRVFPLSCAVQQYAWGKMGSNSEVARLLASSDPLAQIAEDKPYAELWMGTHPRGDAKILDNRISQKTLSQWIAENQDSLGSKVKDTFNGNLPFLFKVLSVETPLSIQAHPNKELAEKLHLQAPQHYPDANHKPEMAIALTPFQGLCGFRPVEEIVTFLKKVPEFQFLIGDEAATHLKQTMSHDSQAVASSLQSCFSHLMKSEKKVVVEQLNLLVKRISQQAAAGNNMEDIFGELLLQLHQQYPGDIGCFAIYFLNLLTLKPGEAMFLEANVPHAYLKGGPWLCH

SEQ ID NO: 1029548 - protein, 423 aa, Homo sapiens
MAAPRVFPLSCAVQQYAWGKMGSNSEVARLLASSDPLAQIAEDKPYAELWMGTHPRGDAKILDNRISQKTLSQWIAENQDSLGSKVKDTFNGNLPFLFKVLSVETPLSIQAHPNKELAEKLHLQAPQHYPDANHKPEMAIALTPFQGLCGFRPVEEIVTFLKKVPEFQFLIGDEAATHLKQTMSHDSQAVASSLQSCFSHLMKSEKKVVVEQLNLLVKRISQQAAAGNNMEDIFGELLLQLHQQYPGDIGCFAIYFLNLLTLKPGEAMFLEANVPHAYLKGDCVECMACSDNTVRAGLTPKFIDVPTLCEMLSYTPSSSKDRLFLPTRSQEDPYLSIYDPPVPDFTIMKTEVPGSVTEYKVLALDSASILLMVQGTVIASTPTTQTPIPLQRGGVLFIGANESVSLKLTEPKDLLIFRACCLL

SEQ ID NO: 1029549 - protein, 423 aa, Homo sapiens; identical to SEQ ID NO: 1029548

SEQ ID NO: 1029550 - protein, 403 aa, Homo sapiens
MGSNSEVARLLASSDPLAQIAEDKPYAELWMGTHPRGDAKILDNRISQKTLSQWIAENQDSLGSKVKDTFNGNLPFLFKVLSVETPLSIQAHPNKELAEKLHLQAPQHYPDANHKPEMAIALTPFQGLCGFRPVEEIVTFLKKVPEFQFLIGDEAATHLKQTMSHDSQAVASSLQSCFSHLMKSEKKVVVEQLNLLVKRISQQAAAGNNMEDIFGELLLQLHQQYPGDIGCFAIYFLNLLTLKPGEAMFLEANVPHAYLKGDCVECMACSDNTVRAGLTPKFIDVPTLCEMLSYTPSSSKDRLFLPTRSQEDPYLSIYDPPVPDFTIMKTEVPGSVTEYKVLALDSASILLMVQGTVIASTPTTQTPIPLQRGGVLFIGANESVSLKLTEPKDLLIFRACCLL

SEQ ID NO: 1029551 - protein, 339 aa, Homo sapiens
MAAPRVFPLSCAVQQYAWGKMGSNSEVARLLASSDPLAQIAEDKPYAELWMGTHPRGDAKILDNRISQKTLSQWIAENQDSLGSKVKDTFNGNLPFLFKVLSVETPLSIQAHPNKELAEKLHLQAPQHYPDANHKPEMAIALTPFQGLCGFRPVEEIVTFLKKVPEFQFLIGDEAATHLKQTMSHDSQAVASSLQSCFSHLMKSEKKVVVEQLNLLVKRISQQAAAGNNMEDIFGELLLQLHQQYPGDIGCFAIYFLNLLTLKPGEAMFLEANVPHAYLKGGEPHFSSEPHCHPCWALFPYLDKGRRRVVKETPKDLAALTSEGSWAQQATAGRDDECI

SEQ ID NO: 1029552 - protein, 241 aa, Homo sapiens
MSHDSQAVASSLQSCFSHLMKSEKKVVVEQLNLLVKRISQQAAAGNNMEDIFGELLLQLHQQYPGDIGCFAIYFLNLLTLKPGEAMFLEANVPHAYLKGDCVECMACSDNTVRAGLTPKFIDVPTLCEMLSYTPSSSKDRLFLPTRSQEDPYLSIYDPPVPDFTIMKTEVPGSVTEYKVLALDSASILLMVQGTVIASTPTTQTPIPLQRGGVLFIGANESVSLKLTEPKDLLIFRACCLL

SEQ ID NO: 1029553 - protein, 126 aa, Homo sapiens
MGSNSEVARLLASSDPLAQIAEDKPYAELWMGTHPRGDAKILDNRISQKTLSQWIAENQDSLGSKVKDTFNGNLPFLFKVLSVETPLSIQAHPHPPDGTGDSDSQHTHNPDTNPSATWWRALHWGQ

SEQ ID NO: 1029554 - protein, 119 aa, Homo sapiens
MGSNSEVARLLASSDPLAQIAEDKPYAELWMGTHPRGDAKILDNRISQKTLSQWIAENQDSLGSKVKDTFNGNLPFLFKVLSVETPLSIQAHPAHPQPRHQSLCNVVACSSLGPMRVSH

SEQ ID NO: 1029555 - protein, 110 aa, Homo sapiens [sequence omitted]

SEQ ID NO: 1029556 - protein, 403 aa, Homo sapiens; identical to SEQ ID NO: 1029550

SEQ ID NO: 1029557 - protein, 362 aa, Homo sapiens
MAAPRVFPLSCAVQQYAWGKMGSNSEVARLLASSDPLAQIAEDKPYAELWMGTHPRGDAKILDNRISQKTLSQWIAENQDSLGSKVKDTFNGNLPFLFKVLSVETPLSIQAHPNKELAEKLHLQAPQHYPDANHKPEMAIALTPFQGLCGFRPVEEIVTFLKTAAGNNMEDIFGELLLQLHQQYPGDIGCFAIYFLNLLTLKPGEAMFLEANVPHAYLKGDCVECMACSDNTVRAGLTPKFIDVPTLCEMLSYTPSSSKDRLFLPTRSQEDPYLSIYDPPVPDFTIMKTEVPGSVTEYKVLALDSASILLMVQGTVIASTPTTQTPIPLQRGGVLFIGANESVSLKLTEPKDLLIFRACCLL

SEQ ID NO: 1029558 - protein, 148 aa, Homo sapiens [sequence omitted]

SEQ ID NO: 1029559 - protein, 126 aa, Homo sapiens; identical to SEQ ID NO: 1029553

SEQ ID NO: 1029560 - protein, 423 aa, Homo sapiens; identical to SEQ ID NO: 1029548

SEQ ID NO: 1029561 - protein, 264 aa, Homo sapiens
  misc_feature (234)..(234): Xaa can be any naturally occurring amino acid
  misc_feature (245)..(245): Xaa can be any naturally occurring amino acid
  misc_feature (262)..(262): Xaa can be any naturally occurring amino acid
PLFWCEMGPEGGEGTRKLLSLQPQSAPRFRRVPLLGLGILRCLGAGEAGASSLLLGCRFEIALSPLTRPVLASGCPSFCLLFFLPSVCFLSLGMSISLFPILAVSVCFPLAAFPTWLCPSASVFLCLFVSRSLPPHLSISLCLSLLMPLFVSVFISVSPQPHSPALFLFSGLLPLGTEAAQQGAPETPRGTAGGPHPGSPPHARQLRAVWIFPLAAVGRGGAPGKGRHRAQHLXREPRGPWTPLXPFIKGAGSRGTEMIMIXSV

SEQ ID NO: 1029562 - protein, 396 aa, Homo sapiens
MELDHRTSGGLHAYPGPRGGQVAKPNVILQIGKCRAEMLEHVRRTHRHLLAEVSKQVERELKGLHRSVGKLESNLDGYVPTSDSQRWKKSIKACLCRCQETIANLERWVKREMHVWREVFYRLERWADRLESTGGKYPVGSESARHTVSVGVGGPESYCHEADGYDYTVSPYAITPPPAAGELPGQEPAEAQQYQPWVPGEDGQPSPGVDTQIFEDPREFLSHLEEYLRQVGGSEEYWLSQIQNHMNGPAKKWWEFKQGSVKNWVEFKKEFLQYSEGTLSREAIQRELDLPQKQGEPLDQFLWRKRDLYQTLYVDADEEEIIQYVVGTLQPKLKRFLRHPLPKTLEQLIQRGMEVQDDLEQAAEPAGPHLPVEDEAETLTPAPNSESVASDRTQPE

SEQ ID NO: 1029563 - protein, 76 aa, Homo sapiens
STDLTQRQMDRHSRTSDREPLLTQEENKKIRQQQQQSRPDVPVLPGPSAPVIHARLEKNQSSAHDSPMAGGGSQRG

SEQ ID NO: 1029564 - protein, 464 aa, Homo sapiens
IRARGSSLRSSRAGPASPGVLRRPRRRPAATDRRSPQLRTGPRPPDPSAGPPSVRPEEFAACRSTCAQMELDHRTSGGLHAYPGPRGGQVAKPNVILQIGKCRAEMLEHVRRTHRHLLAEVSKQVERELKGLHRSVGKLESNLDGYVPTSDSQRWKKSIKACLCRCQETIANLERWVKREMHVWREVFYRLERWADRLESTGGKYPVGSESARHTVSVGVGGPESYCHEADGYDYTVSPYAITPPPAAGELPGQEPAEAQQYQPWVPGEDGQPSPGVDTQIFEDPREFLSHLEEYLRQVGGSEEYWLSQIQNHMNGPAKKWWEFKQGSVKNWVEFKKEFLQYSEGTLSREAIQRELDLPQKQGEPLDQFLWRKRDLYQTLYVDADEEEIIQYVVGTLQPKLKRFLRHPLPKTLEQLIQRGMEVQDDLEQAAEPAGPHLPVEDEAETLTPAPNSESVASDRTQPE

SEQ ID NO: 1029565 - protein, 396 aa, Homo sapiens; identical to SEQ ID NO: 1029562

SEQ ID NO: 1029566 - protein, 348 aa, Homo sapiens
  misc_feature (4)..(5): Xaa can be any naturally occurring amino acid
MRDXXLFARQEGPLYVLLSRSWTRRARPRSSEHEIAKTEGLEMADHMMAMNHGTTSPDAHAYGLHRYTLTHRHGDIGAVSRAPITDLAVSSPSNAFNALMGEHIHYGAGNMNATSGIRHAMGAGDCATGGHPSERAGPRGHVSLTPSSVGPRWPAMGRLPAGQHAAAEAQQGSISTITPTPTNQYMPECAPCLQGQQMNGTNQHFRDCKPKHSGGTSTPGGSVRTKSNTRRLWHQLERRPRSQPATASCRQPSTQTNIARPHEAPKYHDANADAPHVHRHCMTSTDGKVIIPTAIPTGLGPTQGSQTDTRVATNRDDTHDGTPRANRTPSRRHHCTDQTPEQRHHPHQ

SEQ ID NO: 1029567 - protein, 74 aa, Homo sapiens
  misc_feature (71)..(71): Xaa can be any naturally occurring amino acid
QQPRTPILLIRDKPATARPNADGRLIWSHRWPPSPPPVTGSKLATRHLGARSMASRAENQTAPGEVPALSXPAV

SEQ ID NO: 1029568 - protein, 256 aa, Homo sapiens
LSSIGVELVDNELAILYMNSKKSEAEFRDYPPVLRQAVSLARRIQDPLIEFAQVCSSDEDILCLKFHPLQEHVVKEELLNALYCEFINRVNEVGVDVNRAIAHPYSQALIQYVCGLGPRKGTHLLKILKQNNTRLESRTQLVTMCHMGPKVLHEWSWAFLKIDNGTPWGTATDSYIEVLDMVPVSTLKTYEWDRKMAVDALENECNQSEDGNPAGALGRNLGETRATERLGLDAWEKKLERRYGDKHSLLTREKGA

SEQ ID NO: 1029569 - protein, 291 aa, Homo sapiens
LRICSYGSDWESQKLNRSQEKRSQRSRENDLNQNGFGFPLDVVAKGIFKALHDPRLTQAEFRDYPPVLRQAVSLARRIQDPLIEFAQVCSSDEDILCLKFHPLQEHVVKEELLNALYCEFINRVNEVGVDVNRAIAHPYSQALIQYVCGLGPRKGTHLLKILKQNNTRLESRTQLVTMCHMGPKVLHEWCWAFLKIDNGSPWGTATDSYIEVLDMVPVSNLKTYEWDRKMAVDALEIRVQISPRMAILQEPLEEILVKPELTERLGLDAWEKKLERRYGDKHSLLTREKGA

SEQ ID NO: 1029570 - protein, 303 aa, Homo sapiens
MKKDALTLSLSEQVAAALKPAAAPPPTPLRADGAPSAAPPDGLLASPDLGLLKLASPELERLIIQSNGLVTTTPTSSQFLYPKVAASEEQEFAEGFVKALEDLHKQNQLGAGAAAAAAAAAAGGPSGTATGSAPPGELAPAAAAPEAPVYANLSSYAGGAGGAGGAATVAFAAEPVPFPPPPPPGALGPPRLAALKDEPQTVPDVPSFGESPPLSPIDMDTQERIKAERKRLRNRIAASKCRKRKLERISRLEEKVKTLKSQNTELASTASLLREQVAQLKQKVLSHVNSGCQLLPQHQVPAY

SEQ ID NO: 1029571 - protein, 70 aa, Homo sapiens
  misc_feature (4)..(4): Xaa can be any naturally occurring amino acid
  misc_feature (22)..(22): Xaa can be any naturally occurring amino acid
  misc_feature (40)..(40): Xaa can be any naturally occurring amino acid
  misc_feature (55)..(55): Xaa can be any naturally occurring amino acid
PRHXPSSASTCVSKTGLQIPQXPAPPKIYFPIRESWNAGXMTVMSALSVAPSKAXEYSKEGWEYVKARTK

SEQ ID NO: 1029572 - protein, 337 aa, Homo sapiens
MLRNNLGNSSDSKNEDGSVFSQTEHNIVATYLIMAGMISIISNIIVLGIFIKYKELRTPTNAIIINLAVTDIGVSSIGYPMSAASDLYGSWKFGYAGCQVYAGLNIFFGMASIGLLTVVAVDRYLTICLPDVGRRMTTNTYIGLILGAWINGLFWALMPIIGWASYAPDPTGATCTINWRKNDRSFVSYTMTVIAINFIVPLTVMFYCYYHVTLSIKHHTTSDCTESLNRDWSDQIDVTKMSVIMICMFLVAWSPYSIVCLWASFGDPKKIPPPMAIIAPLFAKSSTFYNPCIYVVANKKFRRAMLAMFKCQTHQTMPVTSILPMDVSQNPLASGRI

SEQ ID NO: 1029573 - protein, 30 aa, Homo sapiens
MRRRCPEFRTLSITLPFNLDVKTGLNSTRK

SEQ ID NO: 1029574 - protein, 41 aa, Homo sapiens
MVTSRERGTTRLPKEGEPTQSGNGAKSNSRADHSEPCDTSS

SEQ ID NO: 1029575 - protein, 80 aa, Homo sapiens
  misc_feature (45)..(45): Xaa can be any naturally occurring amino acid
  misc_feature (67)..(67): Xaa can be any naturally occurring amino acid
  misc_feature (79)..(79): Xaa can be any naturally occurring amino acid
MPGEFFNFLSTLGVTMSPRLVSNFWAQAVLTPWPPKRVGITGMSXVLKLAFVSLRLECSGAIMAHCXLNFPDPGDFSHXS

SEQ ID NO: 1029576 - protein, 88 aa, Homo sapiens
APRYGLTQKNNRELEKPKKVHVTEDMKHENNATGVRSHQHLGGQGWEDRLSPGVLGCSALCRSGVRTKFGINMVTSRERGTTRLPKEG

SEQ ID NO: 1029577 - protein, 168 aa, Homo sapiens
MARPWLTVTSTSRVQVILSASASRVAGTTVHAPPCPDNFVFLVETGFLHVGQAVLKLPISGDLPASASQSARITGANHHAQPETHFFVCSLFCFRDRVSLFVPMLECSALCRSGVRTKFGINMVTSRERGTTRLPKVWLHQVTRIGHRNSPIPSLLNIVTAIADTFTS

SEQ ID NO: 1029578 - protein, 123 aa, Homo sapiens
MARPWLTVTSTSRVQVILSASASRVAGTTVHAPPCPDNFVFLVETGFLHVGQAVLKLPISGDLPASASQSARITGANHHAQPETHFFVCSLFCFRDRVSLFCPCWNAVRYADRVSALSSASIW

SEQ ID NO: 1029579 - protein, 145 aa, Homo sapiens
AAAGALILFRGPKNHKHMLNLTVYSSYNCQNLFSSSYLTHIAGSWHPGGGRNGPGAPGGPVDPYRTFHSGPVGLLVHLNKSESCGLHAPGTWWKAPCYETVKVWLQENLLAVGIFGLCTALVQILGLTFAMTMYCQVVKADTYCA

SEQ ID NO: 1029580 - protein, 238 aa, Homo sapiens
MARACLQAVKYLMFAFNLLFWLGGCGVLGVGIWLAATQGSFATLSSSFPSLSAANLLIITGAFVMAIGFVGCLGAIKENKCLLLTFFLLLLLVFLLEATIAILFFAYTDKIDRYAQQDLKKGLHLYGTQGNVGLTNAWSIIQTDFRCCGVSNYTDWFEVYNATRVPDSCCLEFSESCGLHAPGTWWKAPCYETVKVWLQENLLAVGIFGLCTALVQILGLTFAMTMYCQVVKADTYCA

SEQ ID NO: 1029581 - protein, 238 aa, Homo sapiens; identical to SEQ ID NO: 1029580

SEQ ID NO: 1029582 - protein, 174 aa, Homo sapiens
MAIGFVGCLGAIKENKCLLLTFFLLLLLVFLLEATIAILFFAYTDKIDRYAQQDLKKGLHLYGTQGNVGLTNAWSIIQTDFRCCGVSNYTDWFEVYNATRVPDSCCLEFSESCGLHAPGTWWKAPCYETVKVWLQENLLAVGIFGLCTALVQILGLTFAMTMYCQVVKADTYCA

SEQ ID NO: 1029583 - protein, 174 aa, Homo sapiens
MARACLQAVKYLMFAFNLLFWFFLLLLLVFLLEATIAILFFAYTDKIDRYAQQDLKKGLHLYGTQGNVGLTNAWSIIQTDFRCCGVSNYTDWFEVYNATRVPDSCCLEFSESCGLHAPGTWWKAPCYETVKVWLQENLLAVGIFGLCTALVQILGLTFAMTMYCQVVKADTYCA

SEQ ID NO: 1029584 - protein, 394 aa, Homo sapiens
PQRAGRADVWVPPPGSERIRATRCHRGGQSGSRSGAGAGAGRRDGAFRGGGCGALSGGPGTPGAMRRSSTDESTYRRSPSPEGKEPDFARGGPFRRYSSLYGRAGGGDAGGAFFGLHANPGPKAAQARYTSPKGNKYVVFYLDLSFIFLLELKRCGMARACLQAVKYLMFAFNLLFWLGGCGVLGVGIWLAATQGSFATLSSSFPSLSAANLLIITGAFVMAIGFVGCLGAIKENKCLLLTFFLLLLLVFLLEATIAILFFAYTDKIDRYAQQDLKKGLHLYGTQGNVGLTNAWSIIQTDFRCCGVSNYTDWFEVYNATRVPDSCCLEFSESCGLHAPGTWWKAPCYETVKVWLQENLLAVGIFGLCTALVQILGLTFAMTMYCQVVKADTYCA

SEQ ID NO: 1029585 - protein, 296 aa, Homo sapiens
  misc_feature (3)..(3): Xaa can be any naturally occurring amino acid
  misc_feature (6)..(6): Xaa can be any naturally occurring amino acid
GGXVPXGACEGRAARVPWPEVSDRERLEPDASGAREFEPRADTQQQELGASLVAPTTCLPTGQPSGTLSTAWSLSCGQPLGGCGVLGVGIWLAATQGSFATLSSSFPSLSAANLLIITGAFVMAIGFVGCLGAIKENKCLLLTFFLLLLLVFLLEATIAILFFAYTDKIDRYAQQDLKKGLHLYGTQGNVGLTNAWSIIQTDFRCCGVSNYTDWFEVYNATRVPDSCCLEFSESCGLHAPGTWWKAPCYETVKVWLQENLLAVGIFGLCTALVQILGLTFAMTMYCQVVKADTYCA

SEQ ID NO: 1029586 - protein, 354 aa, Homo sapiens
AGCSPSRAPDAQTRLWARGEGTREEVGEGVVEEVLFELNLEDPGTGDPWADSRRLHWQDPLKASALACPGAQGLRTTRDEEPVSLGWSAGGLAPAPFLLCPWGGELGASLVAPTTCLPTGQPSGTLSTAWSLSCGQPLGGCGVLGVGIWLAATQGSFATLSSSFPSLSAANLLIITGAFVMAIGFVGCLGAIKENKCLLLTFFLLLLLVFLLEATIAILFFAYTDKIDRYAQQDLKKGLHLYGTQGNVGLTNAWSIIQTDFRCCGVSNYTDWFEVYNATRVPDSCCLEFSESCGLHAPGTWWKAPCYETVKVWLQENLLAVGIFGLCTALVQILGLTFAMTMYCQVVKADTYCA

SEQ ID NO: 1029587 - protein, 264 aa, Homo sapiens
MARACLQAVKYLMFAFNLLFWLGGCGVLGVGIWLAATQGSFATLSSSFPSLSAANLLIITGAFVMAIGFVGCLGAIKENKCLLLTFFLLLLLVFLLEATIAILFFAYTDKIDRYAQQDLKKGLHLYGTQGNVGLTNAWSIIQTDVRRGQVGGVGGCPLPSCLSPPELDPQFRCCGVSNYTDWFEVYNATRVPDSCCLEFSESCGLHAPGTWWKAPCYETVKVWLQENLLAVGIFGLCTALVQILGLTFAMTMYCQVVKADTYCA

SEQ ID NO: 1029588 - protein, 145 aa, Homo sapiens; identical to SEQ ID NO: 1029579

SEQ ID NO: 1029589 - protein, 238 aa, Homo sapiens; identical to SEQ ID NO: 1029580

SEQ ID NO: 1029590 - protein, 238 aa, Homo sapiens; identical to SEQ ID NO: 1029580

SEQ ID NO: 1029591 - protein, 238 aa, Homo sapiens; identical to SEQ ID NO: 1029580

SEQ ID NO: 1029592 - protein, 238 aa, Homo sapiens; identical to SEQ ID NO: 1029580

SEQ ID NO: 1029593 - protein, 255 aa, Homo sapiens
FLRRSLTLSPRLECSGTMSAHCKLRLLGSRHSPVAVPQLGGCGVLGVGIWLAATQGSFATLSSSFPSLSAANLLIITGAFVMAIGFVGCLGAIKENKCLLLTFFLLLLLVFLLEATIAILFFAYTDKIDRYAQQDLKKGLHLYGTQGNVGLTNAWSIIQTDFRCCGVSNYTDWFEVYNATRVPDSCCLEFSESCGLHAPGTWWKAPCYETVKVWLQENLLAVGIFGLCTALVQILGLTFAMTMYCQVVKADTYCA

SEQ ID NO: 1029594 - protein, 156 aa, Homo sapiens
AGRKAAAAVRVSRVRLTDSCAAGAGGASGRRRRRAWGFLGRTHHLPAHWSAFRDPEHRLVSFLWPAPGRLWRAGCRHLAGRHTGELRHAVLFLPVPVGCQPAHHHRRLCHGHRLRGLPGCHQGEQVPPAHFLPAAAAGVPAGGHHRHPLLRLHGQD

SEQ ID NO: 1029595 - protein, 719 aa, Homo sapiens
  misc_feature (2)..(2): Xaa can be any naturally occurring amino acid
  misc_feature (15)..(15): Xaa can be any naturally occurring amino acid
RXRASPPRVPPAARXPGVTASCPPARLPACPPTRLPAYPAYPPAGLPSFQRRAMEGVSALLARCPTAGLAGGLGVTACAAAGVLLYRIARRMKPTHTMVNCWFCNQDTLVPYGNRNCWDCPHCEQYNGFQENGDYNKPIPAQYLEHLNHVVSSAPSLRDPSQPQQWVSSQVLLCKRCNHHQTTKIKQLAAFAPREEGRYDEEVEVYRHHLEQMYKLCRPCQAAVEYYIKHQNRQLRALLLSHQFKRREADQTHAQNFSSAVKSPVQVILLRALAFLACAFLLTTALYGASGHFAPGTTVPLALPPGGNGSATPDNGTTPGAEGWRQLLGLLPEHMAEKLCEAWAFGQSHQTGVVALGLLTCLLAMLLAGRIRLRRIDAFCTCLWALLLGLHLAEQHLQAASPSWLDTLKFSTTSLCCLVGFTAAVATRKATGPRRFRPRRFFPGDSAGLFPTSPSLAIPHPSVGGSPASLFIPSPPSFLPLANQQLFRSPRRTSPSSLPGRLSRALSLGTIPSLTRADSGYLFSGSRPPSQVSRSGEFPVSDYFSLLSGKLPLLPIPSPAPSVAGSVASSSGSLRHRRPLISPARLNLKGQKLLLFPSPPGEAPTTPSSSDEHSPHNGSLFTMEPPHVPRKPPLQDVKHALDLRSKLERGSACSNRSIKKEDDSSQSSTCVVDTTTRGCSEEAATWRGRFGPSLVRGLLAVSLAANALFTSVFLYQSLR

SEQ ID NO: 1029596 - protein, 856 aa, Homo sapiens
  misc_feature (2)..(2): Xaa can be any naturally occurring amino acid
  misc_feature (15)..(15): Xaa can be any naturally occurring amino acid
RXRASPPRVPPAARXPGVTASCPPARLPACPPTRLPAYPAYPPAGLPSFQRRAMEGVSALLARCPTAGLAGGLGVTACAAAGVLLYRIARRMKPTHTMVNCWFCNQDTLVPYGNRNCWDCPHCEQYNGFQENGDYNKPIPAQYLEHLNHVVSSAPSLRDPSQPQQWVSSQVLLCKRCNHHQTTKIKQLAAFAPREEGRYDEEVEVYRHHLEQMYKLCRPCQAAVEYYIKHQNRQLRALLLSHQFKRREADQTHAQNFSSAVKSPVQVILLRALAFLACAFLLTTALYGASGHFAPGTTVPLALPPGGNGSATPDNGTTPGAEGWRQLLGLLPEHMAEKLCEAWAFGQSHQTGVVALGLLTCLLAMLLAGRIRLRRIDAFCTCLWALLLGLHLAEQHLQAASPSWLDTLKFSTTSLCCLVGFTAAVATRKATGPRRFRPRRSEKQHDCGGRTHGCSGPGFARSEAGPSLSCLFSPAHALPPRTLQPQVLAQSLHCLEESVCPAFSFRAPPAIPECPVATHHCCHLSGQWPFHWPGDWNVGSAHTGSGPWLPTGSSRHPPLTTPFAGSDTSWVRVLVLLSSLLLQDPPESPEMESAVLGPSLAFAMSLGSETPPETGSEEPVLTLGNLSFSKGEGAQGMQAFSDIRSLSSFPSLTCHEPLQVPAHHGPAPLCPPTQVRGQPTDLLLSSRAWPGPCCSQPQFAIYEMRWTPLHSPWVPAQWVWGSHEVAHEDTLWKSRGCHVQRKFPAWGLYPGVPVESGPRPSLTGHVPSGCPLPQGPHVLPLATLSTSSPSRCGQVCQLLSPVRWNPGGGKSRSQVHEGYTRHLGLPGWVGGAGARPHCCESATPGGPRGCPTPVIG

SEQ ID NO: 1029597 - protein, 614 aa, Homo sapiens
  misc_feature (2)..(2): Xaa can be any naturally occurring amino acid
  misc_feature (15)..(15): Xaa can be any naturally occurring amino acid
RXRASPPRVPPAARXPGVTASCPPARLPACPPTRLPAYPAYPPAGLPSFQRRAMEGVSALLARCPTAGLAGGLGVTACAAAGVLLYRIARRMKPTHTMVNCWFCNQDTLVPYGNRNCWDCPHCEQYNGFQENGDYNKPIPAQYLEHLNHVVSSAPSLRDPSQPQQWVSSQVLLCKRCNHHQTTKIKQLAAFAPREEGRYDEEVEVYRHHLEQMYKLCRPCQAAVEYYIKHQNRQLRALLLSHQFKRREADQTHAQNFSSAVKSPVQVILLRALAFLACAFLLTTALYGASGHFAPGTTVPLALPPGGNGSATPDNGTTPGAEGWRQLLGLLPEHMAEKLCEAWAFGQSHQTGVVALGLLTCLLAMLLAGRIRLRRIDAFCTCLWALLLGLHLAEQHLQAASPSWLDTLKFSTTSLCCLVGFTAAVATRKATGPRRFRPRRSEKQHDCGGRTHGCSGPGFARSEAGPSLSCLFSPAHALPPRTLQPQVLAQSLHCLEESVCPAFSFRAPPAIPECPVATTTAATSLANGPFTGLVTGMWAAPTQALAHGFLLAAPGTPLSPRRLLALTLLGEGPGPAVFPPGLCTGVVTVATGWALACLTVQQSEAGAAESPNSP

SEQ ID NO: 1029598 - protein, 719 aa, Homo sapiens; identical to SEQ ID NO: 1029595
  misc_feature (2)..(2): Xaa can be any naturally occurring amino acid
  misc_feature (15)..(15): Xaa can be any naturally occurring amino acid

SEQ ID NO: 1029599 - protein, 307 aa, Homo sapiens
MCLPCSVPGSRPSDLGKNAGDTLPQEDLPLTKPEMFENPLYGSLSSFPKPAPRKDQESPKMPRKEPPPCPEPGILSPSIVLTKAQEADRGEGPGKQVPAPRLRSFTCSSSAEGRAAGGDKSQGKPKTPVSSQAPVPAKRPIKPSRSEINQQTPPTPTPRPPLPVKSPAVLHLQHSKGRDYRDNTELPHHGKHRPEEGPPGPLGRTAMQVRCATRGFVCICVCVCMRECVCVYLCICVCMCVCTHAYVRACVNACMCTHASDGPGNCSMRRESQDLNPGLPVPHIPDPALPLQQLLKGRKAGLWINLV

SEQ ID NO: 1029600 - protein, 296 aa, Homo sapiens
GESSSIFLILFLSSTNALFVSNFIYVLYRSCYISPPKSHKSKERAGGGRGTCNCIGDCPEPGILSPSIVLTKAQEADRGEGPGKQVPAPRLRSFTCSSSAEGRAAGGDKSQGKPKTPVSSQAPVPAKRPIKPSRSEINQQTPPTPTPRPPLPVKSPAVLHLQHSKGRDYRDNTELPHHGKHRPEEGPPGPLGRTAMQVRCATRGFVCICVCVCMRECVCVYLCICVCMCVCTHAYVRACVNACMCTHASDGPGNCSMRRESQDLNPGLPVPHIPDPALPLQQLLKGRKAGLWINLV

SEQ ID NO: 1029601 - protein, 1273 aa, Homo sapiens
MVPCWNHGNITRSKAEELLSRTGKDGSFLVRASESISRAYALCVLYRNCVYTYRILPNEDDKFTVQASEGVSMRFFTKLDQLIEFYKKENMGLVTHLQYPVPLEEEDTGDDPEEDTVESVVSPPELPPRNIPLTASSCEAKEVPFSNENPRATETSRPSLSETLFQRLQSMDTSGLPEEHLKAIQDYLSTQLAQDSEFVKTGSSSLPHLKKLTTLLCKELYGEVIRTLPSLESLQRLFDQQLSPGLRPRPQVPGEANPINMVSKLSQLTSLLSSIEDKVKALLHEGPESPHRPSLIPPVTFEVKAESLGIPQKMQLKVDVESGKLIIKKSKDGSEDKFYSHKKILQLIKSQKFLNKLVILVETEKEKILRKEYVFADSKKREGFCQLLQQMKNKHSEQPEPDMITIFIGTWNMGAGKDAGRLCGLHPPLTFTCIGTQEDPLSEKEWLEILKHSLQEITSVTFKTVAIHTLWNIRIVVLAKPEHENRISHICTDNVKTGIANTLGNKGAVGVSFMFNGTSLGFVNSHLTSGSEKKLRRNQNYMNILRFLALGDKKLSPFNITHRFTHLFWFGDLNYRVDLPTWEAETIIQKIKQQQYADLLSHDQLLTERREQKVFLHFEEEEITFAPTYRFERLTRDKYAYTKQKATGMKYNLPSWCDRVLWKSYPLVHVVCQSYGSTSDIMTSDHSPVFATFEAGVTSQFVSKNGPGTVDSQGQIEFLRCYATLKTKSQTKFYLEFHSSCLESFVKSQEGENEEGSEGELVVKFGETLPKLKPIISDPEYLLDQHILISIKSSDSDESYGEGCIALRLEATETQLPIYTPLTHHGELTGHFQGEIKLQTSQGKTREKLYDFVKTERDESSGPKTLKSLTSHDPMKQWEVTSRAPPCSGSSITEIINPNYMGVGPFGPPMPLHVKQTLSPDQQPTAWSYDQPPKDSPLGPCRGESPPTPPGQPPISPKKFLPSTANRGLPPRTQESRPSDLGKNAGDTLPQEDLPLTKPEMFENPLYGSLSSFPKPAPRKDQESPKMPRKEPPPCPEPGILSPSIVLTKAQEADRGEGPGKQVPAPRLRSFTCSSSAEGRAAGGDKSQGKPKTPVSSQAPVPAKRPIKPSRSEINQQTPPTPTPRPPLPVKSPAVLHLQHSKGRDYRDNTELPHHGKHRPEEGPPGPLGRTAMQVRCATRGFVCICVCVCMRECVCVYLCICVCMCVCTHAYVRACVNACMCTHASDGPGNCSMRRESQDLNPGLPVPHIPDPALPLQQLLKGRKAGLWINLV

SEQ ID NO: 1029602 - protein, 1216 aa, Homo sapiens
MRFFTKLDQLIEFYKKENMGLVTHLQYPVPLEEEDTGDDPEEDTVESVVSPPELPPRNIPLTASSCEAKEVPFSNENPRATETSRPSLSETLFQRLQSMDTSGLPEEHLKAIQDYLSTQLAQDSEFVKTGSSSLPHLKKLTTLLCKELYGEVIRTLPSLESLQRLFDQQLSPGLRPRPQVPGEANPINMVSKLSQLTSLLSSIEDKVKALLHEGPESPHRPSLIPPVTFEVKAESLGIPQKMQLKVDVESGKLIIKKSKDGSEDKFYSHKKILQLIKSQKFLNKLVILVETEKEKILRKEYVFADSKKREGFCQLLQQMKNKHSEQPEPDMITIFIGTWNMGNAPPPKKITSWFLSKGQGKTRDDSADYIPHDIYVIGTQEDPLSEKEWLEILKHSLQEITSVTFKTVAIHTLWNIRIVVLAKPEHENRISHICTDNVKTGIANTLGNKGAVGVSFMFNGTSLGFVNSHLTSGSEKKLRRNQNYMNILRFLALGDKKLSPFNITHRFTHLFWFGDLNYRVDLPTWEAETIIQKIKQQQYADLLSHDQLLTERREQKVFLHFEEEEITFAPTYRFERLTRDKYAYTKQKATGMKYNLPSWCDRVLWKSYPLVHVVCQSYGSTSDIMTSDHSPVFATFEAGVTSQFVSKNGPGTVDSQGQIEFLRCYATLKTKSQTKFYLEFHSSCLESFVKSQEGENEEGSEGELVVKFGETLPKLKPIISDPEYLLDQHILISIKSSDSDESYGEGCIALRLEATETQLPIYTPLTHHGELTGHFQGEIKLQTSQGKTREKLYDFVKTERDESSGPKTLKSLTSHDPMKQWEVTSRAPPCSGSSITEIINPNYMGVGPFGPPMPLHVKQTLSPDQQPTAWSYDQPPKDSPLGPCRGESPPTPPGQPPISPKKFLPSTANRGLPPRTQESRPSDLGKNAGDTLPQEDLPLTKPEMFENPLYGSLSSFPKPAPRKDQESPKMPRKEPPPCPEPGILSPSIVLTKAQEADRGEGPGKQVPAPRLRSFTCSSSAEGRAAGGDKSQGKPKTPVSSQAPVPAKRPIKPSRSEINQQTPPTPTPRPPLPVKSPAVLHLQHSKGRDYRDNTELPHHGKHRPEEGPPGPLGRTAMQVRCATRGFVCICVCVCMRECVCVYLCICVCMCVCTHAYVRACVNACMCTHASDGPGNCSMRRESQDLNPGLPVPHIPDPALPLQQLLKGRKAGLWINLV

SEQ ID NO: 1029603 - protein, 841 aa, Homo sapiens
MVPCWNHGNITRSKAEELLSRTGKDGSFLVRASESISRAYALCVLYRNCVYTYRILPNEDDKFTVQASEGVSMRFFTKLDQLIEFYKKENMGLVTHLQYPVPLEEEDTGDDPEEDTVESVVSPPELPPRNIPLTASSCEAKEVPFSNENPRATETSRPSLSETLFQRLQSMDTSGLPEEHLKAIQDYLSTQLAQDSEFVKTGSSSLPHLKKLTTLLCKELYGEVIRTLPSLESLQRLFDQQLSPGLRPRPQVPGEANPINMVSKLSQLTSLLSSIEDKVKALLHEGPESPHRPSLIPPVTFEVKAESLGIPQKMQLKVDVESGKLIIKKSKDGSEDKFYSHKKILQLIKSQKFLNKLVILVETEKEKILRKEYVFADSKKREGFCQLLQQMKNKHSEQPEPDMITIFIGTWNMGNAPPPKKITSWFLSKGQGKTRDDSADYIPHDIYVIGTQEDPLSEKEWLEILKHSLQEITSVTFKTVAIHTLWNIRIVVLAKPEHENRISHICTDNVKTGIANTLGNKGAVGVSFMFNGTSLGFVNSHLTSGSEKKLRRNQNYMNILRFLALGDKKLSPFNITHRFTHLFWFGDLNYRVDLPTWEAETIIQKIKQQQYADLLSHDQLLTERREQKVFLHFEEEEITFAPTYRFERLTRDKYAYTKQKATGMKYNLPSWCDRVLWKSYPLVHVVCQSYGSTSDIMTSDHSPVFATFEAGVTSQFVSKNGPGTVDSQGQIEFLRCYATLKTKSQTKFYLEFHSSCLESFVKSQEGENEEGSEGELVVKFGETLPKLKPIISDPEYLLDQHILISIKSSDTSRPAAHITQEVFTLNSKPGSPSQDTGVKAQ

SEQ ID NO: 1029604 - protein, 717 aa, Homo sapiens
MVPCWNHGNITRSKAEELLSRTGKDGSFLVRASESISRAYALCVLYRNCVYTYRILPNEDDKFTVQASEGVSMRFFTKLDQLIEFYKKENMGLVTHLQYPVPLEEEDTGDDPEEDTVESVVSPPELPPRNIPLTASSCEAKEVPFSNENPRATETSRPSLSETLFQRLQSMDTSGLPEEHLKAIQDYLSTQLAQDSEFVKTGSSSLPHLKKLTTLLCKELYGEVIRTLPSLESLQRLFDQQLSPGLRPRPQVPGEANPINMVSKLSQLTSLLSSIEDKVKALLHEGPESPHRPSLIPPVTFEVKAESLGIPQKMQLKVDVESGKLIIKKSKDGSEDKFYSHKKILQLIKSQKFLNKLVILVETEKEKILRKEYVFADSKKREGFCQLLQQMKNKHSEQPEPDMITIFIGTWNMGNAPPPKKITSWFLSKGQGKTRDDSADYIPHDIYVIGTQEDPLSEKEWLEILKHSLQEITSVTFKTVAIHTLWNIRIVVLAKPEHENRISHICTDNVKTGIANTLGNKGAVGVSFMFNGTSLGFVNSHLTSGSEKKLRRNQNYMNILRFLALGDKKLSPFNITHRFTHLFWFGDLNYRVDLPTWEAETIIQKIKQQQSRCPRPGCAPSRAHPLPRAGRPAGTRAKGSPRPRSAPRPRCRPRGPSSLPDRKSTSRPRPPRRRGRRCQSRARRCCTSSTPRAATTATTPSSRITASTGRRRGHQGL

SEQ ID NO: 1029605 - protein, 471 aa, Homo sapiens
MVPCWNHGNITRSKAEELLSRTGKDGSFLVRASESISRAYALCVLYRNCVYTYRILPNEDDKFTVQASEGVSMRFFTKLDQLIEFYKKENMGLVTHLQYPVPLEEEDTGDDPEEDTVESVVSPPELPPRNIPLTASSCEAKEVPFSNENPRATETSRPSLSETLFQRLQSMDTSGLPEEHLKAIQDYLSTQLAQDSEFVKTGSSSLPHLKKLTTLLCKELYGEVIRTLPSLESLQRLFDQPSIVLTKAQEADRGEGPGKQVPAPRLRSFTCSSSAEGRAAGGDKSQGKPKTPVSSQAPVPAKRPIKPSRSEINQQTPPTPTPRPPLPVKSPAVLHLQHSKGRDYRDNTELPHHGKHRPEEGPPGPLGRTAMQVRCATRGFVCICVCVCMRECVCVYLCICVCMCVCTHAYVRACVNACMCTHASDGPGNCSMRRESQDLNPGLPVPHIPDPALPLQQLLKGRKAGLWINLV

SEQ ID NO: 1029606 - protein, 234 aa, Homo sapiens
ILLLVLCSLKFRRLIVVRVFGKQVPAPRLRSFTCSSSAEGRAAGGDKSQGKPKTPVSSQAPVPAKRPIKPSRSEINQQTPPTPTPRPPLPVKSPAVLHLQHSKGRDYRDNTELPHHGKHRPEEGPPGPLGRTAMQVRCATRGFVCICVCVCMRECVCVYLCICVCMCVCTHAYVRACVNACMCTHASDGPGNCSMRRESQDLNPGLPVPHIPDPALPLQQLLKGRKAGLWINLV

SEQ ID NO: 1029607 - protein, 1296 aa, Homo sapiens
MVPCWNHGNITRSKAEELLSRTGKDGSFLVRASESISRAYALCVLYRNCVYTYRILPNEDDKFTVQASEGVSMRFFTKLDQLIEFYKKENMGLVTHLQYPVPLEEEDTGDDPEEDTVESVVSPPELPPRNIPLTASSCEAKEVPFSNENPRATETSRPSLSETLFQRLQSMDTSGLPEEHLKAIQDYLSTQLAQDSEFVKTGSSSLPHLKKLTTLLCKELYGEVIRTLPSLESLQRLFDQQLSPGLRPRPQVPGEANPINMVSKLSQLTSLLSSIEDKVKALLHEGPESPHRPSLIPPVTFEVKAESLGIPQKMQLKVDVESGKLIIKKSKDGSEDKFYSHKKILQLIKSQKFLNKLVILVETEKEKILRKEYVFADSKKREGFCQLLQQMKNKHSEQPEPDMITIFIGTWNMGNAPPPKKITSWFLSKGQGKTRDDSADYIPHDIYVIGTQEDPLSEKEWLEILKHSLQEITSVTFKTVSSWLHCWVAIHTLWNIRIVVLAKPEHENRISHICTDNVKTGIANTLGNKGAVGVSFMFNGTSLGFVNSHLTSGSEKKLRRNQNYMNILRFLALGDKKLSPFNITHRFTHLFWFGDLNYRVDLPTWEAETIIQKIKQQQYADLLSHDQLLTERREQKVFLHFEEEEITFAPTYRFERLTRDKYAYTKQKATGMKYNLPSWCDRVLWKSYPLVHVVCQSYGSTSDIMTSDHSPVFATFEAGVTSQFVSKNGPGTVDSQGQIEFLRCYATLKTKSQTKFYLEFHSSCLESFVKSQEGENEEGSEGELVVKFGETLPKLKPIISDPEYLLDQHILISIKSSDSDESYGEGCIALRLEATETQLPIYTPLTHHGELTGHFQGEIKLQTSQGKTREKLYDFVKTERDESSGPKTLKSLTSHDPMKQWEVTSRAPPCSGSSITEIINPNYMGVGPFGPPMPLHVKQTLSPDQQPTAWSYDQPPKDSPLGPCRGESPPTPPGQPPISPKKFLPSTANRGLPPRTQESRPSDLGKNAGDTLPQEDLPLTKPEMFENPLYGSLSSFPKPAPRKDQESPKMPRKEPPPCPEPGILSPSIVLTKAQEADRGEGPGKQVPAPRLRSFTCSSSAEGRAAGGDKSQGKPKTPVSSQAPVPAKRPIKPSRSEINQQTPPTPTPRPPLPVKSPAVLHLQHSKGRDYRDNTELPHHGKHRPEEGPPGPLGRTAMQVRCATRGFVCICVCVCMRECVCVYLCICVCMCVCTHAYVRACVNACMCTHASDGPGNCSMRRESQDLNPGLPVPHIPDPALPLQQLLKGRKAGLWINLV

SEQ ID NO: 1029608 - protein, 1317 aa, Homo sapiens
MVPCWNHGNITRSKAEELLSRTGKDGSFLVRASESISRAYALCVLYRNCVYTYRILPNEDDKFTVQASEGVSMRFFTKLDQLIEFYKKENMGLVTHLQYPVPLEEEDTGDDPEEDTVESVVSPPELPPRNIPLTASSCEAKEVPFSNENPRATETSRPSLSETLFQRLQSMDTSGLPEEHLKAIQDYLSTQLAQDSEFVKTGSSSLPHLKKLTTLLCKELYGEVIRTLPSLESLQRLFDQQLSPGLRPRPQVPGEANPINMVSKLSQLTSLLSSIEDKVKALLHEGPESPHRPSLIPPVTFEVKAESLGIPQKMQLKVDVESGKLIIKKSKDGSEDKFYSHKKILQLIKSQKFLNKLVILVETEKEKILRKEYVFADSKKREGFCQLLQQMKNKHSEQPEPDMITIFIGTWNMGNAPPPKKITSWFLSKGQGKTRDDSADYIPHDIYVIGTQEDPLSEKEWLEILKHSLQEITSVTFKTVAIHTLWNIRIVVLAKPEHENRISHICTDNVKTGIANTLVSQVMCSCWSRELPLGTTDLEEIRTLAEKGNKGAVGVSFMFNGTSLGFVNSHLTSGSEKKLRRNQNYMNILRFLALGDKKLSPFNITHRFTHLFWFGDLNYRVDLPTWEAETIIQKIKQQQYADLLSHDQLLTERREQKVFLHFEEEEITFAPTYRFERLTRDKYAYTKQKATGMKYNLPSWCDRVLWKSYPLVHVVCQSYGSTSDIMTSDHSPVFATFEAGVTSQFVSKNGPGTVDSQGQIEFLRCYATLKTKSQTKFYLEFHSSCLESFVKSQEGENEEGSEGELVVKFGETLPKLKPIISDPEYLLDQHILISIKSSDSDESYGEGCIALRLEATETQLPIYTPLTHHGELTGHFQGEIKLQTSQGKTREKLYDFVKTERDESSGPKTLKSLTSHDPMKQWEVTSRAPPCSGSSITEIINPNYMGVGPFGPPMPLHVKQTLSPDQQPTAWSYDQPPKDSPLGPCRGESPPTPPGQPPISPKKFLPSTANRGLPPRTQESRPSDLGKNAGDTLPQEDLPLTKPEMFENPLYGSLSSFPKPAPRKDQESPKMPRKEPPPCPEPGILSPSIVLTKAQEADRGEGPGKQVPAPRLRSFTCSSSAEGRAAGGDKSQGKPKTPVSSQAPVPAKRPIKPSRSEINQQTPPTPTPRPPLPVKSPAVLHLQHSKGRDYRDNTELPHHGKHRPEEGPPGPLGRTAMQVRCATRGFVCICVCVCMRECVCVYLCICVCMCVCTHAYVRACVNACMCTHASDGPGNCSMRRESQDLNPGLPVPHIPDPALPLQQLLKGRKAGLWINLV

SEQ ID NO: 1029609 - protein, 972 aa, Homo sapiens
MCLEHNGDRPYWLNEWMNELMNFFSLEVLQLIKSQKFLNKLVILVETEKEKILRKEYVFADSKKREGFCQLLQQMKNKHSEQPEPDMITIFIGTWNMGNAPPPKKITSWFLSKGQGKTRDDSADYIPHDIYVIGTQEDPLSEKEWLEILKHSLQEITSVTFKTVAIHTLWNIRIVVLAKPEHENRISHICTDNVKTGIANTLGNKGAVGVSFMFNGTSLGFVNSHLTSGSEKKLRRNQNYMNILRFLALGDKKLSPFNITHRFTHLFWFGDLNYRVDLPTWEAETIIQKIKQQQYADLLSHDQLLTERREQKVFLHFEEEEITFAPTYRFERLTRDKYAYTKQKATGMKYNLPSWCDRVLWKSYPLVHVVCQSYGSTSDIMTSDHSPVFATFEAGVTSQFVSKNGPGTVDSQGQIEFLRCYATLKTKSQTKFYLEFHSSCLESFVKSQEGENEEGSEGELVVKFGETLPKLKPIISDPEYLLDQHILISIKSSDSDESYGEGCIALRLEATETQLPIYTPLTHHGELTGHFQGEIKLQTSQGKTREKLYDFVKTERDESSGPKTLKSLTSHDPMKQWEVTSRAPPCSGSSITEIINPNYMGVGPFGPPMPLHVKQTLSPDQQPTAWSYDQPPKDSPLGPCRGESPPTPPGQPPISPKKFLPSTANRGLPPRTQESRPSDLGKNAGDTLPQEDLPLTKPEMFENPLYGSLSSFPKPAPRKDQESPKMPRKEPPPCPEPGILSPSIVLTKAQEADRGEGPGKQVPAPRLRSFTCSSSAEGRAAGGDKSQGKPKTPVSSQAPVPAKRPIKPSRSEINQQTPPTPTPRPPLPVKSPAVLHLQHSKGRDYRDNTELPHHGKHRPEEGPPGPLGRTAMQVRCATRGFVCICVCVCMRECVCVYLCICVCMCVCTHAYVRACVNACMCTHASDGPGNCSMRRESQDLNPGLPVPHIPDPALPLQQLLKGRKAGLWINLV

SEQ ID NO: 1029610 - protein, 735 aa, Homo sapiens
TRPGHPATITLQPGSSSCPPPAPKLVRPGSAGLLTRGPGMFLFQEAETIIQKIKQQQYADLLSHDQLLTERREQKVFLHFEEEEITFAPTYRFERLTRDKYAYTKQKATGMKYNLPSWCDRVLWKSYPLVHVVCQSYGSTSDIMTSDHSPVFATFEAGVTSQFVSKNGPGTVDSQGQIEFLRCYATLKTKSQTKFYLEFHSSCLESFVKSQEGENEEGSEGELVVKFGETLPKLKPIISDPEYLLDQHILISIKSSDSDESYGEGCIALRLEATETQLPIYTPLTHHGELTGHFQGEIKLQTSQGKTREKLYDFVKTERDESSGPKTLKSLTSHDPMKQWEVTSRAPPCSGSSITEIINPNYMGVGPFGPPMPLHVKQTLSPDQQPTAWSYDQPPKDSPLGPCRGESPPTPPGQPPISPKKFLPSTANRGLPPRTQESRPSDLGKNAGDTLPQEDLPLTKPEMFENPLYGSLSSFPKPAPRKDQESPKMPRKEPPPCPEPGILSPSIVLTKAQEADRGEGPGKQVPAPRLRSFTCSSSAEGRAAGGDKSQGKPKTPVSSQAPVPAKRPIKPSRSEINQQTPPTPTPRPPLPVKSPAVLHLQHSKGRDYRDNTELPHHGKHRPEEGPPGPLGRTAMQVRCATRGFVCICVCVCMRECVCVYLCICVCMCVCTHAYVRACVNACMCTHASDGPGNCSMRRESQDLNPGLPVPHIPDPALPLQQLLKGRKAGLWINLV

SEQ ID NO: 1029611 - protein, 1090 aa, Homo sapiens
MVPCWNHGNITRSKAEELLSRTGKDGSFLVRASESISRAYALCVLYRNCVYTYRILPNEDDKFTVQASEGVSMRFFTKLDQLIEFYKKENMGLVTHLQYPVPLEEEDTGDDPEEDTVESVVSPPELPPRNIPLTASSCEAKEVPFSNENPRATETSRPSLSETLFQRLQSMDTSGLPEEHLKAIQDYLSTQLAQDSEFVKTGSSSLPHLKKLTTLLCKELYGEVIRTLPSLESLQRLFDQQLSPGLRPRPQVPGEANPINMVSKLSQLTSLLSSIEDKVKALLHEGPESPHRPSLIPPVTFEVKAESLGIPQKMQLKVDVESGKLIIKKSKDGSEDKFYSHKKILQLIKSQKFLNKLVILVETEKEKILRKEYVFADSKKREGFCQLLQQMKNKHSEQPEPDMITIFIGTWNMGNAPPPKKITSWFLSKGQGKTRDDSADYIPHDIYVIGTQEDPLSEKEWLEILKHSLQEITSVTFKTVAIHTLWNIRIVVLAKPEHENRISHICTDNVKTGIANTLGNKGAVGVSFMFNGTSLGFVNSHLTSGSEKKLRRNQNYMNILRFLALGDKKLSPFNITHRFTHLFWFGDLNYRVDLPTWEAETIIQKIKQQQYADLLSHDQLLTERREQKVFLHFGKSSNPGWERWLTPVIPALEEAEAGGSRDQEMETILANTVKPRLYLKKYKKFSRVWWRVPVVSATWEAEGKDCLTQEVEAAVSHDRTTALQAWVTERDSVSKTKQDKTIWCHSVNLQCYTSLSSSETFVSPQRKTQKPLSSHAPMSSPLDMCLPCSVPGSRPSDLGKNAGDTLPQEDLPLTKPEMFENPLYGSLSSFPKPAPRKDQESPKMPRKEPPPCPEPGILSPSIVLTKAQEADRGEGPGKQVPAPRLRSFTCSSSAEGRAAGGDKSQGKPKTPVSSQAPVPAKRPIKPSRSEINQQTPPTPTPRPPLPVKSPAVLHLQHSKGRDYRDNTELPHHGKHRPEEGPPGPLGRTAMQVRCATRGFVCICVCVCMRECVCVYLCICVCMCVCTHAYVRACVNACMCTHASDGPGNCSMRRESQDLNPGLPVPHIPDPALPLQQLLKGRKAGLWINLV

SEQ ID NO: 1029612 - protein, 695 aa, Homo sapiens
MVPCWNHGNITRSKAEELLSRTGKDGSFLVRASESISRAYALCVLYRNCVYTYRILPNEDDKFTVQASEGVSMRFFTKLDQLIEFYKKENMGLVTHLQYPVPLEEEDTGDDPEEDTVESVVSPPELPPRNIPLTASSCEAKEVPFSNENPRATETSRPSLSETLFQRLQSMDTSGLPEEHLKAIQDYLSTQLAQDSEFVKTGSSSLPHLKKLTTLLCKELYGEVIRTLPSLESLQRLFDQQLSPGLRPRPQVPGEANPINMVSKLSQLTSLLSSIEDKVKALLHEGPESPHRPSLIPPVTFEVKAESLGIPQKMQLKVDVESGKLIIKKSKDGSEDKFYSHKKILQLIKSQKFLNKLVILVETEKEKILRKEYVFADSKKREGFCQLLQQMKNKHSEQPEPDMITIFIGTWNMGNAPPPKKITSWFLSKGQGKTRDDSADYIPHDIYVIGTQEDPLSEKEWLEILKHSLQEITSVTFKTVAIHTLWNIRIVVLAKPEHENRISHICTDNVKTGIANTLGNKGAVGVSFMFNGTSLGFVNSHLTSGSEKKLRRNQNYMNILRFLALGDKKLSPFNITHRFTHLFWFGDLNYRVDLPTWEAETIIQKIKQQQYADLLSHDQLLTERREQKVFLHFEEEEITFAPTYRFERLTRDKYAYTKQKATGMNPLHRHLPCPPSPPRWCLFPKGEQKVSSSIR

SEQ ID NO: 1029613 - protein, 307 aa, Homo sapiens; identical to SEQ ID NO: 1029599

SEQ ID NO: 1029614 - protein, 1288 aa, Homo sapiens
MVPCWNHGNITRSKAEELLSRTGKDGSFLVRASESISRAYALCVLYRNCVYTYRILPNEDDKFTVQASEGVSMRFFTKLDQLIEFYKKENMGLVTHLQYPVPLEEEDTGDDPEEDTVESVVSPPELPPRNIPLTASSCEAKEVPFSNENPRATETSRPSLSETLFQRLQSMDTSGLPEEHLKAIQDYLSTQLAQDSEFVKTGSSSLPHLKKLTTLLCKELYGEVIRTLPSLESLQRLFDQQLSPGLRPRPQVPGEANPINMVSKLSQLTSLLSSIEDKVKALLHEGPESPHRPSLIPPVTFEVKAESLGIPQKMQLKVDVESGKLIIKKSKDGSEDKFYSHKKILQLIKSQKFLNKLVILVETEKEKILRKEYVFADSKKREGFCQLLQQMKNKHSEQPEPDMITIFIGTWNMGNAPPPKKITSWFLSKGQGKTRDDSADYIPHDIYVIGTQEDPLSEKEWLEILKHSLQEITSVTFKTVAIHTLWNIRIVVLAKPEHENRISHICTDNVKTGIANTLGNKGAVGVSFMFNGTSLGFVNSHLTSGSEKKLRRNQNYMNILRFLALGDKKLSPFNITHRFTHLFWFGDLNYRVDLPTWEAETIIQKIKQQQYADLLSHDQLLTERREQKVFLHFEEEEITFAPTYRFERLTRDKYAYTKQKATGMKYNLPSWCDRVLWKSYPLVHVVCQSYGSTSDIMTSDHSPVFATFEAGVTSQFVSKNGPGTVDSQGQIEFLRCYATLKTKSQTKFYLEFHSSCLESFVKSQEGENEEGSEGELVVKFGETLPKLKPIISDPEYLLDQHILISIKSSDSDESYGEGCIALRLEATETQLPIYTPLTHHGELTGHFQGEIKLQTSQGKTREKLYDFVKTERDESSGPKTLKSLTSHDPMKQWEVTSRAPPCSGSSITEIINPNYMGVGPFGPPMPLHVKQTLSPDQQPTAWSYDQPPKDSPLGPCRGESPPTPPGQPPISPKKFLPSTANRGLPPRTQESRPSDLGKNAGDTLPQEDLPLTKPEMFENPLYGSLSSFPKPAPRKDQESPKMPRKEPPPCPEPGILSPSIVLTKAQEADRGEGPGKQVPAPRLRSFTCSSSAEGRAAGGDKSQGKPKTPVSSQAPVPAKRPIKPSRSEINQQTPPTPTPRPPLPVKSPAVLHLQHSKGRDYRDNTELPHHGKHRPEEGPPGPLGRTAMQVRCATRGFVCICVCVCMRECVCVYLCICVCMCVCTHAYVRACVNACMCTHASDGPGNCSMRRESQDLNPGLPVPHIPDPALPLQQLLKGRKAGLWINLV

SEQ ID NO: 1029615 - protein, 1255 aa, Homo sapiens
MQDDCITSRLWRYRNCVYTYRILPNEDDKFTVQASEGVSMRFFTKLDQLIEFYKKENMGLVTHLQYPVPLEEEDTGDDPEEDTVESVVSPPELPPRNIPLTASSCEAKEVPFSNENPRATETSRPSLSETLFQRLQSMDTSGLPEEHLKAIQDYLSTQLAQDSEFVKTGSSSLPHLKKLTTLLCKELYGEVIRTLPSLESLQRLFDQQLSPGLRPRPQVPGEANPINMVSKLSQLTSLLSSIEDKVKALLHEGPESPHRPSLIPPVTFEVKAESLGIPQKMQLKVDVESGKLIIKKSKDGSEDKFYSHKKILQLIKSQKFLNKLVILVETEKEKILRKEYVFADSKKREGFCQLLQQMKNKHSEQPEPDMITIFIGTWNMGNAPPPKKITSWFLSKGQGKTRDDSADYIPHDIYVIGTQEDPLSEKEWLEILKHSLQEITSVTFKTVAIHTLWNIRIVVLAKPEHENRISHICTDNVKTGIANTLGNKGAVGVSFMFNGTSLGFVNSHLTSGSEKKLRRNQNYMNILRFLALGDKKLSPFNITHRFTHLFWFGDLNYRVDLPTWEAETIIQKIKQQQYADLLSHDQLLTERREQKVFLHFEEEEITFAPTYRFERLTRDKYAYTKQKATGMKYNLPSWCDRVLWKSYPLVHVVCQSYGSTSDIMTSDHSPVFATFEAGVTSQFVSKNGPGTVDSQGQIEFLRCYATLKTKSQTKFYLEFHSSCLESFVKSQEGENEEGSEGELVVKFGETLPKLKPIISDPEYLLDQHILISIKSSDSDESYGEGCIALRLEATETQLPIYTPLTHHGELTGHFQGEIKLQTSQGKTREKLYDFVKTERDESSGPKTLKSLTSHDPMKQWEVTSRAPPCSGSSITEIINPNYMGVGPFGPPMPLHVKQTLSPDQQPTAWSYDQPPKDSPLGPCRGESPPTPPGQPPISPKKFLPSTANRGLPPRTQESRPSDLGKNAGDTLPQEDLPLTKPEMFENPLYGSLSSFPKPAPRKDQESPKMPRKEPPPCPEPGILSPSIVLTKAQEADRGEGPGKQVPAPRLRSFTCSSSAEGRAAGGDKSQGKPKTPVSSQAPVPAKRPIKPSRSEINQQTPPTPTPRPPLPVKSPAVLHLQHSKGRDYRDNTELPHHGKHRPEEGPPGPLGRTAMQVRCATRGFVCICVCVCMRECVCVYLCICVCMCVCTHAYVRACVNACMCTHASDGPGNCSMRRESQDLNPGLPVPHIPDPALPLQQLLKGRKAGLWINLV

SEQ ID NO: 1029616 - protein, 1051 aa, Homo sapiens
LCDSRVDSLLENHALCAAGAREAQWPHEGRTPEVAQPCRQGVLGGGSLAKAQAENRSVTHLFSSKVKAESLGIPQKMQLKVDVESGKLIIKKSKDGSEDKFYSHKKILQLIKSQKFLNKLVILVETEKEKILRKEYVFADSKKREGFCQLLQQMKNKHSEQPEPDMITIFIGTWNMGNAPPPKKITSWFLSKGQGKTRDDSADYIPHDIYVIGTQEDPLSEKEWLEILKHSLQEITSVTFKTVAIHTLWNIRIVVLAKPEHENRISHICTDNVKTGIANTLGNKGAVGVSFMFNGTSLGFVNSHLTSGSEKKLRRNQNYMNILRFLALGDKKLSPFNITHRFTHLFWFGDLNYRVDLPTWEAETIIQKIKQQQYADLLSHDQLLTERREQKVFLHFEEEEITFAPTYRFERLTRDKYAYTKQKATGMKYNLPSWCDRVLWKSYPLVHVVCQSYGSTSDIMTSDHSPVFATFEAGVTSQFVSKNGPGTVDSQGQIEFLRCYATLKTKSQTKFYLEFHSSCLESFVKSQEGENEEGSEGELVVKFGETLPKLKPIISDPEYLLDQHILISIKSSDSDESYGEGCIALRLEATETQLPIYTPLTHHGELTGHFQGEIKLQTSQGKTREKLYDFVKTERDESSGPKTLKSLTSHDPMKQWEVTSRAPPCSGSSITEIINPNYMGVGPFGPPMPLHVKQTLSPDQQPTAWSYDQPPKDSPLGPCRGESPPTPPGQPPISPKKFLPSTANRGLPPRTQESRPSDLGKNAGDTLPQEDLPLTKPEMFENPLYGSLSSFPKPAPRKDQESPKMPRKEPPPCPEPGILSPSIVLTKAQEADRGEGPGKQVPAPRLRSFTCSSSAEGRAAGGDKSQGKPKTPVSSQAPVPAKRPIKPSRSEINQQTPPTPTPRPPLPVKSPAVLHLQHSKGRDYRDNTELPHHGKHRPEEGPPGPLGRTAMQVRCATRGFVCICVCVCMRECVCVYLCICVCMCVCTHAYVRACVNACMCTHASDGPGNCSMRRESQDLNPGLPVPHIPDPALPLQQLLKGRKAGLWINLV

SEQ ID NO: 1029617 - protein, 93 aa, Homo sapiens
GALLSQLKMADESETAVKPPAPPLPQMMEGNGNGHEHCSDCENEEDNSYNRGGLSPANDTGAKKKKKKQKKKKEKGSETDSAQDQPVKMNSLP

SEQ ID NO: 1029618 - protein, 61 aa, Homo sapiens
GALLSQLKMADESETAVKPPAPPLPQMMEGNGNGHEHCSDCENEEDNSYNRGMNSLPAERI

SEQ ID NO: 1029619 - protein, 199 aa, Homo sapiens
GHAWENQKGLHLDYKIDQQAQLQSLHIEWWVRNADVQVFEGKPPCVQEGVPAPSNNQGKGRSYSRPSWSCSTRGTPTPRGVLSTRGPVSRGRGLLTPRARGVPPTGYRPPPPPPTQETYGEYDYDDGYGTAYDEQSYDSYDNSYSTPAQSGADYYDYGHGLSEETYDSYGQEEWTNSRHKAPSARTAKGVYRDQPYGRY

SEQ ID NO: 1029620 - protein, 155 aa, Homo sapiens
GHAWENQKGLHLDYKIDQQAQLQSLHIEWWVRNADVQVFEGKPPCVQEGVPAPSNNQGKGRSYSRPSWSCSTRGTPTPRGVLSTRGPVSRGRGLLTPRARGVPPTGYRPPPPPPTQETYGEYDYDDGYGTAYDEQSYDSYDNSYSTPAQRARRVD

SEQ ID NO: 1029621 - protein, 100 aa, Homo sapiens
YPRFFFEGGSLAADDLLIFPPLQDYDDGYGTAYDEQSYDSYDNSYSTPAQSGADYYDYGHGLSEETYDSYGQEEWTNSRHKAPSARTAKGVYRDQPYGRY

SEQ ID NO: 1029622 - protein, 97 aa, Homo sapiens
QSVIWIHKYTSYLRYLSQNNDYDDGYGTAYDEQSYDSYDNSYSTPAQSGADYYDYGHGLSEETYDSYGQEEWTNSRHKAPSARTAKGVYRDQPYGRY

SEQ ID NO: 1029623 - protein, 94 aa, Homo sapiens
LTSLNLITVLSFYPPLQDYDDGYGTAYDEQSYDSYDNSYSTPAQSGADYYDYGHGLSEETYDSYGQEEWTNSRHKAPSARTAKGVYRDQPYGRY

SEQ ID NO: 1029624 - protein, 94 aa, Homo sapiens
  misc_feature (10)..(10): Xaa can be any naturally occurring amino acid
  misc_feature (14)..(14): Xaa can be any naturally occurring amino acid
FITIFGKVTXKRSXTPKDYDDGYGTAYDEQSYDSYDNSYSTPAQSGADYYDYGHGLSEETYDSYGQEEWTNSRHKAPSARTAKGVYRDQPYGRY

SEQ ID NO: 1029625 - protein, 97 aa, Homo sapiens; identical to SEQ ID NO: 1029622

SEQ ID NO: 1029626 - protein, 199 aa, Homo sapiens; identical to SEQ ID NO: 1029619

SEQ ID NO: 1029627 - protein, 160 aa, Homo sapiens
GHAWENQKGLHLDYKIDQQAQLQSLHIEWWVRNADVQVFEGKPPCVQEGVPAPSNNQGKGRSYSRPSWSCSTRGTPTPRGVLSTRGPVSRGRGLLTPRARGVPPTGYRPPPPPPTQETYGEYDYDDGYGTAYDEQSYDSYDNSYSTPAQIIFFYEQSLFK

SEQ ID NO: 1029628 - protein, 119 aa, Homo sapiens
MEIPGGYQKFLPKRPSQLIVTSQGFDTQSEIRRSDFLITPAPDYDDGYGTAYDEQSYDSYDNSYSTPAQSGADYYDYGHGLSEETYDSYGQEEWTNSRHKAPSARTAKGVYRDQPYGRY

SEQ ID NO: 1029629 - protein, 100 aa, Homo sapiens; identical to SEQ ID NO: 1029621

SEQ ID NO: 1029630 - protein, 439 aa, Homo sapiens
MDPLSELQDDLTLDDTSEALNQLKLASIDEKNWPSDEMPDFPKSDDSKSSSPELVTHLKWDDPYYDIARHQIVEVAGDDKYGRKIIVFSACRMPPSHQLDHSKLLGYLKHTLDQYVESDYTLLYLHHGLTSDNKPSLSWLRDAYREFDRKYKKNIKALYIVHPTMFIKTLLILFKPLISFKFGQKIFYVNYLSELSEHVKLEQLGIPRQVLKYDDFLKSTQKSPATAPKPMPPRPPLPNQQFGVSLQHLQEKNPEQEPIPIVLRETVAYLQAHALTTEGIFRRSANTQVVREVQQKYNMGLPVDFDQYNELHLPAVILKTFLRELPEPLLTFDLYPHVVGFLNIDESQRVPATLQVLQTLPEENYQVLRFLTAFLVQISAHSDQNKMTNTNLAVVFGPNLLWAKDAAITLKAINPINTFTKFLLDHQGELFPSPDPSGL

SEQ ID NO: 1029631 - protein, 435 aa, Homo sapiens
MDPLSELQDDLTLDDTSEALNQLKLASIDEKNWPSDEMPDFPKSDDSKSSSPELVTHLKWDDPYYDIARHQIVEVAGDDKYGRKIIVFSACRMPPSHQLDHSKLLGYLKHTLDQYVESDYTLLYLHHGLTSDNKPSLSWLRDAYREFDRKYKKNIKALYIVHPTMFIKTLLILFKPLISFKFGQKIFYVNYLSELSEHVKLEQLGIPRQVLKYDDFLKSTQKSPARSGGHAGGPLEKRGARLQHLQEKNPEQEPIPIVLRETVAYLQAHALTTEGIFRRSANTQVVREVQQKYNMGLPVDFDQYNELHLPAVILKTFLRELPEPLLTFDLYPHVVGFLNIDESQRVPATLQVLQTLPEENYQVLRFLTAFLVQISAHSDQNKMTNTNLAVVFGPNLLWAKDAAITLKAINPINTFTKFLLDHQGELFPSPDPSGL

SEQ ID NO: 1029632 - protein, 353 aa, Homo sapiens
GCNELRSHSSLGEGDSVSKKKSMHWDPSVAPVPPRLLLSCPFCLCKYKKNIKALYIVHPTMFIKTLLILFKPLISFKFGQKIFYVNYLSELSEHVKLEQLGIPRQVLKYDDFLKSTQKSPATAPKPMPPRPPLPNQQFGVSLQHLQEKNPEQEPIPIVLRETVAYLQAHALTTEGIFRRSANTQVVREVQQKYNMGLPVDSGCAELLSAAPTPGLPVDFDQYNELHLPAVILKTFLRELPEPLLTFDLYPHVVGFLNIDESQRVPATLQVLQTLPEENYQVLRFLTAFLVQISAHSDQNKMTNTNLAVVFGPNLLWAKDAAITLKAINPINTFTKFLLDHQGELFPSPDPSGL

SEQ ID NO: 1029633 - protein, 439 aa, Homo sapiens; identical to SEQ ID NO: 1029630

SEQ ID NO: 1029634 - protein, 439 aa, Homo sapiens; identical to SEQ ID NO: 1029630

SEQ ID NO: 1029635 - protein, 115 aa, Homo sapiens
MIPEPVLWGSSLTSPAPSASQAGPGHNFAGLSQDHQQCIQPPGAWAAAGSSSVPWSLASARAALLSALLCVSSVAHSPIHWGAFRIYLVFLMSPTGLYPRERVLVLCESSVHIHT

SEQ ID NO: 1029636 - protein, 439 aa, Homo sapiens; identical to SEQ ID NO: 1029630

SEQ ID NO: 1029637 - protein, 157 aa, Homo sapiens
MDPLSELQDDLTLDDTSEALNQLKLASIDEKNWPSDEMPDFPKSDDSKSSSPELVTHLKWDDPYYDIARHQIVEVAGDDKYGRKIIVFSACRMPPSHQLDHSKLLGYLKHTLDQYVESDYTLLYLHHGLTSDNKPRSSHQPRSIPQATVNPQATVNP

SEQ ID NO: 1029638 - protein, 439 aa, Homo sapiens; identical to SEQ ID NO: 1029630

SEQ ID NO: 1029639 - protein, 421 aa, Homo sapiens
MKSYTPYFILLWSAVGIAKAAKIIIVPPIMFESHMYIFKTLASALHERGHHTVFLLSEGRDIAPSNHYSLQRYPGIFNSTTSDAFLQSKMRNIFSGRLTAIELFDILDHYTKNCDLMVGNHALIQGLKKEKFDLLLVDPNDMCGFVIAHLLGVKYAVFSTGLWYPAEVGAPAPLAYVPEFNSLLTDRMNLLQRMKNTGVYLISRLGVSFLVLPKYERIMQKYNLLPEKSMYDLVHGSSLWMLCTDVALEFPRPTLPNVVYVGGILTKPASPLPEDLQRWVNGANEHGFVLVSFGAGVKYLSEDIANKLAGALGRLPQKVIWRFSGPKPKNLGNNTKLIEWLPQNDLLGHSKIKAFLSHGGLNSIFETMYHGVPVVGIPLFGDHYDTMTRVQAKGMGILLEWKTVTEKELYEALVKVINNPR

SEQ ID NO: 1029640 - protein, 541 aa, Homo sapiens
MKSYTPYFILLWSAVGIAKAAKIIIVPPIMFESHMYIFKTLASALHERGHHTVFLLSEGRDIAPSNHYSLQRYPGIFNSTTSDAFLQSKMRNIFSGRLTAIELFDILDHYTKNCDLMVGNHALIQGLKKEKFDLLLVDPNDMCGFVIAHLLGVKYAVFSTGLWYPAEVGAPAPLAYVPEFNSLLTDRMNLLQRMKNTGVYLISRLGVSFLVLPKYERIMQKYNLLPEKSMYDLVHGSSLWMLCTDVALEFPRPTLPNVVYVGGILTKPASPLPEDLQRWVNGANEHGFVLVSFGAGVKYLSEDIANKLAGALGRLPQKVIWRFSGPKPKNLGNNTKLIEWLPQNDLLGHSKIKAFLSHGGLNSIFETMYHGVPVVGIPLFGDHYDTMTRVQAKGMGILLEWKTVTEKELYEALVKVINNPSYRQRAQKLSEIHKDQPGHPVNRTIYWIDYIIRHNGAHHLRAAVHQISFCQYFLLDIAFVLLLGAALLYFLLSWVTKFIYRKIKSLWSRNKHSTVNGHYHNGILNGKYKRNGHIKHEKKVK

SEQ ID NO: 1029641 - protein, 541 aa, Homo sapiens
MKSYTPYFILLWSAVGIAKAAKIIIVPPIMFESHMYIFKTLASALHERGHHTVFLLSEGRDIAPSNHYSLQRYPGIFNSTTSDAFLQSKMRNIFSGRLPAIELFDILDHYTKNCDMMVGNHALIQGLKKEKFDLLLVDPNDMCGFVIAHLLGVKYAVFSTGLWYPAEVGAPAPLAYVPEFNSLLTDRMNLLQRMKNTGVYLISRLGVSFLVLPKYERIMQKYNLLPEKSMYDLVHGSSLWMLCTDVALEFPRPTLPNVVYVGGILTKPASPLPEDLQRWVNGANEHGFVLVSFGAGVKYLSEDIANKLAGALGRLPQKVIWRFSGPKPKNLGNNTKLIEWLPQNDLLGHSKIKAFVSHGGLNSIFETMYHGVPVVGIPVFGDHYDTMTRVQAKGMGILLEWKTVTEKELYEALVKVINNPSYRQRAQKLSEIHKDQPGHPVNRTIYWIDYIIRHNGAHHLRAAVHQISFCQYFLLDIAFVLLLGAALLYFLLSWVTKFIYRKIKSLWSRNKHSTVNGHYHNGILNGKYKRNGHIKHEKKVK

SEQ ID NO: 1029642 - protein, 541 aa, Homo sapiens; identical to SEQ ID NO: 1029641

SEQ ID NO: 1029643 - protein, 146 aa, Homo sapiens
GQSRAQRMSLRALPFQLGRCRMAPAKKGGEKKKGRSAINEVVTREYTINIHKRIHGVGFKKRAPRALKEIRKFAMKEMGTPDVRIDTRLNKAVWAKGIRNVPYRIRVRLSRKRNEDEDSPNKLYTLVTYVPVTTFKNLQTVNVDEN

SEQ ID NO: 1029644 - protein, 142 aa, Homo sapiens
PKIRPLWSGPFQLGRCRMAPAKKGGEKKKGRSAINEVVTREYTINIHKRIHGVGFKKRAPRALKEIRKFAMKEMGTPDVRIDTRLNKAVWAKGIRNVPYRIRVRLSRKRNEDEDSPNKLYTLVTYVPVTTFKNLQTVNVDEN

SEQ ID NO: 1029645 - protein, 353 aa, Homo sapiens
TRPRTSFLTSRWSVSLLCTPPLSRPACCSLAVALFRDAPVCSCVAVFIQCSADPLWEEGNVFFLHGMAPLWPALFFIPPPGSGVRQLPSHFNNRAAPVFLPTPVLFTRAHPWFHGSPPTMCRRTPPLFSFPVVFQLCNTTAPRAPDPIRAEDLELVFGYTILSRIHAVSPEKSLNQFGSDYPLDAEGKVTETRCYPHFCMVFNFKECKPMPSPSLDRFRLCVMAAPGRMAPAKKGGEKKKGRSAINEVVTREYTINIHKRIHGVGFKKRAPRALKEIRKFAMKEMGTPDVRIDTRLNKAVWAKGIRNVPYRIRVRLSRKRNEDEDSPNKLYTLVTYVPVTTFKNLQTVNVDEN

SEQ ID NO: 1029646 - protein, 146 aa, Homo sapiens; identical to SEQ ID NO: 1029643

SEQ ID NO: 1029647 - protein, 125 aa, Homo sapiens [sequence omitted]

SEQ ID NO: 1029648 - protein, 146 aa, Homo sapiens; identical to SEQ ID NO: 1029643

SEQ ID NO: 1029649 - protein, 146 aa, Homo sapiens; identical to SEQ ID NO: 1029643

SEQ ID NO: 1029650 - protein, 133 aa, Homo sapiens
LNKLLSLCLYPFWLISIPIMAVHVTNILFQINETINIHKRIHGVGFKKRAPRALKEIRKFAMKEMGTPDVRIDTRLNKAVWAKGIRNVPYRIRVRLSRKRNEDEDSPNKLYTLVTYVPVTTFKNLQTVNVDEN

SEQ ID NO: 1029651 - protein, 125 aa, Homo sapiens [sequence omitted]

SEQ ID NO: 1029652 - protein, 146 aa, Homo sapiens; identical to SEQ ID NO: 1029643

SEQ ID NO: 1029653 - protein, 146 aa, Homo sapiens; identical to SEQ ID NO: 1029643

SEQ ID NO: 1029654 - protein, 142 aa, Homo sapiens; identical to SEQ ID NO: 1029644

SEQ ID NO: 1029655 - protein, 125 aa, Homo sapiens [sequence omitted]

SEQ ID NO: 1029656 - protein, 125 aa, Homo sapiens [sequence omitted]

SEQ ID NO: 1029657 - protein, 146 aa, Homo sapiens; identical to SEQ ID NO: 1029643

SEQ ID NO: 1029658 - protein, 146 aa, Homo sapiens; identical to SEQ ID NO: 1029643

SEQ ID NO: 1029659 - protein, 134 aa, Homo sapiens
GFPTGTLQMGSRKEGCREKKKGRSAINEVVTREYTINIHKRIHGVGFKKRAPRALKEIRKFAMKEMGTPDVRIDTRLNKAVWAKGIRNVPYRIRVRLSRKRNEDEDSPNKLYTLVTYVPVTTFKNLQTVNVDEN

SEQ ID NO: 1029660 - protein, 170 aa, Homo sapiens
MAPAKKGGEKKKGRSAINEVVTREYTINIHKRIHGVGFKKRAPRALKEIRKFAMKEKKCCLFIHQYVTPKEQEGIQKNNLEELTEELTKVMVDYIGMENFWKRYNKVKLEQLSLQHRRAQLLDINGKLREMSEQYLDGISVSDEVLSQLNPLFIVNYQSNLLQRADKQGS

SEQ ID NO: 1029661 - protein, 152 aa, Homo sapiens
MDGPLKVESLFHRWEIEAPRANSARGRMAPAKKGGEKKKGRSAINEVVTREYTINIHKRIHGVGFKKRAPRALKEIRKFAMKEMGTPDVRIDTRLNKAVWAKGIRNVPYRIRVRLSRKRNEDEDSPNKLYTLVTYVPVTTFKNLQTVNVDEN

SEQ ID NO: 1029662 - protein, 146 aa, Homo sapiens; identical to SEQ ID NO: 1029643

SEQ ID NO: 1029663 - protein, 110 aa, Homo sapiens
GFPTGTLQMGSRKEGCREKKKGRSAINEVVTREYTINIHKRIHGVGFKKRAPRALKEIRKFAMKEMGLQMSALQPGLTKLVWPRIRMSHPDPFRCPEPIGGVPISYTCTL

SEQ ID NO: 1029664 - protein, 146 aa, Homo sapiens; identical to SEQ ID NO: 1029643

SEQ ID NO: 1029665 - protein, 125 aa, Homo sapiens [sequence omitted]

SEQ ID NO: 1029666 - protein, 146 aa, Homo sapiens; identical to SEQ ID NO: 1029643

SEQ ID NO: 1029667 - protein, 150 aa, Homo sapiens [sequence omitted]

SEQ ID NO: 1029668 - protein, 180 aa, Homo sapiens
VGRAADSGDVNPAGIILLSTNIQEPAHDLRMYGKIIFVLLLSAIVSISALSTTEVAMHTSTSSSVTKSYISSQTNDTHKRDTYAATPRAHEVSEISVRTVYPPEEETGERVQLAHHFSEPEITLIIFGVMAGVIGTILLISYGIRRLIKKSPSDVKPLPSPDTDVPLSSVEIENPETSDQ

SEQ ID NO: 1029669 - protein, 167 aa, Homo sapiens
SVAHYLRRAQIMISGSCLDRELICVLLMSAIVSISALSTTEVAMHTSTSSSVTKSYISSQTNDTHKRDTYAATPRAHEVSEISVRTVYPPEEETGERVQLAHHFSEPEITLIIFGVMAGVIGTILLISYGIRRLIKKSPSDVKPLPSPDTDVPLSSVEIENPETSDQ

SEQ ID NO: 1029670 - protein, 123 aa, Homo sapiens [sequence omitted]

SEQ ID NO: 1029671 - protein, 150 aa, Homo sapiens [sequence omitted]

SEQ ID NO: 1029672 - protein, 117 aa, Homo sapiens; identical to SEQ ID NO: 760499

SEQ ID NO: 1029673 - protein, 90 aa, Homo sapiens
GGEVSPRPGQAPGRAVRPSSRVPSWAERTRRCPAPDQTSRGLGPGPRAASAPVEPLRVSGFGAGARGRGSSVHACSLRRRGSRPGHGFPE

SEQ ID NO: 1029674 - protein, 90 aa, Homo sapiens; identical to SEQ ID NO: 1029673

SEQ ID NO: 1029675 - protein, 935 aa, Homo sapiens
GAPPPASLPPCSLISECCASNQRDSVGIGPSEPGVGYSLVVCRFLSWSEKRNIRVGVTRIFQVQIEHDPELEKESPGLKTSPIDESEVQTATDSPSVKPNELEEESTPSIQTETLVQQEEPCEEEAEKATCDSDFAVETLELETQGEEVKEEIPLVASASVSIEQFTENAEECALNQQMFNSDLEKKGAEIINPKTALLPSDSVFAEERNLKGILEESPSEAEDFISGITQTMVEAVAEVEKNETVSEILPSTCIVTLVPGIPTGDEKTVDKKNISEKKGNMDEKEEKEFNTKETRMDLQIGTEKAEKNEGRMDAEKVEKMAAMKEKPAENTLFKAYPNKGVGQANKPDETSKTSILAVSDVSSSKPSIKAVIVSSPKAKATVSKTENQKSFPKSVPRDQINAEKKLSAKEFGLLKPTSARSGLAESSSKFKPTQSSLTRGGSGRISALQGKLSKLDYRDITKQSQETEARPSIMKRDDSNNKTLAEQNTKNPKSTTGRSSKSKEEPLFPFNLDEFVTVDEVIEEVNPSQAKQNPLKGKRKETLKNVPFSELNLKKKKGKTSTPRGVEGELSFVTLDEIGEEEDAAAHLAQALVTVDEVIDEEELNMEEMVKNSNSLFTLDELIDQDDCISHSEPKDVTVLSVAEEQDLLKQERLVTVDEIGEVEELPLNESADITFATLNTKGNEGDTVRDSIGFISSQVPEDPSTLVTVDEIQDDSSDLHLVTLDEVTEEDEDSLADFNNLKEELNFVTVDEVGEEEDGDNDLKVELAQSKNDHPTDKKGNRKKRAVDTKKTKLESLSQVGPVNENVMEEDLKTMIERHLTAKTPTKRVRIGKTLPSEKAVVTEPAKGEEAFQMSEVDEESGLKDSEPERKRKKTEDSSSGKSVASDVPEELDFLVPKAGFFCPICSLFYSGEKAMTNHCKSTRHKPEERSSR

SEQ ID NO: 1029676 - protein, 742 aa, Homo sapiens
GAPPPASLPPCSLISECCASNQRDSVGIGPSEPGVGYSLVVCRFLSWSEKRNIRVGVTRIFQVQIEHDPELEKESPGLKTSPIDESEVQTATDSPSVKPNELEEESTPSIQTETLVQQEEPCEEEAEKATCDSDFAVETLELETQGEEVKEEIPLVASASVSIEQFTENAEECALNQQMFNSDLEKKGAEIINPKTALLPSDSVFAEERNLKGILEESPSEAEDFISGITQTMVEAVAEVEKNETVSEILPSTCIVTLVPGIPTGDEKTVDKKNISEKKGNMDEKEEKEFNTKETRMDLQIGTEKAEKNEGRMDAEKVEKMAAMKEKPAENTLFKAYPNKGVGQANKPDETSKTSILAVSDVSSSKPSIKAVIVSSPKAKATVSKTENQKSFPKSVPRDQINAEKKLSAKEFGLLKPTSARSGLAESSSKFKPTQSSLTRGGSGRISALQGKLSKLDYRDITKQSQETEARPSIMKRDDSNNKTLAEQNTKNPKSTTGRSSKSKEEPLFPFNLDEFVTVDEVIEEVNPSQAKQNPLKGKRKETLKNVPFSELNLKKKKGKTSTPRGVEGELSFVTLDEIGEEEDAAAHLAQALVTVDEVIDEEELNMEEMVKNSNSLFTLDELIDQDDCISHSEPKDVTVLSVAEEQDLLKQERLVTVDEIGEVEELPLNESADITFATLNTKGNEGDTVRDSIGFISSQVPEDPSTLVTVDEIQDDSSDLHLVTLDEVTEEDEDSLADSGI

SEQ ID NO: 1029677 - protein, 736 aa, Homo sapiens
SYPRDVYPLRVSDMLDRCSCRYNAQCMLSRRILPSTCIVTLVPGIPTGDEKTVDKKNISEKKGNMDEKEEKEFNTKETRMDLQIGTEKAEKNEGRMDAEKVEKMAAMKEKPAENTLFKAYPNKGVGQANKPDETSKTSILAVSDVSSSKPSIKAVIVSSPKAKATVSKTENQKSFPKSVPRDQINAEKKLSAKEFGLLKPTSARSGLAESSSKFKPTQSSLTRGGSGRISALQGKLSKLDYRDITKQSQETEARPSIMKRDDSNNKTLAEQNTKNPKSTTGRSSKSKEEPLFPFNLDEFVTVDEVIEEVNPSQAKQNPLKGKRKETLKNVPFSELNLKKKKGKTSTPRGVEGELSFVTLDEIGEEEDAAAHLAQALVTVDEVIDEEELNMEEMVKNSNSLFTLDELIDQDDCISHSEPKDVTVLSVAEEQDLLKQERLVTVDEIGEVEELPLNESADITFATLNTKGNEGDTVRDSIGFISSQVPEDPSTLVTVDEIQDDSSDLHLVTLDEVTEEDEDSLADFNNLKEELNFVTVDEVGEEEDGDNDLKVELAQSKNDHPTDKKGNRKKRAVDTKKTKLESLSQVGPVNENVMEEDLKTMIERHLTAKTPTKRVRIGKTLPSEKAVVTEPAKGEEAFQMSEVDEESGLKDSEPERKRKKTEDSSSGKSVASDVPEELDFLVPKAGFFCPICSLFYSGEKAMTNHCKSTRHKQNTEKFMAKQRKEKEQNEAEERSSR

SEQ ID NO: 1029678 - protein, 971 aa, Homo sapiens
GAPPPASLPPCSLISECCASNQRDSVGIGPSEPGVGYSLVVCRFLSWSEKRNIRVGVTRIFQVQIEHDPELEKESPGLKTSPIDESEVQTATDSPSVKPNELEEESTPSIQTETLVQQEEPCEEEAEKATCDSDFAVETLELETQGEEVKEEIPLVASASVSIEQFTENAEECALNQQMFNSDLEKKGAEIINPKTALLPSDSVFAEERNLKGILEESPSEAEDFISGITQTMVEAVAEVEKNETVSEILPSTCIVTLVPGIPTGDEKTVDKKNISEKKGNMDEKEEKEFNTKETRMDLQIGTEKAEKNEGRMDAEKVEKMAAMKEKPAENTLFKAYPNKGVGQANKPDETSKTSILAVSDVSSSKPSIKAVIVSSPKAKATVSKTENQKSFPKSVPRDQINAEKKLSAKEFGLLKPTSARSGLAESSSKFKPTQSSLTRGGSGRISALQGKLSKLDYRDITKQSQETEARPSIMKRDDSNNKTLAEQNTKNPKSTTGRSSKSKEEPLFPFNLDEFVTVDEVIEEVNPSQAKQNPLKGKRKETLKNVPFSELNLKKKKGKTSTPRGVEGELSFVTLDEIGEEEDAAAHLAQALVTVDEVIDEEELNMEEMVKNSNSLFTLDELIDQDDCISHSEPKDVTVLSVAEEQDLLKQERLVTVDEIGEVEELPLNESADITFATLNTKGNEGDTVRDSIGFISSQVPEDPSTLVTVDEIQDDSSDLHLVTLDEVTEEDEDSLADFNNLKEELNFVTVDEVGEEEDGDNDLKVELAQSKNDHPTDKKGNRKKRAVDTKKTKLESLSQVGPVNENVMEEDLKTMIERHLTAKTPTKRVRIGKTLPSEKAVVTEPAKGEEAFQMSEVDEESGLKDSEPERKRKKTEDSSSGKSVASDVPEELDFLVPKAGFFCPICSLFYSGEKAMTNHCKSTRHKQNTQINWTLNKFLVNSFLSPNHLELLSSASFCSFSFLCLAMNF

SEQ ID NO: 1029679 - protein, 525 aa, Homo sapiens
GAPPPASLPPCSLISECCASNQRDSVGIGPSEPGVGYSLVVCRFLSWSEKRNIRVGVTRIFQVQIEHDPELEKESPGLKTSPIDESEVQTATDSPSVKPNELEEESTPSIQTETLVQQEEPCEEEAEKATCDSDFAVETLELETQGEEVKEEIPLVASASVSIEQFTENAEECALNQQMFNSDLEKKGAEIINPKTALLPSDSVFAEERNLKGILEESPSEAEDFISGITQTMVEAVAEVEKNETVSEILPSTCIVTLVPGIPTGDEKTVDKKNISEKKGNMDEKEEKEFNTKETRMDLQIGTEKAEKNEGRMDAEKVEKMAAMKEKPAENTLFKAYPNKGVGQANKPDETSKTSILAVSDVSSSKPSIKAVIVSSPKAKATVSKTENQKSFPKSVPRDQINAEKKLSAKEFGLLKPTSARSGLAESSSKFKPTQSSLTRGGSGRISALQGKLSKLDYRDITKQSQETEARPSIMKRDDSNNKTLAEQNTKNPKSTTGRSSKSKELKLQPRELELGKLCHQKKLL

SEQ ID NO: 1029680 - protein, 446 aa, Homo sapiens
GAPPPASLPPCSLISECCASNQRDSVGIGPSEPGVGYSLVVCRFLSWSEKRNIRVGVTRIFQVQIEHDPELEKESPGLKTSPIDESEVQTATDSPSVKPNELEEESTPSIQTETLVQQEEPCEEEAEKATCDSDFAVETLELETQGEEVKEEIPLVASASVSIEQFTENAEECALNQQMFNSDLEKKGAEIINPKTALLPSDSVFAEERNLKGILEESPSEAEDFISGITQTMVEAVAEVEKNETVSEILPSTCIVTLVPGIPTGDEKTVDKKNISEKKGNMDEKEEKEFNTKETRMDLQIGTEKAEKNEGRMDAEKVEKMAAMKEKPAENTLFKAYPNKGVGQANKPDETSKTSILAVSDVSSSKPSIKAVIVSSPKAKATVSKTENQKSFPKSVPRDQINAEKKLSAKEFGLLKPTSARSGLAESSSKFKPTQSSLTRGGRRIS

SEQ ID NO: 1029681 - protein, 953 aa, Homo sapiens
GAPPPASLPPCSLISECCASNQRDSVGIGPSEPGVGYSLVVCRFLSWSEKRNIRVGVTRIFQVQIEHDPELEKESPGLKTSPIDESEVQTATDSPSVKPNELEEESTPSIQTETLVQQEEPCEEEAEKATCDSDFAVETLELETQGEEVKEEIPLVASASVSIEQFTENAEECALNQQMFNSDLEKKGAEIINPKTALLPSDSVFAEERNLKGILEESPSEAEDFISGITQTMVEAVAEVEKNETVSEILPSTCIVTLVPGIPTGDEKTVDKKNISEKKGNMDEKEEKEFNTKETRMDLQIGTEKAEKNEGRMDAEKVEKMAAMKEKPAENTLFKAYPNKGVGQANKPDETSKTSILAVSDVSSSKPSIKAVIVSSPKAKATVSKTENQKSFPKSVPRDQINAEKKLSAKEFGLLKPTSARSGLAESSSKFKPTQSSLTRGGSGRISALQGKLSKLDYRDITKQSQETEARPSIMKRDDSNNKTLAEQNTKNPKSTTGRSSKSKEEPLFPFNLDEFVTVDEVIEEVNPSQAKQNPLKGKRKETLKNVPFSELNLKKKKGKTSTPRGVEGELSFVTLDEIGEEEDAAAHLAQALVTVDEVIDEEELNMEEMVKNSNSLFTLDELIDQDDCISHSEPKDVTVLSVAEEQDLLKQERLVTVDEIGEVEELPLNESADITFATLNTKGNEGDTVRDSIGFISSQVPEDPSTLVTVDEIQDDSSDLHLVTLDEVTEEDEDSLADFNNLKEELNFVTVDEVGEEEDGDNDLKVELAQSKNDHPTDKKGNRKKRAVDTKKTKLESLSQVGPVNENVMEEDLKTMIERHLTAKTPTKRVRIGKTLPSEKAVVTEPAKGEEAFQMSEVDEESGLKDSEPERKRKKTEDSSSGKSVASDVPEELDFLVPKAGFFCPICSLFYSGEKAMTNHCKSTRHKQNTEKFMAKQRKEKEQNEAEERSSR

SEQ ID NO: 1029682 - protein, 495 aa, Homo sapiens
GIASNKMLIILQVQIEHDPELEERKTLAEQNTKNPKSTTGRSSKSKEEPLFPFNLDEFVTVDEVIEEVNPSQAKQNPLKGKRKETLKNVPFSELNLKKKKGKTSTPRGVEGELSFVTLDEIGEEEDAAAHLAQALVTVDEVIDEEELNMEEMVKNSNSLFTLDELIDQDDCISHSEPKDVTVLSVAEEQDLLKQERLVTVDEIGEVEELPLNESADITFATLNTKGNEGDTVRDSIGFISSQVPEDPSTLVTVDEIQDDSSDLHLVTLDEVTEEDEDSLADFNNLKEELNFVTVDEVGEEEDGDNDLKVELAQSKNDHPTDKKGNRKKRAVDTKKTKLESLSQVGPVNENVMEEDLKTMIERHLTAKTPTKRVRIGKTLPSEKAVVTEPAKGEEAFQMSEVDEESGLKDSEPERKRKKTEDSSSGKSVASDVPEELDFLVPKAGFFCPICSLFYSGEKAMTNHCKSTRHKQNTEKFMAKQRKEKEQNEAEERSSR

SEQ ID NO: 1029683 - protein, 505 aa, Homo sapiens
GAPPPASLPPCSLISECCASNQRDSVGIGPSEPGVGYSLVVCRFLSWSEKRNIRVGVTRIFQVQIEHDPELEKESPGLKTSPIDESEVQTATDSPSVKPNELEEESTPSIQTETLVQQEEPCEEEAEKATCDSDFAVETLELETQGEEVKEEIPLVASASVSIEQFTENAEECALNQQMFNSDLEKKGAEIINPKTALLPSDSVFAEERNLKGILEESPSEAEDFISGITQTMVEAVAEVEKNETVSEILPSTCIVTLVPGIPTGDEKTVDKKNISEKKGNMDEKEEKEFNTKETRMDLQIGTEKAEKNEGRMDAEKVEKMAAMKEKPAENTLFKAYPNKGVGQANKPDETSKTSILAVSDVSSSKPSIKAVIVSSPKAKATVSKTENQKSFPKSVPRDQINAEKKLSAKEFGLLKPTSARSGLAESSSKFKPTQSSLTRGGSGRISALQGKLSKLDYRDITKQSQETEARPSIMKRDDSNNKVRRVGRMAQCVFEVISSAAVAM

SEQ ID NO: 1029684 - protein, 140 aa, Homo sapiens [sequence omitted]

SEQ ID NO: 1029685 - protein, 140 aa, Homo sapiens [sequence omitted]

SEQ ID NO: 1029686 - protein, 140 aa, Homo sapiens [sequence omitted]

SEQ ID NO: 1029687 - protein, 71 aa, Homo sapiens
GTVRPQGLDSEGGKYVSVSQLSPLLRRSAGTWDGKASAGDAGLHAAADCDPVQGRPPTLTVPSEAPLGHAM

SEQ ID NO: 1029688 - protein, 140 aa, Homo sapiens [sequence omitted]

SEQ ID NO: 1029689 - protein, 71 aa, Homo sapiens; identical to SEQ ID NO: 1029687

SEQ ID NO: 1029690 - protein, 151 aa, Homo sapiens
MCDFTEDQTAEFKEAFQLFDRTGDGKILYSQCGDVMRALGQNPTNAEVLKVLGNPKSDEMNVKVLDFEHFLPMLQTVAKNKDQGTYEDYVEGLRVFDKEGNGTVMGAEIRHVLVTLGEKMTEEEVEMLVAGHEDSNGCINYEELVRMVLNG

SEQ ID NO: 1029691 - protein, 146 aa, Homo sapiens
GHYCRKRSRRAEQSRCVTSPKTRPQSSRRPSSCLTEQVMARSCTASVGNPKSDEMNVKVLDFEHFLPMLQTVAKNKDQGTYEDYVEGLRVFDKEGNGTVMGAEIRHVLVTLGEKMTEEEVEMLVAGHEDSNGCINYEELVRMVLNG

SEQ ID NO: 1029692 - protein, 100 aa, Homo sapiens
MCDFTEDQTAEFKEAFQLFDRTGDGKILYSQCGDVMRALGQNPTNAEVLKVLGNPKSDEMNVKVLDFEHFLPMLQTVAKNKDQGTYEDYVEVFGRWDPLG

SEQ ID NO: 1029693 - protein, 494 aa, Homo sapiens
MCDFTEDQTAEFKEAFQLFDRTGGYNEVDEEEEEGGWRNEEARNEEGDGERKRMEMKTERNADSATGKRAADDDARMTDCPYQATKRPHEDRIDSEQQETVNTKKQTTQTHNKHTQTTTTNKTHPPPTPQPKPPTQHPPPPQQPTDDQTTKAQPDKRANTSTDQHAPRPQTNNATQRKPTDATSTATRNQNDRPNDHKHNDDAQTLTTDSKWRRNGHTTTTTNLNPTANRTPTHNPTHNPQRYPAHNARRHHTDARERPQPNARRNAQTDANATHRTAATNSSQTRTTRDAQPDQRTHKDATPDERQYRTPPPADTEAKRNGSTRTAVTQKATRDTPNAEWAAQQNRERSTHNHSNTACRGRNNTHNTHEWTKPTRETHQNATHNKRDRNRRTNNPRRTTATSTNNHNDGTSSTTEQPNARTNQAENSDDDSDTGRRKQTNPGEATHNAKRASDQQPDRTIPGETQNQDDSDDHDNPAASRKRPNVTRTKGQLT

SEQ ID NO: 1029694 - protein, 151 aa, Homo sapiens
MCDFTEDQTAEFKEAFQLFDRTGDGKILYSQCGDVMRALGQNPTNAEVLKVLGNPKSDEMNVKVLDFEHFLPMLQTVAKNKDQGTYEDYVEGLRVFDKEGNGTVMGAEIRHVLVTLGEKMTEEEVEMLVAGHEDSNGCINYEAFVRHILSG

SEQ ID NO: 1029695 - protein, 151 aa, Homo sapiens; identical to SEQ ID NO: 1029694

SEQ ID NO: 1029696 - protein, 162 aa, Homo sapiens
GWGKLSAETKGYSWETECRPPGHYSFLQLFDRTGDGKILYSQCGDVMRALGQNPTNAEVLKVLGNPKSDEMNVKVLDFEHFLPMLQTVAKNKDQGTYEDYVEGLRVFDKEGNGTVMGAEIRHVLVTLGEKMTEEEVEMLVAGHEDSNGCINYEELVRMVLNG

SEQ ID NO: 1029697 - protein, 163 aa, Homo sapiens
MCDFTEDQTAEFKEACILFQALEFKEAFQLFDRTGDGKILYSQCGDVMRALGQNPTNAEVLKVLGNPKSDEMNVKVLDFEHFLPMLQTVAKNKDQGTYEDYVEGLRVFDKEGNGTVMGAEIRHVLVTLGEKMTEEEVEMLVAGHEDSNGCINYEELVRMVLNG

SEQ ID NO: 1029698 - protein, 112 aa, Homo sapiens
MSRTAEAQRCSQSFGTISSVAFRTVSYGTQVDDSGRVLLFGTAASLRLPQGEFSPGNTRSSSRLFSCTREETRCAREEDEIYKRRDEMLVAGHEDSNGCINYEELVRMVLNG

SEQ ID NO: 1029699 - protein, 151 aa, Homo sapiens; identical to SEQ ID NO: 1029690

SEQ ID NO: 1029700 - protein, 156 aa, Homo sapiens
MCDFTEDQTAEFKEAFQLFDRTGDGKILYSQCGDVMRALGQNPTNAEVLKVLGNPKSDEMNVKVLDFEHFLPMLQTVAKNKDQGTYEDYVEGLRVFDKEGNGTVMGAEIRHVLVTLGEKMTEEEVEMLVAGHEDSNGCINYEAFPCVNFVSSLKFP

SEQ ID NO: 1029701 - protein, 174 aa, Homo sapiens
  misc_feature (3)..(3): Xaa can be any naturally occurring amino acid
  misc_feature (10)..(10): Xaa can be any naturally occurring amino acid
YAXPKTVYFXPKSRTHKRGVFIKNQTAQLKEAFQLFDRTGDGKILYSQCGDVMRALGQNPTNAEVLKVLGNPKSDEMNVKVLDFEHFLPMLQTVAKNKDQGTYEDYVEGLRVFDKEGNGTVMGAEIRHVLVTLGEKMTEEEVKILWQNMKTTIFFKILKIPPNVLKGKDLPKPP

SEQ ID NO: 1029702 - protein, 82 aa, Homo sapiens
SINRTGKGTDSGETGKVINQTADGKILYSQCGDVMMVMGVVMMVMGVVLDSGDGSDDGDDEDDEVMGVMVMVVVVVMTVPVQ

SEQ ID NO: 1029703 - protein, 151 aa, Homo sapiens; identical to SEQ ID NO: 1029694

SEQ ID NO: 1029704 - protein, 151 aa, Homo sapiens; identical to SEQ ID NO: 1029690

SEQ ID NO: 1029705 - protein, 168 aa, Homo sapiens
  misc_feature (3)..(3): Xaa can be any naturally occurring amino acid
  misc_feature (10)..(10): Xaa can be any naturally occurring amino acid
YAXPKTVYFXPKSRTHKRGVFIKNQTAQLKEAFQLFDRTGDGKILYSQCGDVMRALGQNPTNAEVLKVLGNPKSDEMNVKVLDFEHFLPMLQTVAKNKDQGTYEDYVEGLRVFDKEGNGTVMGAEIRHVLVTLGEKMTEEEVEMLVAGHEDSNGCINYEELVRMVLNG

SEQ ID NO: 1029706 - protein, 132 aa, Homo sapiens
MCDFTEDQTAEFKEAFQLFDRTGDGKILYSQCGDVMRALGQNPTNAEVLKVLGNPKSDEMNVKVLDFEHFLPMLQTVAKNNSSVWSWAHSSSAKSFPLSSEAPNSSKSGLANPMDFLAFSGESSVISLFGLY

SEQ ID NO: 1029707 - protein, 121 aa, Homo sapiens
SSNSISQTIFNFTLCLTVDNKQHYRNSTSYSLNDYFILWPIVDSLEVTPVAHSKLVTELSSDTGSSKTRRPFVERTGEPPTHYWLKSKGAHTTMADALWRLRDLMLRDTLNIRQAYNLENV

SEQ ID NO: 1029708 - protein, 121 aa, Homo sapiens; identical to SEQ ID NO: 1029707

SEQ ID NO: 1029709 - protein, 121 aa, Homo sapiens; identical to SEQ ID NO: 1029707

SEQ ID NO: 1029710 - protein, 271 aa, Homo sapiens
SWRFEDAAFGLDEFQIRLAGFLIVICLYTYTSPPKCSGYNNVNMDMIFIYYPLSSFRGRCLQALRMVQRLTYRRRLSYNTASNKTRLSRTPGNRIVYLYTKKVGKAPKSACGVCPGRLRGVRAVRPKVLMRLSKTKKHVSRAYGGSMCAKCVRDRIKRAFLIEEQKIVVKVLKAQAQSQKAIRQAWWCIHCFPSFWAGERLKETAEAGGERLPVSQDHTSASQDSLEEQDGGDTTTIKRARGNSEAFGKSQMDRGGLTGLAPGAQESEKTA

SEQ ID NO: 1029711 - protein, 117 aa, Homo sapiens
MVQRLTYRRRLSYNTASNKTRLSRTPGNRIVYLYTKKVGKAPKSACGVCPGKLRGVRPVRPKVLMRLSKTKKHVSRAYGGSMCAKCVRDRIKRAFLIEEQKIIVKVLKAQAQSQKAK

SEQ ID NO: 1029712 - protein, 137 aa, Homo sapiens
  misc_feature (4)..(4): Xaa can be any naturally occurring amino acid
  misc_feature (27)..(27): Xaa can be any naturally occurring amino acid
  misc_feature (30)..(30): Xaa can be any naturally occurring amino acid
  misc_feature (48)..(48): Xaa can be any naturally occurring amino acid
  misc_feature (73)..(73): Xaa can be any naturally occurring amino acid
  misc_feature (106)..(106): Xaa can be any naturally occurring amino acid
  misc_feature (111)..(111): Xaa can be any naturally occurring amino acid
  misc_feature (114)..(114): Xaa can be any naturally occurring amino acid
TRSXQQRPLMMAAQKITHQSESVSCDXGAXGCRGASQCVPPHLGTCHXTQARHRPDSQDGRSERNTRPVDILXPPRLSPSPGLGSVPGPHWSCSRLCDQPGAWLQXRGPGXGVXKIFHRRRPYLQLTPLSGALASHL

SEQ ID NO: 1029713 - protein, 137 aa, Homo sapiens; identical to SEQ ID NO: 1029712
  misc_feature (4)..(4): Xaa can be any naturally occurring amino acid
  misc_feature (27)..(27): Xaa can be any naturally occurring amino acid
  misc_feature (30)..(30): Xaa can be any naturally occurring amino acid
  misc_feature (48)..(48): Xaa can be any naturally occurring amino acid
  misc_feature (73)..(73): Xaa can be any naturally occurring amino acid
  misc_feature (106)..(106): Xaa can be any naturally occurring amino acid
  misc_feature (111)..(111): Xaa can be any naturally occurring amino acid
  misc_feature (114)..(114): Xaa can be any naturally occurring amino acid

SEQ ID NO: 1029714 - protein, 114 aa, Homo sapiens
MWKSVVGHDVSVSVETQGDDWDTDPDFVNDISEKEQRWGAKTIEGSGRTEHIKKVPKGLEKRKGVMGRAQRKLGDLGEDFKKCQWMTTLHKQHTVKAWHKFLHLDDNTTLFNQK

SEQ ID NO: 1029715 - protein, 406 aa, Homo sapiens
MWKSVVGHDVSVSVETQGDDWDTDPDFVNDISEKEQRWGAKTIEGSGRTEHINIHQLRNKVSEEHDVLRKKEMESGPKASHGYGGRFGVERDRMDKSAVGHEYVAEVEKHSSQTDAAKGFGGKYGVERDRADKSAVGFDYKGEVEKHTSQKDYSRGFGGRYGVEKDKWDKAALGYDYKGETEKHESQRDYAKGFGGQYGIQKDRVDKSAVGFNEMEAPTTAYKKTTPIEAASSGARGLKAKFESMAEEKRKREEEEKAQQVARRQQERKAVTKRSPEAPQPVIAMEEPAVPAPLPKKISSEAWPPVGTPPSSESEPVRTSREHPVPLLPIRQTLPEDNEEPPALPPRTLGISAVALYDYQGEGSDELSFDPDDVITDIEMVDEGWWRGRCHGHFGLFPANYVKLLE

SEQ ID NO: 1029716 - protein, 399 aa, Homo sapiens
RNPYGWLKCSLYFFLFLLHFSLSVAFCFPCFPTSIFVFSIRSQIFPHLFPSLPIHASLYPLILTFPPTFVFHIPVFLPTDSSHHPFPAFVISYNSELSVLADYAKGFGGQYGIQKDRVDKSAVGFNEMEAPTTAYKKTTPIEAASSGARGLKAKFESMAEEKRKREEEEKAQQVARRQQERKAVTKRSPEAPQPVIAMEEPAVPAPLPKKISSEAWPPVGTPPSSESEPVRTSREHPVPLLPIRQTLPEDNEEPPALPPRTLEGLQVEEEPVYEAEPEPEPEPEPEPENDYEDVEEMDRHEQEDEPEGDYEEVLEPEDSSFSSALAGSSGCPAGAGAGAVALGISAVALYDYQGEGSDELSFDPDDVITDIEMVDEGWWRGRCHGHFGLFPANYVKLLE

SEQ ID NO: 1029717 - protein, 486 aa, Homo sapiens [sequence omitted]

SEQ ID NO: 1029718 - protein, 449 aa, Homo sapiens
MWKSVVGHDVSVSVETQGDDWDTDPDFVNDISEKEQRWGAKTIEGSGRTEHINIHQLRNKVSEEHDVLRKKEMESGPKASHGYGGRFGVERDRMDKSAVGHEYVAEVEKHSSQTDAAKGFGGKYGVERDRADKSAVGFDYKGEVEKHTSQKDYAKGFGGQYGIQKDRVDKSAVGFNEMEAPTTAYKKTTPIEAASSGARGLKAKFESMAEEKRKREEEEKAQQVARRQQERKAVTKRSPEAPQPVIAMEEPAVPAPLPKKISSEAWPPVGTPPSSESEPVRTSREHPVPLLPIRQTLPEDNEEPPALPPRTLEGLQVEEEPVYEAEPEPEPEPEPEPENDYEDVEEMDRHEQEDEPEGDYEEVLEPEDSSFSSALAGSSGCPAGAGAGAVALGISAVALYDYQGEGSDELSFDPDDVITDIEMVDEGWWRGRCHGHFGLFPANYVKLLE

SEQ ID NO: 1029719 - protein, 276 aa, Homo sapiens
MGPPAVVVKIAYKKTTPIEAASSGARGLKAKFESMAEEKRKREEEEKAQQVARRQQERKAVTKRSPEAPQPVIAMEEPAVPAPLPKKISSEAWPPVGTPPSSESEPVRTSREHPVPLLPIRQTLPEDNEEPPALPPRTLEGLQVEEEPVYEAEPEPEPEPEPEPENDYEDVEEMDRHEQEDEPEGDYEEVLEPEDSSFSSALAGSSGCPAGAGAGAVALGISAVALYDYQGEGSDELSFDPDDVITDIEMVDEGWWRGRCHGHFGLFPANYVKLLE

SEQ ID NO: 1029720 - protein, 154 aa, Homo sapiens
MWKSVVGHDVSVSVETQGDDWDTDPDFVNDISEKEQRWGAKTIEGSGRTEHINIHQLRNKVSEEHDVLRKKEMESGPKASHGYGGRFGVERDRMDKSAVGHEYVAEVEKHSSQTDAAKGFGGKYGVERDRADKVSDHSLSQPPTSSPVKIAHNH

SEQ ID NO: 1029721 - protein, 486 aa, Homo sapiens [sequence omitted]

SEQ ID NO: 1029722 - protein, 517 aa, Homo sapiens
MWKSVVGHDVSVSVETQGDDWDTDPDFVNDISEKEQRWGAKTIEGSGRTEHINIHQLRNKVSEEHDVLRKKEMESGPKASHGYGGRFGVERDRMDKSAVGHEYVAEVEKHSSQTDAAKGFGGKYGVERDRADKSAVGFDYKGEVEKHTSQKDYSRGFGGRYGVEKDKWDKAALGYDYKGETEKHESQRDYAKGFGGQYGIQKDRVDKSAVGFNEMEAPTTAYKKTTPIEAASSGARGLKAKFESMAEEKRKREEEEKAQQVARRQQERKAVTKRSPEAPQPVIAMEEPAVPAPLPKKISSEAWPPVGTPPSSESEPVRTSREHPVPLLPIRQTLPEDNEEPPALPPRTLEGLQVEEEPVYEAEPEPEPEPEPEPENDYEDVEEMDRHEQEDEPEGDYEEVLEPEDSSFSSALAGSSGCPAGAGAGAVALGISAVALYDYQGEGSDELSFDPDDVITDIEMVDEGWWRGRCHGHFGLFPANYVKLLGFPVCLPGKVRLDCVVCLIVLFAHFPSLKKYL

SEQ ID NO: 1029723 - protein, 986 aa, Homo sapiens
MPGVARLPLLLGLLLLPRPGRPLDLADYTYDLAEEDDSEPLNYKDPCKAAAFLGDIALDEEDLRAFQVQQAVDLRRHTARKSSIKAAVPGNTSTPSCQSTNGQPQRGACGRWRGRSRSRRAATSRPERVWPDGVIPFVIGGNFTGSQRAVFRQAMRHWEKHTCVTFLERTDEDSYIVFTYRPCGCCSYVGRRGGGPQAISIGKNCDKFGIVVHELGHVVGFWHEHTRPDRDRHVSIVRENIQPGQEYNFLKMEPQEVESLGETYDFDSIMHYARNTFSRGIFLDTIVPKYEVNGVKPPIGQRTRLSKGDIAQARKLYKCPACGETLQDSTGNFSSPEYPNGYSAHMHCVWRISVTPGEKIILNFTSLDLYRSRLCWYDYVEVRDGFWRKAPLRGRFCGSKLPEPIVSTDSRLWVEFRSSSNWVGKGFFAVYEAICGGDVKKDYGHIQSPNYPDDYRPSKVCIWRIQVSEGFHVGLTFQSFEIERHDSCAYDYLEVRDGHSESSTLIGRYCGYEKPDDIKSTSSRLWLKFVSDGSINKAGFAVNFFKEVDECSRPNRGGCEQRCLNTLGSYKCSCDPGYELAPDKRRCEAACGGFLTKLNGSITSPGWPKEYPPNKNCIWQLVAPTQYRISLQFDFFETEGNDVCKYDFVEVRSGLTADSKLHGKFCGSEKPEVITSQYNNMRVEFKSDNTVSKKGFKAHFFSDKDECSKDNGGCQQDCVNTFGSYECQCRSGFVLHDNKHDCKEAGCDHKVTSTSGTITSPNWPDKYPSKKECTWAISSTPGHRVKLTFMEMDIESQPECAYDHLEVFDGRDAKAPVLGRFCGSKKPEPVLATGSRMFLRFYSDNSVQRKGFQASHATECGGQVRADVKTKDLYSHAQFGDNNYPGGVDCEWVIVAEEGYGVELVFQTFEVEEETDCGYDYMELFDGYDSTAPRLGRYCGSGPPEEVYSAGDSVLVKFHSDDTITKKGFHLRYTSTKFQDTLHSRK

SEQ ID NO: 1029724 - protein, 730 aa, Homo sapiens
MPGVARLPLLLGLLLLPRPGRPLDLADYTYDLAEEDDSEPLNYKDPCKAAAFLGDIALDEEDLRAFQVQQAVDLRRHTARKSSIKAAVPGNTSTPSCQSTNGQPQRGACGRWRGRSRSRRAATSRPERVWPDGVIPFVIGGNFTGSQRAVFRQAMRHWEKHTCVTFLERTDEDSYIVFTYRPCGCCSYVGRRGGGPQAISIGKNCDKFGIVVHELGHVVGFWHEHTRPDRDRHVSIVRENIQPGQEYNFLKMEPQEVESLGETYDFDSIMHYARNTFSRGIFLDTIVPKYEVNGVKPPIGQRTRLSKGDIAQARKLYKCPACGETLQDSTGNFSSPEYPNGYSAHMHCVWRISVTPGEKIILNFTSLDLYRSRLCWYDYVEVRDGFWRKAPLRGRFCGSKLPEPIVSTDSRLWVEFRSSSNWVGKGFFAVYEAICGGDVKKDYGHIQSPNYPDDYRPSKVCIWRIQVSEGFHVGLTFQSFEIERHDSCAYDYLEVRDGHSESSTLIGRYCGYEKPDDIKSTSSRLWLKFVSDGSINKAGFAVNFFKEVDECSRPNRGGCEQRCLNTLGSYKCSCDPGYELAPDKRRCEAACGGFLTKLNGSITSPGWPKEYPPNKNCIWQLVAPTQYRISLQFDFFETEGNDVCKYDFVEVRSGLTADSKLHGKFCGSEKPEVITSQYNNMRVEFKSDNTVSKKGFKAHFFSEKRPALQPPRGRPHQLKFRVQKRNRTPQ

SEQ ID NO: 1029725 - protein, 717 aa, Homo sapiens
MPGVARLPLLLGLLLLPRPGRPLDLADYTYDLAEEDDSEPLNYKDPCKAAAFLGDIALDEEDLRAFQVQQAVDLRRHTARKSSIKAAVPGNTSTPSCQSTNGQPQRGACGRWRGRSRSRRAATSRPERVWPDGVIPFVIGGNFTGSQRAVFRQAMRHWEKHTCVTFLERTDEDSYIVFTYRPCGCCSYVGRRGGGPQAISIGKNCDKFGIVVHELGHVVGFWHEHTRPDRDRHVSIVRENIQPGQEYNFLKMEPQEVESLGETYDFDSIMHYARNTFSRGIFLDTIVPKYEVNGVKPPIGQRTRLSKGDIAQARKLYKCPACGETLQDSTGNFSSPEYPNGYSAHMHCVWRISVTPGEKIILNFTSLDLYRSRLCWYDYVEVRDGFWRKAPLRGRFCGSKLPEPIVSTDSRLWVEFRSSSNWVGKGFFAVYEAICGGDVKKDYGHIQSPNYPDDYRPSKVCIWRIQVSEGFHVGLTFQSFEIERHDSCAYDYLEVRDGHSESSTLIGRYCGYEKPDDIKSTSSRLWLKFVSDGSINKAGFAVNFFKEVDECSRPNRGGCEQRCLNTLGSYKCSCDPGYELAPDKRRCEAACGGFLTKLNGSITSPGWPKEYPPNKNCIWQLVAPTQYRISLQFDFFETEGNDVCKYDFVEVRSGLTADSKLHGKFCGSEKPEVITSQYNNMRVEFKSDNTVSKKGFKAHFFSGGELFGLLGHPPRRP

SEQ ID NO: 1029726 - protein, 1337 aa, Homo sapiens
MPGVARLPLLLGLLLLPRPGRPLDLADYTYDLAEEDDSEPLNYKDPCKAAAFLGDIALDEEDLRAFQVQQAVDLRRHTARKSSIKAAVPGNTSTPSCQSTNGQPQRGACGRWRGRSRSRRAATSRPERVWPDGVIPFVIGGNFTGSQRAVFRQAMRHWEKHTCVTFLERTDEDSYIVFTYRPCGCCSYVGRRGGGPQAISIGKNCDKFGIVVHELGHVVGFWHEHTRPDRDRHVSIVRENIQPGQEYNFLKMEPQEVESLGETYDFDSIMHYARNTFSRGIFLDTIVPKYEVNGVKPPIGQRTRLSKGDIAQARKLYKCPACGETLQDSTGNFSSPEYPNGYSAHMHCVWRISVTPGEKIILNFTSLDLYRSRLCWYDYVEVRDGFWRKAPLRGRFCGSKLPEPIVSTDSRLWVEFRSSSNWVGKGFFAVYEAICGGDVKKDYGHIQSPNYPDDYRPSKVCIWRIQVSEGFHVGLTFQSFEIERHDSCAYDYLEVRDGHSESSTLIGRYCGYEKPDDIKSTSSRLWLKFVSDGSINKAGFAVNFFKEVDECSRPNRGGCEQRCLNTLGSYKCSCDPGYELAPDKRRCEAACGGFLTKLNGSITSPGWPKEYPPNKNCIWQLVAPTQYRISLQFDFFETEGNDVCKYDFVEVRSGLTADSKLHGKFCGSEKPEVITSQYNNMRVEFKSDNTVSKKGFKAHFFSVLEGAGDRHSHLSGLELLLCPHALVDTVPAPPSALHGDTHAHTHTHVHTHCPIAQETCRGPPLGASRLSPQGPGHLTLAPQEGSYLDFWDTHRGDPEAKKEKKEPEDLQSDPCHLPGHLGTVGKEASSAAPSGTPPPAQIPSAEKKPDPPVRPARPPGPLVTQEPHLGRNGMGASVPTNPPPPLCHSGPPPSGRTELVLSSPHCARPRTGDPSPCPTPSHFDGVCDISCCEVKEGPLRPAPFSCSLLVHVSIFPLVHLSSKQVMVTHAGPLGPPSSSPHSWALLSWSCWMQCPFGPPCRLASHSRPPGLAQLCQLLLCPGGRKSSQASTSPGASQPQPCTDPASALICSPADKDECSKDNGGCQQDCVNTFGSYECQCRSGFVLHDNKHDCKEAGCDHKVTSTSGTITSPNWPDKYPSKKECTWAISSTPGHRVKLTFMEMDIESQPECAYDHLEVFDGRDAKAPVLGRFCGSKKPEPVLATGSRMFLRFYSDNSVQRKGFQASHATECGGQVRADVKTKDLYSHAQFGDNNYPGGVDCEWVIVAEEGYGVELVFQTFEVEEETDCGYDYMELFDGYDSTAPRLGRYCGSGPPEEVYSAGDSVLVKFHSDDTITKKGFHLRYTSTKFQDTLHSRK

SEQ ID NO: 1029727 - protein, 302 aa, Homo sapiens
MPGVARLPLLLGLLLLPRPGRPLDLADYTYDLAEEDDSEPLNYKDPCKAAAFLGDIALDEEDLRAFQVQQAVDLRRHTARKSSIKAAVPGNTSTPSCQSTNGQPQRGACGRWRGRSRSRRAATSRPERVWPDGVIPFVIGGNFTGSQRAVFRQAMRHWEKHTCVTFLERTDEDSYIVFTYRPCGCCSYVGRRGGGPQAISIGKNCDKFGIVVHELGHVVGFWHEHTRPDRDRHVSIVRENIQPGVLHSSLLLLSCGSRNGASFPCSLESSTHQALCWTGLFLRPSPFPRLPLAAPRTLRAGV

SEQ ID NO: 1029728 - protein, 1503 aa, Homo sapiens
MPGVARLPLLLGLLLLPRPGRPLDLADYTYDLAEEDDSEPLNYKDPCKAAAFLGDIALDEEDLRAFQVQQAVDLRRHTARKSSIKAAVPGNTSTPSCQSTNGQPQRGACGRWRGRSRSRRAATSRPERVWPDGVIPFVIGGNFTGSQRAVFRQAMRHWEKHTCVTFLERTDEDSYIVFTYRPCGCCSYVGRRGGGPQAISIGKNCDKFGIVVHELGHVVGFWHEHTRPDRDRHVSIVRENIQPGQEYNFLKMEPQEVESLGETYDFDSIMHYARNTFSRGIFLDTIVPKYEVNGVKPPIGQRTRLSKGDIAQARKLYKCPACGETLQDSTGNFSSPEYPNGYSAHMHCVWRISVTPGEKIILNFTSLDLYRSRLCWYDYVEVRDGFWRKAPLRGRFCGSKLPEPIVSTDSRLWVEFRSSSNWVGKGFFAVYEAICGGDVKKDYGHIQSPNYPDDYRPSKVCIWRIQVSEGFHVGLTFQSFEIERHDSCAYDYLEVRDGHSESSTLIGRYCGYEKPDDIKSTSSRLWLKFVSDGSINKAGFAVNFFKEVDECSRPNRGGCEQRCLNTLGSYKCSCDPGYELAPDKRRCEGCYDLQVGNPCCGTDTVSASPRMVPRCWGQHSEANGSSSLGRSCCAPELLPFLHLPGPPLPELLSLSPLFPLTPSWRTLACSFAEKIEMATLMTLSSPTPPYRPTPEDTQATLPPPVRPRGTRHRSLSLGESTGSPSSPYCIPAHISALPHGKGLPADDATFLVPAAACGGFLTKLNGSITSPGWPKEYPPNKNCIWQLVAPTQYRISLQFDFFETEGNDVCKYDFVEVRSGLTADSKLHGKFCGSEKPEVITSQYNNMRVEFKSDNTVSKKGFKAHFFSVLEGAGDRHSHLSGLELLLCPHALVDTVPAPPSALHGDTHAHTHTHVHTHCPIAQETCRGPPLGASRLSPQGPGHLTLAPQEGSYLDFWDTHRGDPEAKKEKKEPEDLQSDPCHLPGHLGTVGKEASSAAPSGTPPPAQIPSAEKKPDPPVRPARPPGPLVTQEPHLGRNGMGASVPTNPPPPLCHSGPPPSGRTELVLSSPHCARPRTGDPSPCPTPSHFDGVCDISCCEVKEGPLRPAPFSCSLLVHVSIFPLVHLSSKQVMVTHAGPLGPPSSSPHSWALLSWSCWMQCPFGPPCRLASHSRPPGLAQLCQLLLCPGGRKSSQASTSPGASQPQPCTDPASALICSPADKDECSKDNGGCQQDCVNTFGSYECQCRSGFVLHDNKHDCKEAGCDHKVTSTSGTITSPNWPDKYPSKKECTWAISSTPGHRVKLTFMEMDIESQPECAYDHLEVFDGRDAKAPVLGRFCGSKKPEPVLATGSRMFLRFYSDNSVQRKGFQASHATECGGQVRADVKTKDLYSHAQFGDNNYPGGVDCEWVIVAEEGYGVELVFQTFEVEEETDCGYDYMELFDGYDSTAPRLGRYCGSGPPEEVYSAGDSVLVKFHSDDTITKKGFHLRYTSTKFQDTLHSRK

SEQ ID NO: 1029729 - protein, 613 aa, Homo sapiens
SYDYLEVRDGHSESSTLIGRYCGYENLMHKSTSATLLKFVLTRTAILCSPIDLAARDRPPELAPPSRCCSYVGRRGGGPQAISIGKNCDKFGIVVHELGHVVGFWHEHTRPDRDRHVSIVRENIQPGQEYNFLKMEPQEVESLGETYDFDSIMHYARNTFSRGIFLDTIVPKYEVNGVKPPIGQRTRLSKGDIAQARKLYKCPACGETLQDSTGNFSSPEYPNGYSAHMHCVWRISVTPGEKIILNFTSLDLYRSRLCWYDYVEVRDGFWRKAPLRGRFCGSKLPEPIVSTDSRLWVEFRSSSNWVGKGFFAVYEAICGGDVKKDYGHIQSPNYPDDYRPSKVCIWRIQVSEGFHVGLTFQSFEIERHDSCAYDYLEVRDGHSESSTLIGRYCGYEKPDDIKSTSSRLWLKFVSDGSINKAGFAVNFFKEVDECSRPNRGGCEQRCLNTLGSYKCSCDPGYELAPDKRRCEAACGGFLTKLNGSITSPGWPKEYPPNKNCIWQLVAPTQYRISLQFDFFETEGNDVCKYDFVEVRSGLTADSKLHGKFCGSEKPEVITSQYNNMRVEFKSDNTVSKKGFKAHFFSEKRPALQPPRGRPHQLKFRVQKRNRTPQ

SEQ ID NO: 1029730 - protein, 464 aa, Homo sapiens
MGASVPTNPPPPLCHSGPPPSGRTELVLSSPHCARPRTGDPSPCPTPSHFDGVCDISCCEVKEGPLRPAPFSCSLLVHVSIFPLVHLSSKQVMVTHAGPLGPPSSSPHSWALLSWSCWMQCPFGPPCRLASHSRPPGLAQLCQLLLCPGGRKSSQASTSPGASQPQPCTDPASALICSPADKDECSKDNGGCQQDCVNTFGSYECQCRSGFVLHDNKHDCKEAGCDHKVTSTSGTITSPNWPDKYPSKKECTWAISSTPGHRVKLTFMEMDIESQPECAYDHLEVFDGRDAKAPVLGRFCGSKKPEPVLATGSRMFLRFYSDNSVQRKGFQASHATECGGQVRADVKTKDLYSHAQFGDNNYPGGVDCEWVIVAEEGYGVELVFQTFEVEEETDCGYDYMELFDGYDSTAPRLGRYCGSGPPEEVYSAGDSVLVKFHSDDTITKKGFHLRYTSTKFQDTLHSRK

SEQ ID NO: 1029731 - protein, 622 aa, Homo sapiens
MPGVARLPLLLGLLLLPRPGRPLDLADYTYDLAEEDDSEPLNYKDPCKAAAFLGDIALDEEDLRAFQVQQAVDLRRHTARKSSIKAAVPGNTSTPSCQSTNGQPQRGACGRWRGRSRSRRAATSRPERVWPDGVIPFVIGGNFTGSQRAVFRQAMRHWEKHTCVTFLERTDEDSYIVFTYRPCGCCSYVGRRGGGPQAISIGKNCDKFGIVVHELGHVVGFWHEHTRPDRDRHVSIVRENIQPGQEYNFLKMEPQEVESLGETYDFDSIMHYARNTFSRGIFLDTIVPKYEVNGVKPPIGQRTRLSKGDIAQARKLYKCPACGETLQDSTGNFSSPEYPNGYSAHMHCVWRISVTPGEKIILNFTSLDLYRSRLCWYDYVEVRDGFWRKAPLRGRFCGSKLPEPIVSTDSRLWVEFRSSSNWVGKGFFAVYEAICGGDVKKDYGHIQSPNYPDDYRPSKVCIWRIQVSEGFHVGLTFQSFEIERHDSCAYDYLEVRDGHSESSTLIGRYCGYEKPDDIKSTSSRLWLKFVSDGSINKAGFAVNFFKEVDECSRPNRGGCEQRCLNTLGSYKCSCDPGYELAPDKRRCEGCYDLQVGKPLLWDRHCFRLSTHGPEMLGTALRG

SEQ ID NO: 1029732 - protein, 139 aa, Homo sapiens
EKEGKGEGDGWSPRTSAEPRAEREAGDRKEGGEQREGEEVGERGRERSRSRSSKQAGERTPSPGLQCAASLAAAPPACPAWPACRCCSGCCCSRVPAGRWTWPTTPMTWRRRTTRSPSTTKTPARRLPFLGTLPWTKRT

SEQ ID NO: 1029733 - protein, 742 aa, Homo sapiens
MPGVARLPLLLGLLLLPRPGRPLDLADYTYDLAEEDDSEPLNYKDPCKAAAFLGDIALDEEDLRAFQVQQAVDLRRHTARKSSIKAAVPGNTSTPSCQSTNGQPQRGACGRWRGRSRSRRAATSRPERVWPDGVIPFVIGGNFTGSQRAVFRQAMRHWEKHTCVTFLERTDEDSYIVFTYRPCGSGPPPELAPPSRCCSYVGRRGGGPQAISIGKNCDKFGIVVHELGHVVGFWHEHTRPDRDRHVSIVRENIQPGQEYNFLKMEPQEVESLGETYDFDSIMHYARNTFSRGIFLDTIVPKYEVNGVKPPIGQRTRLSKGDIAQARKLYKCPACGETLQDSTGNFSSPEYPNGYSAHMHCVWRISVTPGEKIILNFTSLDLYRSRLCWYDYVEVRDGFWRKAPLRGRFCGSKLPEPIVSTDSRLWVEFRSSSNWVGKGFFAVYEAICGGDVKKDYGHIQSPNYPDDYRPSKVCIWRIQVSEGFHVGLTFQSFEIERHDSCAYDYLEVRDGHSESSTLIGRYCGYEKPDDIKSTSSRLWLKFVSDGSINKAGFAVNFFKEVDECSRPNRGGCEQRCLNTLGSYKCSCDPGYELAPDKRRCEAACGGFLTKLNGSITSPGWPKEYPPNKNCIWQLVAPTQYRISLQFDFFETEGNDVCKYDFVEVRSGLTADSKLHGKFCGSEKPEVITSQYNNMRVEFKSDNTVSKKGFKAHFFSEKRPALQPPRGRPHQLKFRVQKRNRTPQ

SEQ ID NO: 1029734 - protein, 818 aa, Homo sapiens
MPGVARLPLLLGLLLLPRPGRPLDLADYTYDLAEEDDSEPLNYKDPCKAAAFLGDIALDEEDLRAFQVQQAVDLRRHTARKSSIKAAVPGNTSTPSCQSTNGQPQRGACGRWRGRSRSRRAATSRPERVWPDGVIPFVIGGNFTGSQRAVFRQAMRHWEKHTCVTFLERTDEDSYIVFTYRPCGCCSYVGRRGGGPQAISIGKNCDKFGIVVHELGHVVGFWHEHTRPDRDRHVSIVRENIQPGFSTLHCSFSAVALEMVLPSHVPLSPPLTRPSAGQDSSSDPPHSPGSPWLLPGPSGQEYNFLKMEPQEVESLGETYDFDSIMHYARNTFSRGIFLDTIVPKYEVNGVKPPIGQRTRLSKGDIAQARKLYKCPACGETLQDSTGNFSSPEYPNGYSAHMHCVWRISVTPGEKIILNFTSLDLYRSRLCWYDYVEVRDGFWRKAPLRGPNTGQDDNLVWEPGVLASLVPDSCITHLLETSGRFCGSKLPEPIVSTDSRLWVEFRSSSNWVGKGFFAVYEAICGGDVKKDYGHIQSPNYPDDYRPSKVCIWRIQVSEGFHVGLTFQSFEIERHDSCAYDYLEVRDGHSESSTLIGRYCGYEKPDDIKSTSSRLWLKFVSDGSINKAGFAVNFFKEVDECSRPNRGGCEQRCLNTLGSYKCSCDPGYELAPDKRRCEAACGGFLTKLNGSITSPGWPKEYPPNKNCIWQLVAPTQYRISLQFDFFETEGNDVCKYDFVEVRSGLTADSKLHGKFCGSEKPEVITSQYNNMRVEFKSDNTVSKKGFKAHFFSEKRPALQPPRGRPHQLKFRVQKRNRTPQ

SEQ ID NO: 1029735 - protein, 722 aa, Homo sapiens
VSYGWSALTRTAILCHLSTLRSGTPPELARPPGAAPTWVAAAAFLGDIALDEEDLRAFQVQQAVDLRRHTARKSSIKAAVPGNTSTPSCQSTNGQPQRGACGRWRGRSRSRRAATSRPERVWPDGVIPFVIGGNFTGSQRAVFRQAMRHWEKHTCVTFLERTDEDSYIVFTYRPCGCCSYVGRRGGGPQAISIGKNCDKFGIVVHELGHVVGFWHEHTRPDRDRHVSIVRENIQPGQEYNFLKMEPQEVESLGETYDFDSIMHYARNTFSRGIFLDTIVPKYEVNGVKPPIGQRTRLSKGDIAQARKLYKCPACGETLQDSTGNFSSPEYPNGYSAHMHCVWRISVTPGEKIILNFTSLDLYRSRLCWYDYVEVRDGFWRKAPLRGRFCGSKLPEPIVSTDSRLWVEFRSSSNWVGKGFFAVYEAICGGDVKKDYGHIQSPNYPDDYRPSKVCIWRIQVSEGFHVGLTFQSFEIERHDSCAYDYLEVRDGHSESSTLIGRYCGYEKPDDIKSTSSRLWLKFVSDGSINKAGFAVNFFKEVDECSRPNRGGCEQRCLNTLGSYKCSCDPGYELAPDKRRCEAACGGFLTKLNGSITSPGWPKEYPPNKNCIWQLVAPTQYRISLQFDFFETEGNDVCKYDFVEVRSGLTADSKLHGKFCGSEKPEVITSQYNNMRVEFKSDNTVSKKGFKAHFFSEKRPALQPPRGRPHQLKFRVQKRNRTPQ

SEQ ID NO: 1029736 - protein, 304 aa, Homo sapiens
GQLDFPQTQNLMRKKRCRPAIQFISGTRDGRKEGGQEGRAFPTGGIGAWGPSLSPSVTRFPAAGCDHKVTSTSGTITSPNWPDKYPSKKECTWAISSTPGHRVKLTFMEMDIESQPECAYDHLEVFDGRDAKAPVLGRFCGSKKPEPVLATGSRMFLRFYSDNSVQRKGFQASHATECGGQVRADVKTKDLYSHAQFGDNNYPGGVDCEWVIVAEEGYGVELVFQTFEVEEETDCGYDYMELFDGYDSTAPRLGRYCGSGPPEEVYSAGDSVLVKFHSDDTITKKGFHLRYTSTKFQDTLHSRK

SEQ ID NO: 1029737 - protein, 615 aa, Homo sapiens
MPGVARLPLLLGLLLLPRPGRPLDLADYTYDLAEEDDSEPLNYKDPCKAAAFLGDIALDEEDLRAFQVQQAVDLRRHTARKSSIKAAVPGNTSTPSCQSTNGQPQRGACGRWRGRSRSRRAATSRPERVWPDGVIPFVIGGNFTGSQRAVFRQAMRHWEKHTCVTFLERTDEDSYIVFTYRPCGCCSYVGRRGGGPQAISIGKNCDKFGIVVHELGHVVGFWHEHTRPDRDRHVSIVRENIQPGQEYNFLKMEPQEVESLGETYDFDSIMHYARNTFSRGIFLDTIVPKYEVNGVKPPIGQRTRLSKGDIAQARKLYKCPACGETLQDSTGNFSSPEYPNGYSAHMHCVWRISVTPGEKIILNFTSLDLYRSRLCWYDYVEVRDGFWRKAPLRGRFCGSKLPEPIVSTDSRLWVEFRSSSNWVGKGFFAVYEAICGGDVKKDYGHIQSPNYPDDYRPSKVCIWRIQVSEGFHVGLTFQSFEIERHDSCAYDYLEVRDGHSESSTLIGRYCGYEKPDDIKSTSSRLWLKFVSDGSINKAGFAVNFFKEVDECSRPNRGGCEQRCLNTLGSYKCSCDPGYELAPDKRRCEAACGGFLTKLNGSITTSVLARGPVLKF

SEQ ID NO: 1029738 - protein, 730 aa, Homo sapiens; identical to SEQ ID NO: 1029724

SEQ ID NO: 1029739 - protein, 622 aa, Homo sapiens; identical to SEQ ID NO: 1029731

SEQ ID NO: 1029740 - protein, 730 aa, Homo sapiens; identical to SEQ ID NO: 1029724

SEQ ID NO: 1029741 - protein, 128 aa, Homo sapiens
  misc_feature (124)..(124): Xaa can be any naturally occurring amino acid
RQQNHTSTPPATHKQTRFRATQCSCCKIVQEHPTALLPPPQFLTHQAASHSSHHIQELRLKQVRLKVRCTNSTSNRPAMVHSSRRLHLSSLNSMVFSIQQAIVSRLDLNNLSSFRGMASNQLSXDQFL

SEQ ID NO: 1029742 - protein, 130 aa, Homo sapiens; identical to SEQ ID NO: 753405

SEQ ID NO: 1029743 - protein, 112 aa, Homo sapiens; identical to SEQ ID NO: 816884

SEQ ID NO: 1029744 - protein, 68 aa, Homo sapiens
  misc_feature (19)..(19): Xaa can be any naturally occurring amino acid
  misc_feature (27)..(27): Xaa can be any naturally occurring amino acid
AAGYPVVDEWSEASPMTHXLQLSQTQXDPLYIWCHKVYCQDPYECEIRNPSECPAASDPVTLNLLRSY

SEQ ID NO: 1029745 - protein, 117 aa, Homo sapiens
TGVNVPEKFETNLRKPVYYRVCTQGRDSVTVAKKNGIKKGGHSKTRGPSLLDQQGYKGKLRAGKKVEKAGKTLSLFSYGFKKDRYIQCTVVVRAPLRRWMKYVRMLYCSPSAKSTGG

SEQ ID NO: 1029746 - protein, 133 aa, Homo sapiens
PRLSNPLRNLNGSFHDEQNLSVFMKLSKNWNNTCLPRSQFLIETGIRKTFSSRPTFQTARPTLAHVHHRFSQARHPTATADSRLLIPPPPGIYKFHLNPIGRTLAGNSSILLPTKARACHLPPLRDPDGKKEI

SEQ ID NO: 1029747 - protein, 806 aa, Homo sapiens
  misc_feature (790)..(790): Xaa can be any naturally occurring amino acid
LCRTYSATYRTEFTMRTSHDARCQSLVLRSHTFHTYISNYFRSRTLRISADAIHAYAIHRHFTVAWPQIAHSVTSSAVIVRLKPLRCEASGMIFSEAYMKNMRRCNIRWCYFAIMALGLSGFSGTGIQMARKKFSGLEISLIFLFVIVTIIAIALIVVLATKTPAVDEISDSTSTPATTRVTTNPSDSGKCPNVLNDPVNVRINCIPEQFPTEGICAQRGCCWRPWNDSLIPWCFFVDNHGYNVQDMTTTSIGVEAKLNRIPSPTLFGNDINSVLFTTQNQTPNRFRFKITDPNKRRYEVPHQYVKEFTGPTVSDTLYDVKVAQNPFSIQVIRKSNGKTLFDTSIGPLVYSDQYLQISARLPSDYIYGIGEQVHKRFRHDLSWKTWPIFTRDQLPGDNNNNLYGHQTFFMCIEDTSGKSFGVFLMNSNAMEIFIQPTPIVTYRVTGGILDFYILLGDTPEQVVQQYQQLVGLPAMPAYWNLGFQLSRWNYKSLDVVKEVVRRNREAGIPFDTQVTDIDYMEDKKDFTYDQVAFNGLPQFVQDLHDHGQKYVIILDPAISIGRRANGTTYATYERGNTQHVWINESDGSTPIIGEVWPGLTVYPDFTNPNCIDWWANECSIFHQEVQYDGLWIDMNEVSSFIQGSTKGCNVNKLNYPPFTPDILDKLMYSKTICMDAVQNWGKQYDVHSLYGYSMAIATEQAVQKVFPNKRSFILTRSTFAGSGRHAAHWLGDNTASWEQMEWSITGMLEFSLFGIPLVGADICGFVAETTEELCRRWMQLGAFYPFSRNXNSDGYEHQDPAFFGQN

SEQ ID NO: 1029748 - protein, 678 aa, Homo sapiens
  misc_feature (662)..(662): Xaa can be any naturally occurring amino acid
MARKKFSGLEISLIFLFVIVTIIAIALIVVLATKTPAVDEISDSTSTPATTRVTTNPSDSGKCPNVLNDPVNVRINCIPEQFPTEGICAQRGCCWRPWNDSLIPWCFFVDNHGYNVQDMTTTSIGVEAKLNRIPSPTLFGNDINSVLFTTQNQTPNRFRFKITDPNKRRYEVPHQYVKEFTGPTVSDTLYDVKVAQNPFSIQVIRKSNGKTLFDTSIGPLVYSDQYLQISARLPSDYIYGIGEQVHKRFRHDLSWKTWPIFTRDQLPGDNNNNLYGHQTFFMCIEDTSGKSFGVFLMNSNAMEIFIQPTPIVTYRVTGGILDFYILLGDTPEQVVQQYQQLVGLPAMPAYWNLGFQLSRWNYKSLDVVKEVVRRNREAGIPFDTQVTDIDYMEDKKDFTYDQVAFNGLPQFVQDLHDHGQKYVIILDPAISIGRRANGTTYATYERGNTQHVWINESDGSTPIIGEVWPGLTVYPDFTNPNCIDWWANECSIFHQEVQYDGLWIDMNEVSSFIQGSTKGCNVNKLNYPPFTPDILDKLMYSKTICMDAVQNWGKQYDVHSLYGYSMAIATEQAVQKVFPNKRSFILTRSTFAGSGRHAAHWLGDNTASWEQMEWSITGMLEFSLFGIPLVGADICGFVAETTEELCRRWMQLGAFYPFSRNXNSDGYEHQDPAFFGQN

SEQ ID NO: 1029749 - protein, 110 aa, Homo sapiens
MNVKRSKEVYRMERRTKYNIDVRLTDVVIKHKNSANKRQKSRRNDREPNVIYYRESKKKLDEITSEKGYGDNKLMRRKYEALNRITALTRGSIQAGGKTVNFCAKKEVTC

SEQ ID NO: 1029750 - protein, 670 aa, Homo sapiens
  misc_feature (654)..(654): Xaa can be any naturally occurring amino acid
RDGIAPLSLCSKDQKGIALIVVLATKTPAVDEISDSTSTPATTRVTTNPSDSGKCPNVLNDPVNVRINCIPEQFPTEGICAQRGCCWRPWNDSLIPWCFFVDNHGYNVQDMTTTSIGVEAKLNRIPSPTLFGNDINSVLFTTQNQTPNRFRFKITDPNKRRYEVPHQYVKEFTGPTVSDTLYDVKVAQNPFSIQVIRKSNGKTLFDTSIGPLVYSDQYLQISARLPSDYIYGIGEQVHKRFRHDLSWKTWPIFTRDQLPGDNNNNLYGHQTFFMCIEDTSGKSFGVFLMNSNAMEIFIQPTPIVTYRVTGGILDFYILLGDTPEQVVQQYQQLVGLPAMPAYWNLGFQLSRWNYKSLDVVKEVVRRNREAGIPFDTQVTDIDYMEDKKDFTYDQVAFNGLPQFVQDLHDHGQKYVIILDPAISIGRRANGTTYATYERGNTQHVWINESDGSTPIIGEVWPGLTVYPDFTNPNCIDWWANECSIFHQEVQYDGLWIDMNEVSSFIQGSTKGCNVNKLNYPPFTPDILDKLMYSKTICMDAVQNWGKQYDVHSLYGYSMAIATEQAVQKVFPNKRSFILTRSTFAGSGRHAAHWLGDNTASWEQMEWSITGMLEFSLFGIPLVGADICGFVAETTEELCRRWMQLGAFYPFSRNXNSDGYEHQDPAFFGQN

SEQ ID NO: 1029751 - protein, 800 aa, Homo sapiens
  misc_feature (784)..(784): Xaa can be any naturally occurring amino acid
VVQLIYPSKSDTSSGALETKCRHESRRVQLYSCAICVNFPNWWLILENLTDSVLYQVDCTECLRSRFRRTCIRYQLTKVIDRYALTRMLHNTIGIKNRWISNNFVGKKGPRLFSSPENRDPTCQQNIFVDGRIYQNVRCVKMDIIGIALIVVLATKTPAVDEISDSTSTPATTRVTTNPSDSGKCPNVLNDPVNVRINCIPEQFPTEGICAQRGCCWRPWNDSLIPWCFFVDNHGYNVQDMTTTSIGVEAKLNRIPSPTLFGNDINSVLFTTQNQTPNRFRFKITDPNKRRYEVPHQYVKEFTGPTVSDTLYDVKVAQNPFSIQVIRKSNGKTLFDTSIGPLVYSDQYLQISARLPSDYIYGIGEQVHKRFRHDLSWKTWPIFTRDQLPGDNNNNLYGHQTFFMCIEDTSGKSFGVFLMNSNAMEIFIQPTPIVTYRVTGGILDFYILLGDTPEQVVQQYQQLVGLPAMPAYWNLGFQLSRWNYKSLDVVKEVVRRNREAGIPFDTQVTDIDYMEDKKDFTYDQVAFNGLPQFVQDLHDHGQKYVIILDPAISIGRRANGTTYATYERGNTQHVWINESDGSTPIIGEVWPGLTVYPDFTNPNCIDWWANECSIFHQEVQYDGLWIDMNEVSSFIQGSTKGCNVNKLNYPPFTPDILDKLMYSKTICMDAVQNWGKQYDVHSLYGYSMAIATEQAVQKVFPNKRSFILTRSTFAGSGRHAAHWLGDNTASWEQMEWSITGMLEFSLFGIPLVGADICGFVAETTEELCRRWMQLGAFYPFSRNXNSDGYEHQDPAFFGQN

SEQ ID NO: 1029752 - protein, 1138 aa, Homo sapiens
EAQCCGLFHLSALGLTEMPRGKFICNECRTGIHTCFVCKQSGEDVKRCLLPLCGKFYHEECVQKYPPTVMQNKGFRCSLHICITCHAANPANVSASKGRLMRCVRCPVAYHANDFCLAAGSKILASNSIICPNHFTPRRGCRNHEHVNVSWCFVCSEGGSLLCCDSCPAAFHRECLNIDIPEGNWYCNDCKAGKKPHYREIVWVKVGRYRWWPAEICHPRAVPSNIDKMRHDVGEFPVLFFGSNDYLWTHQARVFPYMEGDVSSKDKMGKGVDGTYKKALQEAAARFEELKAQKELRQLQEDRKNDKKPPPYKHIKVNRPIGRVQIFTADLSEIPRCNCKATDENPCGIDSECINRMLLYECHPTVCPAGGRCQNQCFSKRQYPEVEIFRTLQRGWGLRTKTDIKKGEFVNEYVGELIDEEECRARIRYAQEHDITNFYMLTLDKDRIIDAGPKGNYARFMNHCCQPNCETQKWSVNGDTRVGLFALSDIKAGTELTFNYNLECLGNGKTVCKCGAPNCSGFLGVRPKNQPIATEEKSKKFKKKQQGKRRTQGEITKEREDECFSCGDAGQLVSCKKPGCPKVYHADCLNLTKRPAGKWECPWHQCDICGKEAASFCEMCPSSFCKQHREGMLFISKLDGRLSCTEHDPCGPNPLEPGEIREYVPPPVPLPPGPSTHLAEQSTGMAAQAPKMSDKPPADTNQMLSLSKKALAGTCQRPLLPERPLERTDSRPQPLDKVRDLAGSGTKSQSLVSSQRPLDRPPAVAGPRPQLSDKPSPVTSPSSSPSVRSQPLERPLGTADPRLDKSIGAASPRPQSLEKTSVPTGLRLPPPDRLLITSSPKPQTSDRPTDKPHASLSQRLPPPEKVLSAVVQTLVAKEKALRPVDQNTQSKNRAALVMDLIDLTPRQKERAASPHQVTPQADEKMPVLESSSWPASKGLGHMPRAVEKGCVSDPLQTSGKAAAPSEDPWQAVKSLTQARLLSQPPAKAFLYEPTTQASGRASAGAEQTPGPLSQSPGLVKQAKQMVGGQQLPALAAKSGQSFRSLGKAPASLPTEEKKLVTTEQSPWALGKASSRAGLWPIVAGQTLAQSCWSAGSTQTLAQTCWSLGRGQDPKPEQNTLPALNQAPSSHKCAESEQK

SEQ ID NO: 1029753 - protein, 1138 aa, Homo sapiens; identical to SEQ ID NO: 1029752

SEQ ID NO: 1029754 - protein, 1584 aa, Homo sapiens
MRGQAAAPGPVWILAPLLLLLLLLGRRARAAAGADAGPGPEPCATLVQGKFFGYFSAAAVFPANASRCSWTLRNPDPRRYTLYMKVAKAPVPCSGPGRVRTYQFDSFLESTRTYLGVESFDEVLRLCDPSAPLAFLQASKQFLQMRRQQPPQHDGLRPRAGPPGPTDDFSVEYLVVGNRNPSRAACQMLCRWLDACLAGSRSSHPCGIMQTPCACLGGEAGGPAAGPLAPRGDVCLRDAVAGGPENCLTSLTQDRGGHGATGGWKLWSLWGECTRDCGGGLQTRTRTCLPAPGVEGGGCEGVLEEGRQCNREACGPAGRTSSRSQSLRSTDARRREELGDELQQFGFPAPQTGDPAAEEWSPWSVCSSTCGEGWQTRTRFCVSSSYSTQCSGPLREQRLCNNSAVCPVHGAWDEWSPWSLCSSTCGRGFRDRTRTCRPPQFGGNPCEGPEKQTKFCNIALCPGRAVDGNWNEWSSWSACSASCSQGRQQRTRECNGPSYGGAECQGHWVETRDCFLQQCPVDGKWQAWASWGSCSVTCGAGSQRRERVCSGPFFGGAACQGPQDEYRQCGTQRCPEPHEICDEDNFGAVIWKETPAGEVAAVRCPRNATGLILRRCELDEEGIAYWEPPTYIRCVSIDYRNIQMMTREHLAKAQRGLPGEGVSEVIQTLVEISQDGTSYSGDLLSTIDVLRNMTEIFRRAYYSPTPGDVQNFVQILSNLLAEENRDKWEEAQLAGPNAKELFRLVEDFVDVIGFRMKDLRDAYQVTDNLVLSIHKLPASGATDISFPMKGWRATGDWAKVPEDRVTVSKSVFSTGLTEADEASVFVVGTVLYRNLGSFLALQRNTTVLNSKVISVTVKPPPRSLRTPLEIEFAHMYNGTTNQTCILWDETDVPSSSAPPQLGPWSWRGCRTVPLDALRTRCLCDRLSTFAILAQLSADANMEKATLPSVTLIVGCGVSSLTLLMLVIIYVSVWRYIRSERSVILINFCLSIISSNALILIGQTQTRNKVMCTLVAAFLHFFFLSSFCWVLTEAWQSYMAVTGHLRNRLIRKRFLCLGWGLPALVVAISVGFTKAKGYSTMNYCWLSLEGGLLYAFVGPAAAVVLVNMVIGILVFNKLVSKDGITDKKLKERAGASLWSSCVVLPLLALTWMSAVLAVTDRRSALFQILFAVFDSLEGFVIVMVHCILRREVQDAVKCRVVDRQEEGNGDSGGSFQNGHAQLMTDFEKDVDLACRSVLNKDIAACRTATITGTLKRPSLPEEEKLKLAHAKGPPTNFNSLPANVSKLHLHGSPRYPGGPLPDFPNHSLTLKRDKAPKSSFVGDGDIFKKLDSELSRAQEKALDTSYVILPTATATLRPKPKEEPKYSIHIDQMPQTRLIHLSTAPEASLPARSPPSRQPPSGGPPEAPPAQPPPPPPPPPPPPQQPLPPPPNLEPAPPSLGDPGEPAAHPGPSTGPSTKNENVATLSVSSLERRKSRYAELDFEKIMHTRKRHQDMFQDLNRKLQHAAEKDKEVLGPDSKPEKQQTPNKRPWESLRKAHGTPTWVKKELEPLQPSPLELRSVEWERSGATIPLVGQDIIDLQTEV

SEQ ID NO: 1029755 - protein, 732 aa, Homo sapiens
MRGQAAAPGPVWILAPLLLLLLLLGRRARAAAGADAGPGPEPCATLVQGKFFGYFSAAAVFPANASRCSWTLRNPDPRRYTLYMKVAKAPVPCSGPGRVRTYQFDSFLESTRTYLGVESFDEVLRLCDPSAPLAFLQASKQFLQMRRQQPPQHDGLRPRAGPPGPTDDFSVEYLVVGNRNPSRAACQMLCRWLDACLAGSRSSHPCGIMQTPCACLGGEAGGPAAGPLAPRGDVCLRDAVAGGPENCLTSLTQDRGGHGATGGWKLWSLWGECTRDCGGGLQTRTRTCLPAPGVEGGGCEGVLEEGRQCNREACGPAGRTSSRSQSLRSTDARRREELGDELQQFGFPAPQTGDPAAEEWSPWSVCSSTCGEGWQTRTRFCVSSSYSTQCSGPLREQRLCNNSAVCPVHGAWDEWSPWSLCSSTCGRGFRDRTRTCRPPQFGGNPCEGPEKQTKFCNIALCPGRAVDGNWNEWSSWSACSASCSQGRQQRTRECNGPSYGGAECQGHWVETRDCFLQQCPVDGKWQAWASWGSCSVTCGAGSQRRERVCSGPFFGGAACQGPQDEYRQCGTQRCPEPHEICDEDNFGAVIWKETPAGEVAAVRCPRNATGLILRRCELDEEGIAYWEPPTYIRCVSIDYRNIQMMTREHLAKAQRGLPGEGVSEVIQTLVEISQDGTSYSGDLLSTIDVLRNMTEIFRRAYYSPTPGDVQVGSRGASWKRVSGRCLGSPPRP

SEQ ID NO: 1029756 - protein, 188 aa, Homo sapiens
TRGSTHASRTRGSGRVGAQQEALGEPPESPRDAHVGEEGAGAAAAVAAGASQRGVGEVGRHDPAGGPGHHRPPDRGLSGWAAATHWATEEGCCSARSCRRRAQTRSRAAGQARTPASGRSDGGQAQGPQCWDQSQMQDRRRPGQRAQGTRGRRCLRLRPPRAEAQRADGRTAVDRGQAQRGQRPRVPA

SEQ ID NO: 1029757 - protein, 105 aa, Homo sapiens
MAHPTALISLGSMILAPQPTEELGLQVCTNMPIRHPSGDVKNTVGYSKSSSRVEWLSDRKKRALQKKDVDVRRRIELIQDFEMPTVCTTIKVSKRWTVHFSNWNI

SEQ ID NO: 1029758 - protein, 125 aa, Homo sapiens
MQVSSLNEVKIYSLSCGKSLPEWLSDRKKRALQKKDVDVRRRIELIQDFEMPTVCTTIKVSKDGQYILATGTYKPRVRCYDTYQLSLKFERCVRFKKVGHPFATFESDELTQKIVFMTLHDKMTL

SEQ ID NO: 1029759 - protein, 163 aa, Homo sapiens
MQVSSLNEVKIYSLSCGKSLPEVSHFPAPSLSSSWGSSSSWGSLPLSSALASVLAGRWSPPDSGRPEAADNFRGRCRHWETRTLPSPRQKLDQGIIRVSELCWNFCKVLCSRERNHLGLFGCSQSLPYIEEENVADSLTHLSPIWPSAVCGVPIICQVLGIQQ

SEQ ID NO: 1029760 - protein, 218 aa, Homo sapiens
IRLGTRLGVNRPRRRPQSLSPVLSLSPDSMSFTTRSTFSTNYRSLGSVQAPSYGARPVSSAASVYAGAGGSGSRISVSRSTSFRGGMGSGGLATGIAGGLAGMGGIQNEKETMQSLNDRLASYLDRVRSLETENRRLESKIREHLEKKGPQVRDWSHYFKIIEDLRAQIFANTVDNARIVLQIDNARLAADDFRVKYETELAMRQSVENDIHGLRKVI

SEQ ID NO: 1029761 - protein, 430 aa, Homo sapiens
MSFTTRSTFSTNYRSLGSVQAPSYGARPVSSAASVYAGAGGSGSRISVSRSTSFRGGMGSGGLATGIAGGLAGMGGIQNEKETMQSLNDRLASYLDRVRSLETENRRLESKIREHLEKKGPQVRDWSHYFKIIEDLRAQIFANTVDNARIVLQIDNARLAADDFRVKHETELAMRQSVENDIHGLRKVIDDTNITRLQLETEIEALKEELLFMKKNHEEEVKGLQAQIASSGLTVEVDAPKSQDLAKIMADIRAQYDELARKNREELDKYWSQQIEESTTVVTTQSAEVGAAETTLTELRRTVQSLEIDLDSMRNLKASLENSLREVEARYALQMEQLNGILLHLESELAQTRAEGQRQAQEYEALLNIKVKLEAEIATYRRLLEDGEDFNLGDALDSSNSMQTIQKTTTRRIVDGKVVSETNDTKVLRH

SEQ ID NO: 1029762 - protein, 430 aa, Homo sapiens; identical to SEQ ID NO: 1029761

SEQ ID NO: 1029763 - protein, 430 aa, Homo sapiens; identical to SEQ ID NO: 1029761

SEQ ID NO: 1029764 - protein, 430 aa, Homo sapiens; identical to SEQ ID NO: 1029761

SEQ ID NO: 1029765 - protein, 430 aa, Homo sapiens; identical to SEQ ID NO: 1029761

SEQ ID NO: 1029766 - protein, 430 aa, Homo sapiens; identical to SEQ ID NO: 1029761

SEQ ID NO: 1029767 - protein, 218 aa, Homo sapiens; identical to SEQ ID NO: 1029760

SEQ ID NO: 1029768 - protein, 208 aa, Homo sapiens
GPPHLKSVSCPVGHPVSGGMSFTTRSTFSTNYRSLGSVQAPSYGARPVSSAASVYAGAGGSGSRISVSRSTSFRGGMGSGGLATGIAGGLAGMGGIQNEKETMQSLNDRLASYLDRVRSLETENRRLESKIREHLEKKGPQVRDWSHYFKIIEDLRAQIFANTVDNARIVLQIDNARLAADDFRVKYETELAMRQSVENDIHGLRKVI

SEQ ID NO: 1029769 - protein, 218 aa, Homo sapiens; identical to SEQ ID NO: 1029760

SEQ ID NO: 1029770 - protein, 201 aa, Homo sapiens
MWLGTRLGVNRPKLSPVLSLSPDNYRSLGSVQAPSYGARPVSSAASVYAGAGGSGSRISVSRSTSFRGGMGSGGLATGIAGGLAGMGGIQNEKETMQSLNDRLASYLDRVRSLETENRRLESKIREHLEKKGPQVRDWSHYFKIIEDLRAQIFANTVDNARIVLQIDNARLAADDFRVKYETELAMRQSVENDIHGLRKVI

SEQ ID NO: 1029771 - protein, 118 aa, Homo sapiens
MRNLKASLENSLREVEARYALQMEQLNGILLHLESELAQTRAEGQRQAQEYEALLNIKVKLEAEIATYRRLLEDGEDFNLGDALDSSNSMQTIQKTTTRRIVDGKVVSETNDTKVLRH

SEQ ID NO: 1029772 - protein, 218 aa, Homo sapiens; identical to SEQ ID NO: 1029760

SEQ ID NO: 1029773 - protein, 218 aa, Homo sapiens
IWLGTRLGVNGRRPALGFDPWKVDAPKISGPRQDHGQTSGAQYDELARKEPRGARTSTGLSRLRRSTTVVTTQSAEVGAAETTLTELRRTVQSLEIDLDSMRNLKASLENSLREVEARYALQMEQLNGILLHLESELAQTRAEGQRQAQEYEALLNIKVKLEAEIATYRRLLEDGEDFNLGDALDSSNSMQTIQKTTTRRIVDGKVVSETNDTKVLRH

SEQ ID NO: 1029774 - protein, 189 aa, Homo sapiens
MSFTTRSTFSTNYRSLGSVQAPSYGARPVSSAASVYAGAGGSGSRISVSRSTSFRGGMGSGGLATGIAGGLAGMGGIQNEKETMQSLNDRLASYLDRVRSLETENRRLESKIREHLEKKGPQVRDWSHYFKIIEDLRAQIFANTVDNARIVLQIDNARLAADDFRVKYETELAMRQSVENDIHGLRKVI

SEQ ID NO: 1029775 - protein, 218 aa, Homo sapiens; identical to SEQ ID NO: 1029760

SEQ ID NO: 1029776 - protein, 189 aa, Homo sapiens; identical to SEQ ID NO: 1029774

SEQ ID NO: 1029777 - protein, 218 aa, Homo sapiens; identical to SEQ ID NO: 1029760

SEQ ID NO: 1029778 - protein, 218 aa, Homo sapiens; identical to SEQ ID NO: 1029760

SEQ ID NO: 1029779 - protein, 218 aa, Homo sapiens; identical to SEQ ID NO: 1029760

SEQ ID NO: 1029780 - protein, 205 aa, Homo sapiens
MLVGLVLIGRGSLSGRMSFTTRSTFSTNYRSLGSVQAPSYGARPVSSAASVYAGAGGSGSRISVSRSTSFRGGMGSGGLATGIAGGLAGMGGIQNEKETMQSLNDRLASYLDRVRSLETENRRLESKIREHLEKKGPQVRDWSHYFKIIEDLRAQIFANTVDNARIVLQIDNARLAADDFRVKYETELAMRQSVENDIHGLRKVI

SEQ ID NO: 1029781 - protein, 430 aa, Homo sapiens; identical to SEQ ID NO: 1029761

SEQ ID NO: 1029782 - protein, 430 aa, Homo sapiens; identical to SEQ ID NO: 1029761

SEQ ID NO: 1029783 - protein, 430 aa, Homo sapiens; identical to SEQ ID NO: 1029761

SEQ ID NO: 1029784 - protein, 430 aa, Homo sapiens; identical to SEQ ID NO: 1029761

SEQ ID NO: 1029785 - protein, 430 aa, Homo sapiens; identical to SEQ ID NO: 1029761

SEQ ID NO: 1029786 - protein, 189 aa, Homo sapiens; identical to SEQ ID NO: 1029774

SEQ ID NO: 1029787 - protein, 430 aa, Homo sapiens; identical to SEQ ID NO: 1029761

SEQ ID NO: 1029788 - protein, 218 aa, Homo sapiens; identical to SEQ ID NO: 1029760

SEQ ID NO: 1029789 - protein, 205 aa, Homo sapiens; identical to SEQ ID NO: 1029780

SEQ ID NO: 1029790 - protein, 189 aa, Homo sapiens; identical to SEQ ID NO: 1029774

SEQ ID NO: 1029791 - protein, 110 aa, Homo sapiens [sequence omitted]

SEQ ID NO: 1029792 - protein, 110 aa, Homo sapiens [sequence omitted]

SEQ ID NO: 1029793 - protein, 103 aa, Homo sapiens
MSGRLWSKAIFAGYKRGLRNQREHTALLKIEGVYARDETEFYLGKRCAYVYKAKNNTVTSWRQTKQNQSHLGKSNSGPWKQWAWFVPNSEAIFLLRPLDTESE

SEQ ID NO: 1029794 - protein, 137 aa, Homo sapiens
MFNPTRPRGGASSFSYRHLGSCGGLLGTGLLKGTMSGRLWSKAIFAGYKRGLRNQREHTALLKIEGVYARDETEFYLGKRCAYVYKAKNNTVTSWRQTKQNQSHLGKSNSGPWKQWAWFVPNSEAIFLLRPLDTESE

SEQ ID NO: 1029795 - protein, 103 aa, Homo sapiens; identical to SEQ ID NO: 1029793

SEQ ID NO: 1029796 - protein, 103 aa, Homo sapiens; identical to SEQ ID NO: 1029793

SEQ ID NO: 1029797 - protein, 132 aa, Homo sapiens
RPPTTTKFAAASTLGSCGGLLGTGLLKGTMSGRLWSKAIFAGYKRGLRNQREHTALLKIEGVYARDETEFYLGKRCAYVYKAKNNTVTSWRQTKQNQSHLGKSNSGPWKQWAWFVPNSEAIFLLRPLDTESE

SEQ ID NO: 1029798 - protein, 110 aa, Homo sapiens [sequence omitted]

SEQ ID NO: 1029799 - protein, 110 aa, Homo sapiens [sequence omitted]

SEQ ID NO: 1029800 - protein, 110 aa, Homo sapiens [sequence omitted]

SEQ ID NO: 1029801 - protein, 110 aa, Homo sapiens [sequence omitted]

SEQ ID NO: 1029802 - protein, 110 aa, Homo sapiens [sequence omitted]

SEQ ID NO: 1029803 - protein, 132 aa, Homo sapiens
NSRRRPRSFSYRHLGSCGGLLGTGLLKGTMSGRLWSKAIFAGYKRGLRNQREHTALLKIEGVYARDETEFYLGKRCAYVYKAKNNTVTSWRQTKQNQSHLGKSNSGPWKQWAWFVPNSEAIFLLRPLDTESE

SEQ ID NO: 1029804 - protein, 101 aa, Homo sapiens
FQTEFLLEVPFPAGLHRNQREHTALLKIEGVYARDETEFYLGKRCAYVYKAKNNTVTSWRQTKQNQSHLGKSNSGPWKQWAWFVPNSEAIFLLRPLDTESE

SEQ ID NO: 1029805 - protein, 124 aa, Homo sapiens
RAEFGTSSCGGLLGTGLLKGTMSGRLWSKAIFAGYKRGLRNQREHTALLKIEGVYARDETEFYLGKRCAYVYKAKNNTVTSWRQTKQNQSHLGKSNSGPWKQWAWFVPNSEAIFLLRPLDTESE

SEQ ID NO: 1029806 - protein, 124 aa, Homo sapiens; identical to SEQ ID NO: 1029805

SEQ ID NO: 1029807 - protein, 103 aa, Homo sapiens; identical to SEQ ID NO: 1029793

SEQ ID NO: 1029808 - protein, 125 aa, Homo sapiens
ARSEAGCGSCGGLLGTGLLKGTMSGRLWSKAIFAGYKRGLRNQREHTALLKIEGVYARDETEFYLGKRCAYVYKAKNNTVTSWRQTKQNQSHLGKSNSGPWKQWAWFVPNSEAIFLLRPLDTESE

SEQ ID NO: 1029809 - protein, 113 aa, Homo sapiens
AAAYYYYYYYIRGRSTSKAIFAGYKRGLRNQREHTALLKIEGVYARDETEFYLGKRCAYVYKAKNNTVTSWRQTKQNQSHLGKSNSGPWKQWAWFVPNSEAIFLLRPLDTESE

SEQ ID NO: 1029810 - protein, 103 aa, Homo sapiens; identical to SEQ ID NO: 1029793

SEQ ID NO: 1029811 - protein, 124 aa, Homo sapiens; identical to SEQ ID NO: 1029805

SEQ ID NO: 1029812 - protein, 182 aa, Homo sapiens
MHSDSVSNGLSRKIASEFGTNHATVSMGPSYFSPDDSGFVWFAARSDCVVLCFDIHKRISYRHLGSCGGLLGTGLLKGTMSGRLWSKAIFAGYKRGLRNQREHTALLKIEGVYARDETEFYLGKRCAYVYKAKNNTVTSWRQTKQNQSHLGKSNSGPWKQWAWFVPNSEAIFLLRPLDTESE

SEQ ID NO: 1029813 - protein, 132 aa, Homo sapiens; identical to SEQ ID NO: 1029797

SEQ ID NO: 1029814 - protein, 132 aa, Homo sapiens; identical to SEQ ID NO: 1029803

SEQ ID NO: 1029815 - protein, 133 aa, Homo sapiens
NSRRRPRSFSYRHLGSCGGLLGTGLLKGTMSGRLWSKAIFAGYKRGLRNQREHTALLKIEGVYARDETEFYLGKRCAYVYKAKNNTVTSWRQTKQNQSHLGKSNSGPWKQWAWFVPNSEAIFLLRPLDTESEW

SEQ ID NO: 1029816 - protein, 101 aa, Homo sapiens
HRIRVMLYPSGFKRGLRNQREHTALLKIEGVYARDETEFYLGKRCAYVYKAKNNTVTSWRQTKQNQSHLGKSNSGPWKQWAWFVPNSEAIFLLRPLDTESE

SEQ ID NO: 1029817 - protein, 110 aa, Homo sapiens [sequence omitted]

SEQ ID NO: 1029818 - protein, 110 aa, Homo sapiens [sequence omitted]

SEQ ID NO: 1029819 - protein, 110 aa, Homo sapiens [sequence omitted]

SEQ ID NO: 1029820 - protein, 110 aa, Homo sapiens [sequence omitted]

SEQ ID NO: 1029821 - protein, 110 aa, Homo sapiens [sequence omitted]

SEQ ID NO: 1029822 - protein, 110 aa, Homo sapiens [sequence omitted]

SEQ ID NO: 1029823 - protein, 110 aa, Homo sapiens [sequence omitted]

SEQ ID NO: 1029824 - protein, 110 aa, Homo sapiens [sequence omitted]

SEQ ID NO: 1029825 - protein, 110 aa, Homo sapiens [sequence omitted]

SEQ ID NO: 1029826 - protein, 103 aa, Homo sapiens; identical to SEQ ID NO: 1029793

SEQ ID NO: 1029827 - protein, 110 aa, Homo sapiens [sequence omitted]

SEQ ID NO: 1029828 - protein, 103 aa, Homo sapiens; identical to SEQ ID NO: 1029793

SEQ ID NO: 1029829 - protein, 103 aa, Homo sapiens; identical to SEQ ID NO: 1029793

SEQ ID NO: 1029830 - protein, 132 aa, Homo sapiens; identical to SEQ ID NO: 1029797

SEQ ID NO: 1029831 - protein, 110 aa, Homo sapiens [sequence omitted]

SEQ ID NO: 1029832 - protein, 103 aa, Homo sapiens; identical to SEQ ID NO: 1029793

SEQ ID NO: 1029833 - protein, 125 aa, Homo sapiens; identical to SEQ ID NO: 1029808

SEQ ID NO: 1029834 - protein, 103 aa, Homo sapiens; identical to SEQ ID NO: 1029793

SEQ ID NO: 1029835 - protein, 110 aa, Homo sapiens [sequence omitted]

SEQ ID NO: 1029836 - protein, 110 aa, Homo sapiens [sequence omitted]

SEQ ID NO: 1029837 - protein, 110 aa, Homo sapiens [sequence omitted]

SEQ ID NO: 1029838 - protein, 110 aa, Homo sapiens [sequence omitted]

SEQ ID NO: 1029839 - protein, 110 aa, Homo sapiens [sequence omitted]

SEQ ID NO: 1029840 - protein, 132 aa, Homo sapiens; identical to SEQ ID NO: 1029803

SEQ ID NO: 1029841 - protein, 103 aa, Homo sapiens; identical to SEQ ID NO: 1029793

SEQ ID NO: 1029842 - protein, 1292 aa, Homo sapiens
MAQSKRHVYSRTPSGSRMSAEASARPLRVGSRVEVIGKGHRGTVAYVGATLFATGKWVGVILDEAKGKNDGTVQGRKYFTCDEGHGIFVRQSQIQVFEDGADTTSPETPDSSASKVLKREGTDTTAKTSKLRGLKPKKAPTARKTTTRRPKPTRPASTGVAGASSSLGPSGSASAGELSSSEPSTPAQTPLAAPIIPTPVLTSPGAVPPLPSPSKEEEGLRAQVRDLEEKLETLRLKRAEDKAKLKELEKHKIQLEQVQEWKSKMQEQQADLQRRLKEARKEAKEALEAKERYMEEMADTADAIEMATLDKEMAEERAESLQQEVEALKERVDELTTDLEILKAEIEEKGSDGAASSYQLKQLEEQNARLKDALVRMRDLSSSEKQEHVKLQKLMEKKNQELEVVRQQRERLQEELSQAESTIDELKEQVDAALGAEEMVEMLTDRNLNLEEKVRELRETVGDLEAMNEMNDELQENARETELELREQLDMAGARVREAQKRVEAAQETVADYQQTIKKYRQLTAHLQDVNRELTNQQEASVERQQQPPPETFDFKIKFAETKAHAKAIEMELRQMEVAQANRHMSLLTAFMPDSFLRPGGDHDCVLVLCSSLVSFCKCVLVLLLMPRLICKAELIRKQAQEKFELSENCSERPGLRGAAGEQLSFAAGLVYSLSLLQATLHRYEHALSQCSVDVYKKVGSLYPEMSAHERSLDFLIELLHKDQLDETVNVEPLTKAIKYYQHLYSIHLAEQPEDCTMQLADHIKFTQSALDCMSVEVGRLRAFLQGGQEATDIALLLRDLETSCSDIRQFCKKIRRRMPGTDAPGIPAALAFGPQVSDTLLDCRKHLTWVVAVLQEVAAAAAQLIAPLAENEGLLVAALEELAFKASEQIYGTPSSSPYECLRQSCNILISTMNKLATAMQEGEYDAERPPSKPPPVELRAAALRAEITDAEGLGLKLEDRETVIKELKKSLKIKGEELSEANVRLSLLEKKLDSAAKDADERIEKVQTRLEETQALLRKKEKEFEETMDALQADIDQLEAEKAELKQRLNSQSKRTIEGLRGPPPSGIATLVSGIAGEEQQRGAIPGQAPGSVPGPGLVKDSPLLLQQISAMRLHISQLQHENSILKGAQMKASLASLPPLHVAKLSHEGPGSELPAGALYRKTSQLLETLNQLSTHTHVVDITRTSPAAKSPSAQLMEQVAQLKSLSDTVEKLKDEVLKETVSQRPGATVPTDFATFPSSAFLRAKEEQQDDTVYMGKVTFSCAAGFGQRHRLVLTQEQLHQLHSRLIS

SEQ ID NO: 1029843 - protein, 1278 aa, Homo sapiens
MAQSKRHVYSRTPSGSRMSAEASARPLRVGSRVEVIGKGHRGTVAYVGATLFATGKWVGVILDEAKGKNDGTVQGRKYFTCDEGHGIFVRQSQIQVFEDGADTTSPETPDSSASKVLKREGTDTTAKTSKLRGLKPKKAPTARKTTTRRPKPTRPASTGVAGASSSLGPSGSASAGELSSSEPSTPAQTPLAAPIIPTPVLTSPGAVPPLPSPSKEEEGLRAQVRDLEEKLETLRLKRAEDKAKLKELEKHKIQLEQVQEWKSKMQEQQADLQRRLKEARKEAKEALEAKERYMEEMADTADAIEMATLDKEMAEERAESLQQEVEALKERVDELTTDLEILKAEIEEKGSDGAASSYQLKQLEEQNARLKDALVRMRDLSSSEKQEHVKLQKLMEKKNQELEVVRQQRERLQEELSQAESTIDELKEQVDAALGAEEMVEMLTDRNLNLEEKVRELRETVGDLEAMNEMNDELQENARETELELREQLDMAGARVREAQKRVEAAQETVADYQQTIKKYRQLTAHLQDVNRELTNQQEASVERQQQPPPETFDFKIKFAETKAHAKAIEMELRQMEVAQANRHMSLLTAFMPDSFLRPGGDHDCVLVLLLMPRLICKAELIRKQAQEKFELSENCSERPGLRGAAGEQLSFAAGLVYSLSLLQATLHRYEHALSQCSVDVYKKVGSLYPEMSAHERSLDFLIELLHKDQLDETVNVEPLTKAIKYYQHLYSIHLAEQPEDCTMQLADHIKFTQSALDCMSVEVGRLRAFLQGGQEATDIALLLRDLETSCSDIRQFCKKIRRRMPGTDAPGIPAALAFGPQVSDTLLDCRKHLTWVVAVLQEVAAAAAQLIAPLAENEGLLVAALEELAFKASEQIYGTPSSSPYECLRQSCNILISTMNKLATAMQEGEYDAERPPSKPPPVELRAAALRAEITDAEGLGLKLEDRETVIKELKKSLKIKGEELSEANVRLSLLEKKLDSAAKDADERIEKVQTRLEETQALLRKKEKEFEETMDALQADIDQLEAEKAELKQRLNSQSKRTIEGLRGPPPSGIATLVSGIAGEEQQRGAIPGQAPGSVPGPGLVKDSPLLLQQISAMRLHISQLQHENSILKGAQMKASLASLPPLHVAKLSHEGPGSELPAGALYRKTSQLLETLNQLSTHTHVVDITRTSPAAKSPSAQLMEQVAQLKSLSDTVEKLKDEVLKETVSQRPGATVPTDFATFPSSAFLRAKEEQQDDTVYMGKVTFSCAAGFGQRHRLVLTQEQLHQLHSRLIS

SEQ ID NO: 1029844 - protein, 501 aa, Homo sapiens
MAQSKRHVYSRTPSGSRMSAEASARPLRVGSRVEVIGKGHRGTVAYVGATLFATGKWVGVILDEAKGKNDGTVQGRKYFTCDEGHGIFVRQSQIQVFEDGADTTSPETPDSSASKVLKREGTDTTAKTSKLRGLKPKKAPTARKTTTRRPKPTRPASTGVAGASSSLGPSGSASAGELSSSEPSTPAQTPLAAPIIPTPVLTSPGAVPPLPSPSKEEEGLRAQVRDLEEKLETLRLKRAEDKAKLKELEKHKIQLEQVQEWKSKMQEQQADLQRRLKEARKEAKEALEAKERYMEEMADTADAIEMATLDKEMAEERAESLQQEVEALKERVDELTTDLEILKAEIEEKGSDGAASSYQLKQLEEQNARLKDALVRMRDLSSSEKQEHVKLQKLMEKKNQELEVVRQQRERLQEELSQAESTIDELKEQVDAALGAEEMVEMLTDRNLNLEEKVRELRETVGDLEAMNRRDAEEWFHAKSAELNRRCLQHCHDSDHSTTIA

SEQ ID NO: 1029845 - protein, 187 aa, Homo sapiens
DTLLVFAFKMPEPAKSAPAPKKGSKKAVTKAQKKDGKKRKRSRKESYSVYVYKVLKQVHPDTGISSKAMGIMNSFVNDIFERIAGEASRLAHYNKRSTITSREIQTAVRLLLPGELAKHAVSEGTKAVTKYTSFQVKISKGRTHRFLDIFFSTAVHCWHTCFILGKKPNENECSLNMIKGGSFEQSK

SEQ ID NO: 1029846 - protein, 135 aa, Homo sapiens
DTLLVFAFKMPEPAKSAPAPKKGSKKAVTKAQKKDGKKRKRSRKESYSVYVYKVLKQVHPDTGISSKAMGIMNSFVNDIFERIAGEASRLAHYNKRSTITSREIQTAVRLLLPGELAKHAVSEGTKAVTKYTSAK

SEQ ID NO: 1029847 - protein, 134 aa, Homo sapiens
DTLLVFAFKMPEPAKSAPAPKKGSKKAVTKAQKKDGKKRKRSRKESYSVYVYKVLKQVHPDTGISSKAMGIMNSFVNDIFERIAGEASRLAHYNKRSTITSREIQTAVRLLLPGELAKHAVSEGTKAVTKYTSV

SEQ ID NO: 1029848 - protein, 429 aa, Homo sapiens
QFEHYKINFDDSKNGFSAWELIELIGNGQFSKGMDRQTVSMAINEVFNELILDVLKQGYMMKKGHRRKNWTERWFVLKPNIISYYVSEDLKDKKGDILLDENCCVESLPDKDGKKCLFLVKCFDKTFEISASDKKKKQELDFKPFTSTIHLLKLGSPPPHKEARQRRKELRKKQLAEQGELERQMKELQAANESKQQELEAVRKKLEEAASRAAEEEKKRLQTQVELQARFSTELEREKLIRQQMEEQVAQKSSELEQYLQRVRELEDMYLKLQEALEDERQARQDEETVRKLQARLLEEESSKRAELEKWHLEQQQAIQTTEAEKQELENQRVLKEQALQEAMEQLEELELERKQALEQYEEVKKKLEMATNKTKSWKDKVAHHEGLIRLIEPGSKNPHLITNWGPAAFTEAELEEREKNWKEKKTTE

SEQ ID NO: 1029849 - protein, 429 aa, Homo sapiens; identical to SEQ ID NO: 1029848

SEQ ID NO: 1029850 - protein, 429 aa, Homo sapiens; identical to SEQ ID NO: 1029848

SEQ ID NO: 1029851 - protein, 429 aa, Homo sapiens; identical to SEQ ID NO: 1029848

SEQ ID NO: 1029852 - protein, 136 aa, Homo sapiens
MVLLESEQFLTELTRLFQKCRTSGSVYITLKKYDGRTKPIPKKGTVEGFEPADNKCLLRATDGKKKISTVVSSKEVNKFQMAYSNLLRANMDGLKKRDKKNKTKKTKAAAAAAAAAPAAAATAATTAATTAATAAQ

SEQ ID NO: 1029853 - protein, 92 aa, Homo sapiens
LPALTARGLSGGSRASVAAMVLLESEQFLTELTRLFQKCRTSGSVYITLMKKRDKKNKTKKTKAAAAAAAAAPAAAATAATTAATTAATAAQ

SEQ ID NO: 1029854 - protein, 136 aa, Homo sapiens; identical to SEQ ID NO: 1029852

SEQ ID NO: 1029855 - protein, 145 aa, Homo sapiens
  misc_feature (125)..(125): Xaa can be any naturally occurring amino acid
  misc_feature (129)..(129): Xaa can be any naturally occurring amino acid
MVLLESEQFLTELTRLFQKCRTSGSVYITLKKYDGRTKPIPKKGTVEGFEPADNKCLLRATDGKKKISTVVSSKEVNKFQMAYSNLLRANMDGLKKRDKKNKTKKTKAAAAAGRQAGSAGAAGRXSRQXSKQAGKQAGRQAGRQQ

SEQ ID NO: 1029856 - protein, 272 aa, Homo sapiens
RPSPSRPLPFSPQSPRPCSFWLSPPTSDQRLDHSKSSSPEHCSTWTPVCLEGGLNVTLTIRLLMHGKEVGSIIGKKGESVKKMREESGARINISEGNCPERIITLAGPTNAIFKAFAMIIDKLEEDISSSMTNSTAASRPPVTLRLGGSLLVSVALSSDQGRHAPIKDNYERVQGLRSTVAGRSCYPTQLTGPSPIAGIPHSPSSQLSLTQQHLRASMTRHLSPQSPPPKGREPIPPNTGPSTHQASHEIHHHARVASATRVQGTHASDHAQ

SEQ ID NO: 1029857 - protein, 133 aa, Homo sapiens
RPSPSRPLPFSPQSPRPCSFWLSPPTSDQRLDHSKSSSPEHCSTWTPVCLEGGLNVTLTIRLLMHGKEVGSIIGKKGESVKKMREESGARINISEGNCPERIITLAGPTNAIFKAFAMIIDKLEEGHKQLYDQ

SEQ ID NO: 1029858 - protein, 469 aa, Homo sapiens
AAERALRGRDPGALRPHDPAHRPLLRDPGPRRSESPPGPGGDASLLARLFEHPLYRVAVPPLTEEDVLFNVNSDTRLSPKAAENPDWPHAGAEGAEFLSPGEAAVDSYPNWLKFHIGINRYELYSRHNPAIEALLHDLSSQRITSVAMKSGGTQLKLIMTFQNYGQALFKPMKQTREQETPPDFFYFSDYERHNAEIAAFHLDRILDFRRVPPVAGRMVNMTKEIRDVTRDKKLWRTFFISPANNICFYGECSYYCSTEHALCGKPDQIEGSLAAFLPDLSLAKRKTWRNPWRRSYHKRKKAEWEVDPDYCEEVKQTPPYDSSHRILDVMDMTIFDFLMGNMDRHHYETFEKFGNETFIIHLDNGRGFGKYSHDELSILVPLQQCCRIRKSTYLRLQLLAKEEYKLSLLMAESLRGDQVAPVLYQPHLEALDRRLRVVLKAVRDCVERNGLHSVVDDDLDTEHRAASAR

SEQ ID NO: 1029859 - protein, 279 aa, Homo sapiens
  misc_feature (246)..(246): Xaa can be any naturally occurring amino acid
  misc_feature (253)..(253): Xaa can be any naturally occurring amino acid
AAERALRGRDPGALRPHDPAHRPLLRDPGPRRSESPPGPGGDASLLARLFEHPLYRVAVPPLTEEDVLFNVNSDTRLSPKAAENPDWPHAGAEGAEFLSPGEAAVDSYPNWLKFHIGINRYELYSRHNPAIEALLHDLSSQRITSVAMKSGGTQLKLIMTFQNYGQALFKPMKQTREQETPPDFFYFSDYERHNAEIAAFHLDRILDFRRVPPVAGRMVNMTKEIRDVTRDKKLWRTFFISPANMXRGPAFIXPGSLARGPAFISPGSLARGAHIHLAR

SEQ ID NO: 1029860 - protein, 207 aa, Homo sapiens
MALRRAPQNLAWAPRLTLAPRRWEVDPDYCEEVKQTPPYDSSHRILDVMDMTIFDFLMGNMDRHHYETFEKFGNETFIIHLDNGRGWSLSSPLHTQGRAGHLPATCSPPETLGTGGADPPVEGWECRKGPSQSQMQRAAPGPNQEGGPPREWDLRGTGMLQTKSRQSWCYLGNGGQERLLVGRAGPCRIDGPLPARGTWSQPAGDRR

SEQ ID NO: 1029861 - protein, 469 aa, Homo sapiens; identical to SEQ ID NO: 1029858

SEQ ID NO: 1029862 - protein, 639 aa, Homo sapiens
AAERALRGRDPGALRPHDPAHRPLLRDPGPRRSESPPGPGGDASLLARLFEHPLYRVAVPPLTEEDVLFNVNSDTRLSPKAAENPDWPHAGAEGAEFLSPGEAAVDSYPNWLKFHIGINRYELYSRHNPAIEALLHDLSSQRITSVAMKSGGTQLKLIMTFQNYGQALFKPMKQTREQETPPDFFYFSDYERHNAEIAAFHLDRILDFRRVPPVAGRMVNMTKEIRDVTRDKKLWRTFFISPANKVTSEALPEPRAHQRAEPTETPPRPPDQGCQVISEALPEPRAHQRAEPTVDTPSAFQTKDARSSRRPCWSPEHIGGLSPLQTPPRPPNHGCQVVSEALLEPRAHWRAEPTADTPSASRGLNDPARGVNQKRENPISQEQGATLLPVCALREANRDAISWCLEEAGSLLANNICFYGECSYYCSTEHALCGKPDQIEGSLAAFLPDLSLAKRKTWRNPWRRSYHKRKKAEWEVDPDYCEEVKQTPPYDSSHRILDVMDMTIFDFLMGNMDRHHYETFEKFGNETFIIHLDNGRGFGKYSHDELSILVPLQQCCRIRKSTYLRLQLLAKEEYKLSLLMAESLRGDQVAPVLYQPHLEALDRRLRVVLKAVRDCVERNGLHSVVDDDLDTEHRAASAR

SEQ ID NO: 1029863 - protein, 252 aa, Homo sapiens
MVNMTKEIRDVTRDKKLWRTFFISPANNICFYGECSYYCSTEHALCGKPDQIEGSLAAFLPDLSLAKRKTWRNPWRRSYHKRKKAEWEVDPDYCEEVKQTPPYDSSHRILDVMDMTIFDFLMGNMDRHHYETFEKFGNETFIIHLDNGRGFGKYSHDELSILVPLQQCCRIRKSTYLRLQLLAKEEYKLSLLMAESLRGDQVAPVLYQPHLEALDRRLRVVLKAVRDCVERNGLHSVVDDDLDTEHRAASAR

SEQ ID NO: 1029864 - protein, 469 aa, Homo sapiens; identical to SEQ ID NO: 1029858

SEQ ID NO: 1029865 - protein, 194 aa, Homo sapiens
DSRLAAALSGGALVLSGLVHARGCTYSQLWSRSHPFCCSRGPLAMAGILFEDIFDVKDIDPEGKKFDRVSRLHCESESFKMDLILDVNIQIYPVDLGDKFRLVIASTLYEDGTLDDGEYNPTDDRPSRADQFEYVMYGKVYRIEGDETSTEAATRLSAYVSYGGLLMRLQGDANNLHGFEVDSRVYLLMKKLAF

SEQ ID NO: 1029866 - protein, 114 aa, Homo sapiens
MDLILDVNIQIYPVDLGDKFRLVIASTLYEDGTLDDGEYNPTDDRPSRADQFEYVMYGKVYRIEGDETSTEAATRLSAYVSYGGLLMRLQGDANNLHGFEVDSRVYLLMKKLAF

SEQ ID NO: 1029867 - protein, 123 aa, Homo sapiens
MDLILDVNIQIYPVDLGDKFRLVIASTLYEDGTLDDGEYNPTDDRPSRADQFEYVMYGKVYRIEGDETSTEAATRLSAYVSYGGLLMSLQQDTDNMQAMEMDSIPCVLKLQMRSHTFSLISRP

SEQ ID NO: 1029868 - protein, 56 aa, Homo sapiens
MTVDVTGSGQHFCSSFSVTSSTQTPHQVAEVEEAEDVAVSPDFTAVQRKESEQSKP

SEQ ID NO: 1029869 - protein, 160 aa, Homo sapiens
SSVINAEWPLRRGFVWRKVGFVLTLCTKAGNGHQSCCEGKSQCINSIQEDSPRWICSNLISRSGRKRHDKEFSVLLVCTEQQTQRQKKRAPTDGGSLCPPGRSAVARPQPSAASASVLKGRARLSLPTCWDYGREPPPGNNLIKKKKARKKTKENKNTTP

SEQ ID NO: 1029870 - protein, 131 aa, Homo sapiens
MKRMVSWSFHKLKTMKHLLLLLLCVFLVKSQGVNDNEEGFFSARGHRPLDKKREEAPSLRPAPPPISGGGYRARPAKAAATQKKVERKAPDAGGCLHADPDLGVLCPTGCQLQEALLQQERPIRNSVDEFK

SEQ ID NO: 1029871 - protein, 318 aa, Homo sapiens
MLEAVFTLTQTWGCCVLQDVSCKRLCYNRKGQSEIVLMSLNNNVEAVSQTSSSSFQYMYLLKDLWQKRQKQVKDNENVVNEYSSELEKHQLYIDETVNSNIPTNLRVLRSILENLRSKIQKLESDVSAQMEYCRTPCTVSCNIPVVSGKECEEIIRKGGETSEMYLIQPDSSVKPYRVYCDMNTENGGWTVIQNRQDGSVDFGRKWDPYKQGFGNVATNTDGKNYCGLPGEYWLGNDKISQLTRMGPTELLIEMEDWKGDKVKAHYGGFTVQNEANKYQISVNKYRGTAGNALMDGASQLMGENRTMTIHNGMFLQHV

SEQ ID NO: 1029872 - protein, 318 aa, Homo sapiens; identical to SEQ ID NO: 1029871

SEQ ID NO: 1029873 - protein, 318 aa, Homo sapiens; identical to SEQ ID NO: 1029871

SEQ ID NO: 1029874 - protein, 318 aa, Homo sapiens; identical to SEQ ID NO: 1029871

SEQ ID NO: 1029875 - protein, 247 aa, Homo sapiens
MLEAVFTLTQTWGCCVLQDVSCKRLCYNRKGQSEIVLMSLNNNVEAVSQTSSSSFQYMYLLKDLWQKRQKQVKDNENVVNEYSSELEKHQLYIDETVNSNIPTNLRVLRSILENLRSKIQKLESDVSAQMEYCRTPCTVSCNIPVVSGKECEEIIRKGGETSEMYLIQPDSSVKPYRVYCDMNTENGGWTVIQNRQDGSVDFGRKWDPYKQGFGNVATNTDGKNYCGLPGNEQACKIKSFYLKWDFF

SEQ ID NO: 1029876 - protein, 235 aa, Homo sapiens
MLEAVFTLTQTWGCCVLQDVSCKRLCYNRKGQSEIVLMSLNNNVEAVSQTSSSSFQYMYLLKDLWQKRQKQVKDNENVVNEYSSELEKHQLYIDETVNSNIPTNLRVLRSILENLRSKIQKLESDVSAQMEYCRTPCTVSCNIPVVSGKECEEIIRKGGETSEMYLIQPDSSVKPYRVYCDMNTENGAGNGIHINRDLEMLQPTQMGRITVAYQVNIGLEMIKLASLPGWDPQNF

SEQ ID NO: 1029877 - protein, 247 aa, Homo sapiens; identical to SEQ ID NO: 1029875

SEQ ID NO: 1029878 - protein, 318 aa, Homo sapiens; identical to SEQ ID NO: 1029871

SEQ ID NO: 1029879 - protein, 318 aa, Homo sapiens; identical to SEQ ID NO: 1029871

SEQ ID NO: 1029880 - protein, 318 aa, Homo sapiens; identical to SEQ ID NO: 1029871

SEQ ID NO: 1029881 - protein, 341 aa, Homo sapiens
MLEAVFTLTQTWGCCVLQDVSCKRLCYNRKGQSEIVLMSLNNNVEAVSQTSSSSFQYMYLLKDLWQKRQKQVKDNENVVNEYSSELEKHQLYIDETVNSNIPTNLRVLRSILENLRSKIQKLESDVSAQMEYCRTPCTVSCNIPVVSGKECEEIIRKGGETSEMYLIQPDSSVKPYRVYCDMNTENGGWTVIQNRQDGSVDFGRKWDPYKQGFGNVATNTDGKNYCGLPGEYWLGNDKISQLTRMGPTELLIEMEDWKGDKVKAHYGGFTVQNEANKYQIQCSKEDGGGWWYNRCHAANPNGRYYWGGQYTWDMAKHGTDDGVVWMNWKGSWYSMRGHGTQ

SEQ ID NO: 1029882 - protein, 318 aa, Homo sapiens; identical to SEQ ID NO: 1029871

SEQ ID NO: 1029883 - protein, 318 aa, Homo sapiens; identical to SEQ ID NO: 1029871

SEQ ID NO: 1029884 - protein, 318 aa, Homo sapiens; identical to SEQ ID NO: 1029871

SEQ ID NO: 1029885 - protein, 220 aa, Homo sapiens
  misc_feature (210)..(210): Xaa can be any naturally occurring amino acid
  misc_feature (218)..(218): Xaa can be any naturally occurring amino acid
MLEAVFTLTQTWGCCVLQDVSCKRLCYNRKGQSEIVLMSLNNNVEAVSQTSSSSFQYMYLLKDLWQKRQKQVKDNENVVNEYSSELEKHQLYIDETVNSNIPTNLRVLRSILENLRSKIQKLESDVSAQMEYCRTPCTVSCNIPVVSGKECEEIIRKGGETSEMYLIQPDSSVKPYRVYCDMNTENGDDSDQNVKTSVTCRNGSLTGFEXCTPVEDTXLQ

SEQ ID NO: 1029886 - protein, 318 aa, Homo sapiens; identical to SEQ ID NO: 1029871

SEQ ID NO: 1029887 - protein, 318 aa, Homo sapiens; identical to SEQ ID NO: 1029871

SEQ ID NO: 1029888 - protein, 318 aa, Homo sapiens; identical to SEQ ID NO: 1029871

SEQ ID NO: 1029889 - protein, 318 aa, Homo sapiens; identical to SEQ ID NO: 1029871

SEQ ID NO: 1029890 - protein, 300 aa, Homo sapiens
MLEAVFTLTQTWGCCVLQDVSCKRLCYNRKGQSEIVLMSLNNNVEAVSQTSSSSFQYMYLLKDLWQKRQKQVKDNENVVNEYSSELEKHQLYIDETVNSNIPTNLRVLRSILENLRSKIQKLESDVSAQMEYCRTPCTVSCNIPVVSGKECEEIIRKGGETSEMYLIQPDSSVKPYRVYCDMNTENGGWTVIQNRQDGSVDFGRKWDPYKQGFGNVATNTDGKNYCGLPGEYWLGNDDWKGDKVKAHYGGFTVQNEANKYQISVNKYRGTAGNALMDGASQLMGENRTMTIHNGMFLQHV

SEQ ID NO: 1029891 - protein, 300 aa, Homo sapiens
MLEAVFTLTQTWGCCVLQDVSCKRLCYNRKGQSEIVLMSLNNNVEAVSQTSSSSFQYMYLLKDLWQKRQKQVKDNENVVNEYSSELEKHQLYIDETVNSNIPTNLRVLRSILENLRSKIQKLESDVSAQMEYCRTPCTVSCNIPVVSGKECEEIIRPYRVYCDMNTENGGWTVIQNRQDGSVDFGRKWDPYKQGFGNVATNTDGKNYCGLPGEYWLGNDKISQLTRMGPTELLIEMEDWKGDKVKAHYGGFTVQNEANKYQISVNKYRGTAGNALMDGASQLMGENRTMTIHNGMFLQHV

SEQ ID NO: 1029892 - protein, 131 aa, Homo sapiens; identical to SEQ ID NO: 1029870

SEQ ID NO: 1029893 - protein, 318 aa, Homo sapiens; identical to SEQ ID NO: 1029871

SEQ ID NO: 1029894 - protein, 375 aa, Homo sapiens
MLEAVFTLTQTWGCCVLQDVSCKRLCYNRKGQSEIVLMSLNNNVEAVSQTSSSSFQYMYLLKDLWQKRQKQVKDNENVVNEYSSELEKHQLYIDETVNSNIPTNLRVLRSILENLRSKIQKLESDVSAQMEYCRTPCTVSCNIPVVSGKECEEIIRKGGETSEMYLIQPDSSVKPYRVYCDMNTENGGWTVIQNRQDGSVDFGRKWDPYKQGFGNVATNTDGKNYCGLPGEYWLGNDKISQLTRMGPTELLIEMEDWKGDKVKAHYGGFTVQNEANKYQISVNKYRGTAGNALMDGASQLMGDNDGWVTSDPMKQCSKEDGGGWWYNRCHAANPNGRYYWGGQYTWDMAKHGTDDGVVWMNWKGSWYSMRGHGTQ

SEQ ID NO: 1029895 - protein, 318 aa, Homo sapiens; identical to SEQ ID NO: 1029871

SEQ ID NO: 1029896 - protein, 318 aa, Homo sapiens; identical to SEQ ID NO: 1029871

SEQ ID NO: 1029897 - protein, 318 aa, Homo sapiens; identical to SEQ ID NO: 1029871

SEQ ID NO: 1029898 - protein, 281 aa, Homo sapiens
MLEAVFTLTQTWGCCVLQDVSCKRLCYNRKGQSEIVLMSLNNNVEAVSQTSSSSFQYMYLLKDLWQKRQKQVKDNENVVNEYSSELEKHQLYIDETVNSNIPTNLRVLRSILENLRSKIQKLESDVSAQMEYCRTPCTVSCNIPVVSGKECEEIIRKGGETSEMYLIQPDSSVKPYRVYCDMNTENGGWTVIQNRQDGSVDFGRKWDPYKQGFGNVATNTDGKNYCGLPGEYWLGNDKISQLTRMGPTELLIEMEDGQDTQSIFHSSATIIIAIPTRRQSI

SEQ ID NO: 1029899 - protein, 318 aa, Homo sapiens; identical to SEQ ID NO: 1029871

SEQ ID NO: 1029900 - protein, 227 aa, Homo sapiens
MLEAVFTLTQTWGCCVLQDVSCKRLCYNRKGQSEIVLMSLNNNVEAVSQTSSSSFQYMYLLKDLWQKRQKQVKDNENVVNEYSSELEKHQLYIDETVNSNIPTNLRVLRSILENLRSKIQKLESDVSAQMEYCRTPCTVSCNIPVVSGKECEEIIRKGGETSEMYLIQPDSSVKPYRVYCDMNTENGGWTVIQNRQDGSVDFGRKWDPYKQGFGNVATNTDGISPYL

SEQ ID NO: 1029901 - protein, 178 aa, Homo sapiens
YTVLVEAGLNRPRVEGLMTTVHAITATQKTVDGPSGKLWRDGRGALQNIIPASTGAAKAVGKVIPELNGKLTGMAFRVPTANVSVVDLTCRLEKPAKYDDIKKVVKQASEGPLKGILGYTEHQVVSSDFNSDTHSSTFDAGAGIALNDHFVKLISWYDNEFGYSNRVVDLMAHMASKE

SEQ ID NO: 1029902 - protein, 105 aa, Homo sapiens
MGKVKVGVNGFGRIGRLVTRAAFNSGKVDIVAINDPFIDLNYMVYMFQYDSTHGKFHGTVKAENGKLVINGNPITIFQERDPSKIKWGDAGAEYVVESTDYFTNT

SEQ ID NO: 1029903 - protein, 351 aa, Homo sapiens
LGYRDRIHVTAIHHCAKCEEFCGVNGFGRIGRLVTRAAFNSGKVDIVAINDPFIDLNYMVYMFQYDSTHGKFHGTVKAENGKLVINGNPITIFQERDPSKIKWGDAGAEYVVESTGVFTTMEKAGAHLQGGAKRVIISAPSADAPMFVMGVNHEKYDNSLKIISNASCTTNCLAPLAKVIHDNFGIVEGLMTTVHAITATQKTVDGPSGKLWRDGRGALQNIIPASTGAAKAVGKVIPELNGKLTGMAFRVPTANVSVVDLTCRLEKPAKYDDIKKVVKQASEGPLKGILGYTEHQVVSSDFNSDTHSSTFDAGAGIALNDHFVKLISWYDNEFGYSNRVVDLMAHMASKE

SEQ ID NO: 1029904 - protein, 352 aa, Homo sapiens
RGRAGAGDSRAPPAHAGPRGRGGGVNGFGRIGRLVTRAAFNSGKVDIVAINDPFIDLNYMVYMFQYDSTHGKFHGTVKAENGKLVINGNPITIFQERDPSKIKWGDAGAEYVVESTGVFTTMEKAGAHLQGGAKRVIISAPSADAPMFVMGVNHEKYDNSLKIISNASCTTNCLAPLAKVIHDNFGIVEGLMTTVHAITATQKTVDGPSGKLWRDGRGALQNIIPASTGAAKAVGKVIPELNGKLTGMAFRVPTANVSVVDLTCRLEKPAKYDDIKKVVKQASEGPLKGILGYTEHQVVSSDFNSDTHSSTFDAGAGIALNDHFVKLISWYDNEFGYSNRVVDLMAHMASKE

SEQ ID NO: 1029905 - protein, 424 aa, Homo sapiens
MELPMGGIILEHVNPCKLRSMKGSLMATISTLPELKAALVTRRPIRPNPLTPTFTFPMVSEQMWLSAPPVRQSAASSFASPAEPHRSDTMGKVKVGVNGFGRIGRLVTRAAFNSGKVDIVAINDPFIDLNYMVYMFQYDSTHGKFHGTVKAENGKLVINGNPITIFQERDPSKIKWGDAGAEYVVESTGVFTTMEKAGAHLQGGAKRVIISAPSADAPMFVMGVNHEKYDNSLKIISNASCTTNCLAPLAKVIHDNFGIVEGLMTTVHAITATQKTVDGPSGKLWRDGRGALQNIIPASTGAAKAVGKVIPELNGKLTGMAFRVPTANVSVVDLTCRLEKPAKYDDIKKVVKQASEGPLKGILGYTEHQVVSSDFNSDTHSSTFDAGAGIALNDHFVKLISWYDNEFGYSNRVVDLMAHMASKE

SEQ ID NO: 1029906 - protein, 424 aa, Homo sapiens; identical to SEQ ID NO: 1029905

SEQ ID NO: 1029907 - protein, 284 aa, Homo sapiens
LRLRYEAGVQAENGKLVINGNPITIFQERDPSKIKWGDAGAEYVVESTGVFTTMEKAGAHLQGGAKRVIISAPSADAPMFVMGVNHEKYDNSLKIISNASCTTNCLAPLAKVIHDNFGIVEGLMTTVHAITATQKTVDGPSGKLWRDGRGALQNIIPASTGAAKAVGKVIPELNGKLTGMAFRVPTANVSVVDLTCRLEKPAKYDDIKKVVKQASEGPLKGILGYTEHQVVSSDFNSDTHSSTFDAGAGIALNDHFVKLISWYDNEFGYSNRVVDLMAHMASKE

SEQ ID NO: 1029908 - protein, 424 aa, Homo sapiens; identical to SEQ ID NO: 1029905

SEQ ID NO: 1029909 - protein, 424 aa, Homo sapiens; identical to SEQ ID NO: 1029905

SEQ ID NO: 1029910 - protein, 427 aa, Homo sapiens
MELPMGGIILEHVNPCKLRSMKGSLMATISTLPELKAALVTRRPIRPNPLTPTFTFPMVSEQMWLSAPPVRQSAASSFASPAEPHRSDTMGKVKVGVNGFGRIGRLVTRAAFNSGKVDIVAINDPFIDLNYMVYMFQYDSTHGKFHGTVKAENGKLVINGNPITIFQERDPSKIKWGDAGAEYVVESTGVFTTMEKAGAHLQGGAKRVIISAPSADAPMFVMGVNHEKYDNSLKIISNASCTTNCLAPLAKVIHDNFGIVEGLMTTVHAITATQKTVDGPSGKLWRDGRGALQNIIPASTGAAKAVGKVIPELNGKLTGMAFRVPTANVSVVDLTCRLEKPAKYDDIKKVVKQASEGPLKGILGYTEHQVVSSDFNSDTHSSTFDAGAGIALNDHFVKLISWYDNELATAPGGPALARVNRHTRKGN

SEQ ID NO: 1029911 - protein, 389 aa, Homo sapiens
MELPMGGIILEHVNPCKLRSMKGSLMATISTLPELKAALVTRRPIRPNPLTPTFTFPMVSEQMWLSAPPVRQSAASSFASPAEPHRSDTMGKVKVGVNGFGRIGRLVTRAAFNSGKVDIVAINDPFIDLNYMVYMFQYDSTHGKFHGTVKAENGKLVINGNPITIFQERDPSKIKWGDAGAEYVVESTGVFTTMEKAGAHLQGGAKRVIISAPSADAPMFVMGVNHEKYDNSLKIISNASCTTNCLAPLAKVIHDNFGIVEGLMTTVHAITATQKTVDGPSGKLWRDGRGALQNIIPASTGAAKAVGKVIPELNGKLTGMAFRVPTANVSVVDLTCRLEKPAKYDDIKKVVKQASEGPLKGILGYTEHQVVSSDFNSPQRPLCQAHFLV

SEQ ID NO: 1029912 - protein, 274 aa, Homo sapiens
MELPMGGIILEHVNPCKLRSMKGSLMATISTLPELKAALVTRRPIRPNPLTPTFTFPMVSEQMWLSAPPVRQSAASSFASPAEPHRSDTMGKVKVGVNGFGRIGRLVTRAAFNSGKVDIVAINDPFIDLNYMVYMFQYDSTHGKFHGTVKAENGKLVINGNPITIFQERDPSKIKWGDAGAEYVVESTGVFTTMEKAGAHLQGGAKRVIISAPSADAPMFVMGVNHEKYDNSLKIISNASCTTNCLAPLAKVIHDNFGIVVGLMTTVHFITFTQ

SEQ ID NO: 1029913 - protein, 189 aa, Homo sapiens
YTVLGRGWVNRPRVEEVIHDNFGIVEGLMTTVHAITATQKTVDGPSGKLWRDGRGALQNIIPASTGAAKAVGKVIPELNGKLTGMAFRVPTANVSVVDLTCRLEKPAKYDDIKKVVKQASEGPLKGILGYTEHQVVSSDFNSDTHSSTFDAGAGIALNDHFVKLISWYDNEFGYSNRVVDLMAHMASKE

SEQ ID NO: 1029914 - protein, 158 aa, Homo sapiens
HKKPNWKRHAQSNQGPLVPTARGGALQNIIPASTGAAKAVGKVIPELNGKLTGMAFRVPTANVSVVDLTCRLEKPAKYDDIKKVVKQASEGPLKGILGYTEHQVVSSDFNSDTHSSTFDAGAGIALNDHFVKLISWYDNEFGYSNRVVDLMAHMASKE

SEQ ID NO: 1029915 - protein, 424 aa, Homo sapiens; identical to SEQ ID NO: 1029905

SEQ ID NO: 1029916 - protein, 424 aa, Homo sapiens; identical to SEQ ID NO: 1029905

SEQ ID NO: 1029917 - protein, 424 aa, Homo sapiens; identical to SEQ ID NO: 1029905

SEQ ID NO: 1029918 - protein, 424 aa, Homo sapiens; identical to SEQ ID NO: 1029905

SEQ ID NO: 1029919 - protein, 279 aa, Homo sapiens
MAPVEAENGKLVINGNPITIFQERDPSKIKWGDAGAEYVVESTGVFTTMEKAGAHLQGGAKRVIISAPSADAPMFVMGVNHEKYDNSLKIISNASCTTNCLAPLAKVIHDNFGIVEGLMTTVHAITATQKTVDGPSGKLWRDGRGALQNIIPASTGAAKAVGKVIPELNGKLTGMAFRVPTANVSVVDLTCRLEKPAKYDDIKKVVKQASEGPLKGILGYTEHQVVSSDFNSDTHSSTFDAGAGIALNDHFVKLISWYDNEFGYSNRVVDLMAHMASKE

SEQ ID NO: 1029920 - protein, 424 aa, Homo sapiens; identical to SEQ ID NO: 1029905

SEQ ID NO: 1029921 - protein, 296 aa, Homo sapiens
MELPMGGIILEHVNPCKLRSMKGSLMATISTLPELKAALVTRRPIRPNPLTPTFTFPMVSEQMWLSAPPVRQSAASSFASPAEPHRSDTMGKVKVGVNGFGRIGRLVTRAAFNSGKVDIVAINDPFIDLNYMVYMFQYDSTHGKFHGTVKAENGKLVINGNPITIFQERDPSKIKWGDAGAEYVVESTGVFTTMEKAGAHLQGGAKRVIISAPSADAPMFVMGVNHEKYDNSLKIISNASCTTNCLAPLAKVIHDNFGIVEGLMTTVHAITAAGLSRTSSLPLLALPRLWARSSLS

SEQ ID NO: 1029922 - protein, 260 aa, Homo sapiens
MELPMGGIILEHVNPCKLRSMKGSLMATISTLPELKAALVTRRPIRPNPLTPTFTFPMVSEQMWLSAPPVRQSAASSFASPAEPHRSDTMGKVKVGVNGFGRIGRLVTRAAFNSGKVDIVAINDPFIDLNYMVYMFQYDSTHGKFHGTVKAENGKLVINGNPITIFQERDPSKIKWGDAGAEYVVESTGVFTTMEKAGAHLQGGAKRVIISAPSADAPMFVMGVNHEKYDNSLKIISNAFFTTNYLSPLTNVIHDNFYIL

SEQ ID NO: 1029923 - protein, 199 aa, Homo sapiens
MLFRYQGYIGAALVLGGVDVTGPHLYSIYPHGSTDKLPYVTMGSGSLAAMAVFEDKFRPDMEEEEAKNLVSEAIAAGIFNDLGSGSNIDLCVISKNKLDFLRHTQCPTRRGPGLAGTGVRKGLLQSSLEKITPLEIEVAGKKQSKHMDTFLNGHQLALAGPAVSGTVVSIEAQLRHSLLGSVCRMKLNSIKNKNQIGQV

SEQ ID NO: 1029924 - protein, 158 aa, Homo sapiens
MGSGSLAAMAVFEDKFRPDMEEEEAKNLVSEAIAAGIFNDLGSGSNIDLCVISKNKLDFLRHTQCPTRRGPGLAGTGVRKGLLQSSLEKITPLEIEVAGKKHVQTMDTFLNEHQLALAGPAVSGTVVSIEAQLKHSLLASVCRMKLNSIKNKNQIGQV

SEQ ID NO: 1029925 - protein, 162 aa, Homo sapiens
MLFRYRSGSLAAMAVFEDKFRPDMEEEEAKNLVSEAIAAGIFNDLGSGSNIDLCVISKNKLDFLRHTQCPTRRGPGLAGTGVRKGLLQSSLEKITPLEIEVAGKKQSKQSDTFLNGHQLALAGPAVSGTVVSIEAQLRHSLWVSVCRMKLNSIKNKNQIGQV

SEQ ID NO: 1029926 - protein, 70 aa, Homo sapiens
NCFLGKMAAVSVYAPPVGGFSFDNCRRNAVLEADFAKRGYKLPKVRKTGTTIAGVVYKDGIVLGADTKSN

SEQ ID NO: 1029927 - protein, 199 aa, Homo sapiens; identical to SEQ ID NO: 1029923

SEQ ID NO: 1029928 - protein, 199 aa, Homo sapiens; identical to SEQ ID NO: 1029923

SEQ ID NO: 1029929 - protein, 355 aa, Homo sapiens
MEGLGSSAWKIARLLGSAPGLRFFLSKRAHHTLAIHYPAWLMHQSGKFDFFAEKGEEERGLEEEGDQPGLPKAWPACRLSVAPMGQGRRPAVEGLGPIPGGLGGGGGGDRRAGVGTARPPCPTAVSFSICSPPKPPLFSMPQAPSVSPESPGELWLPGWTVAWPGPSLGLLACLSCCPSSKLLAPRLQERFQIVLPSLAPSRIHAHIHSFSKRPWSLFLHQSAGSNLVSVGQMAAVGCEQVSQPLRAGFFLCNTGVIIVPAFWAYRRIKGQNVDKVCRVTPARNTGPVSVAGECVTAGHARSRGGRQRRSPWASLEAHEAVLNMLKEEVPVPWEGPRNEEPWKETRGPGEQAEGR

SEQ ID NO: 1029930 - protein, 355 aa, Homo sapiens; identical to SEQ ID NO: 1029929

SEQ ID NO: 1029931 - protein, 361 aa, Homo sapiens
MEGKWLLCMLLVLGTAIVEAHDGHDDDVIDIEDDLDDVIEEVEDSKPDTTAPPSSPKVTYKAPVPTGEVYFADSFDRGTLSGWILSKAKKDDTDDEIAKYDGKWEVEEMKESKLPGDKGLVLMSRAKHHAISAKLNKPFLFDTKPLIVQYEVNFQNGIECGGAYVKLLSKTPELNLDQFHDKTPYTIMFGPDKCGEDYKLHFIFRHKNPKTGIYEEKHAKRPDADLKTYFTDKKTHLYTLILNPDNSFEILVDQSVVNSGNLLNDMTPPVNPSREIEDPEDRKPEDWDERPKIPDPEAVKPDDWDEDAPAKIPDEEATKPEGWLDDEPEYVPDPDAEGWVRAVEGRHRPCASATGPWAGCW

SEQ ID NO: 1029932 - protein, 517 aa, Homo sapiens
HEAPRHIYYNTQGAYVVRKEEISRVRWLTPVIPALWKAEAGRSRRQEIETILANTVKTLSLLKITKISWMWCCTPVIPPTWEAEIMEGKWLLCMLLVLGTAIVEAHDGHDDDVIDIEDDLDDVIEEVEDSKPDTTAPPSSPKVTYKAPVPTGEVYFADSFDRGTLSGWILSKAKKDDTDDEIAKYDGKWEVEEMKESKLPGDKGLVLMSRAKHHAISAKLNKPFLFDTKPLIVQYEVNFQNGIECGGAYVKLLSKTPELNLDQFHDKTPYTIMFGPDKCGEDYKLHFIFRHKNPKTGIYEEKHAKRPDADLKTYFTDKKTHLYTLILNPDNSFEILVDQSVVNSGNLLNDMTPPVNPSREIEDPEDRKPEDWDERPKIPDPEAVKPDDWDEDAPAKIPDEEATKPEGWLDDEPEYVPDPDAEKPEDWDEDMDGEWEAPQIANPRCESAPGCGVWQRPVIDNPNYKGKWKPPMIDNPSYQGIWKPRKIPNPDFFEDLEPFQNDSFLCYWFGDWWSMNL

SEQ ID NO: 1029933 - protein, 149 aa, Homo sapiens
MEGKWLLCMLLVLGTAIVEAHDGHDDDVIDIEDDLDDVIEEVEDSKPDTTAPPSSPKVTYKAPVPTGEVYFADSFDRGTLSGWILSKAKKDDTDDEIAKYDGKWEVEEMKESKLPGDKGLVLMSRAKHHAISAKLNKPFLFDTKPLIVQ

SEQ ID NO: 1029934 - protein, 227 aa, Homo sapiens
MEGKWLLCMLLVLGTAIVEAHDGHDDDVIDIEDDLDDVIEEVEDSKPDTTAPPSSPKVTYKAPVPTGEVYFADSFDRGTLSGWILSKAKKDDTDDEIAKYDGKWEVEEMKESKLPGDKGLVLMSRAKHHAISAKLNKPFLFDTKPLIVQYEVNFQNGIECGGAYVKLLSMFGPDKCGEDYKLHFIFRHKNPKTGIYEEKHAKRPDADLKTYFTDKKTHLYTLSKKKH

SEQ ID NO: 1029935 - protein, 226 aa, Homo sapiens
MEGKWLLCMLLVLGTAIVEAHDGHDDDVIDIEDDLDDVIEEVEDSKPDTTAPPSSPKVTYKAPVPTGEVYFADSFDRGTLSGWILSKAKKDDTDDEIAKYDGKWEVEEMKESKLPGDKGLVLMSRAKHHAISAKLNKPFLFDTKPLIVQYEVNFQNGIECGGAYVKLLSKTPELNLVCNSHFWNVAGHPLLPCKNFVIGPGVVAHACNPSSQHFGKPRQADHASGM

SEQ ID NO: 1029936 - protein, 167 aa, Homo sapiens
MTPPVNPSREIEDPEDRKPEDWDERPKIPDPEAVKPDDWDEDAPAKIPDEEATKPEGWLDDEPEYVPDPDAEKPEDWDEDMDGEWEAPQIANPRCESAPGCGVWQRPVIDNPNYKGKWKPPMIDNPSYQGIWKPRKIPNPDFFEDLEPFQNDSFLCYWFGDWWSMNL

SEQ ID NO: 1029937 - protein, 183 aa, Homo sapiens
MEGKWLLCMLLVLGTAIVEAHDGHDDDVIDIEDDLDDVIEEVEDSKPDTTAPPSSPKVTYKAPAKIPDEEATKPEGWLDDEPEYVPDPDAEKPEDWDEDMDGEWEAPQIANPRCESAPGCGVWQRPVIDNPNYKGKWKPPMIDNPSYQGIWKPRKIPNPDFFEDLEPFRMTPFCATGSETGGP

SEQ ID NO: 1029938 - protein, 429 aa, Homo sapiens
MEGKWLLCMLLVLGTAIVEAHDGHDDDVIDIEDDLDDVIEEVEDSKPDTTAPPSSPKVTYKAPVPTGEVYFADSFDRGTLSGWILSKAKKDDTDDEIAKYDGKWEVEEMKESKLPGDKGLVLMSRAKHHAISAKLNKPFLFDTKPLIVQYEVNFQNGIECGGAYVKLLSKTPELNLDQFHDKTPYTIMFGPDKCGEDYKLHFIFRHKNPKTGIYEEKHAKRPDADLKTYFTDKKTHLYTLILNPDNSFEILVDQSVVNSGNLLNDMTPPVNPSREIEDPEDRKPEDWDERPKIPDPEAVKPDDWDEDAPAKIPDEEATKPEGWLDDEPEYVPDPDAEKPEDWDEDMDGEWEAPQIANPRCESAPGCGVWQRPVIDNPNYKGKWKPPMIDNPSYQGIWKPRKIPNPDFFEDLEPFRMTPFCATGSETGGP

SEQ ID NO: 1029939 - protein, 473 aa, Homo sapiens
RRGFVRWGSLARQRWPRPLGSAARDGRAASASLFTAARGKIMEGKWLLCMLLVLGTAIVEAHDGHDDDVIDIEDDLDDVIEEVEDSKPDTTAPPSSPKVTYKAPVPTGEVYFADSFDRGTLSGWILSKAKKDDTDDEIAKYDGKWEVEEMKESKLPGDKGLVLMSRAKHHAISAKLNKPFLFDTKPLIVQYEVNFQNGIECGGAYVKLLSKTPELNLDQFHDKTPYTIMFGPDKCGEDYKLHFIFRHKNPKTGIYEEKHAKRPDADLKTYFTDKKTHLYTLILNPDNSFEILVDQSVVNSGNLLNDMTPPVNPSREIEDPEDRKPEDWDERPKIPDPEAVKPDDWDEDAPAKIPDEEATKPEGWLDDEPEYVPDPDAEKPEDWDEDMDGEWEAPQIANPRCESAPGCGVWQRPVIDNPNYKGKWKPPMIDNPSYQGIWKPRKIPNPDFFEDLEPFQNDSFLCYWFGDWWSMNL

SEQ ID NO: 1029940 - protein, 414 aa, Homo sapiens
MEGKWLLCMLLVLGTAIVEAHDGHDDDVIDIEDDLDDVIEEVEDSKPDTTAPPSSPKVTYKAPVPTGEVYFADSFDRGTLSGWILSKAKKDDTDDEIAKYDGKWEVEEMKESKLPGDKGLVLMSRAKHHAISAKLNKPFLFDTKPLIVQYEVNFQNGIECGGAYVKLLSMFGPDKCGEDYKLHFIFRHKNPKTGIYEEKHAKRPDADLKTYFTDKKTHLYTLILNPDNSFEILVDQSVVNSGNLLNDMTPPVNPSREIEDPEDRKPEDWDERPKIPDPEAVKPDDWDEDAPAKIPDEEATKPEGWLDDEPEYVPDPDAEKPEDWDEDMDGEWEAPQIANPRCESAPGCGVWQRPVIDNPNYKGKWKPPMIDNPSYQGIWKPRKIPNPDFFEDLEPFQNDSFLCYWFGDWWSMNL

SEQ ID NO: 1029941 - protein, 149 aa, Homo sapiens; identical to SEQ ID NO: 1029933

SEQ ID NO: 1029942 - protein, 95 aa, Homo sapiens
MEGKWLLCMLLVLGTAIVEAHDGHDDDVIDIEDDLDDVIEEVEDSKPDTTAPPSSPKVTYKAPVPTGEVYFVSNHCSSFISQGYLQSSSSNRGSI

SEQ ID NO: 1029943 - protein, 421 aa, Homo sapiens
MEGKWLLCMLLVLGTAIVEAHDGHDDDVIDIEDDLDDVIEEVEDSKPDTTAPPSSPKVTYKAPVPTGEVYFADSFDRGTLSGWILSKAKKDDTDDEIAKYDGKWEVEEMKESKLPGDKGLVLMSRAKHHAISAKLNKPFLFDTKPLIVQYEVNFQNGIECGGAYVKLLSKTPELNLDQFHDKTPYTIMFGPDKCGEDYKLHFIFRHKNPKTGIYEEKHAKRPDADLKTYFTDKKTHLYTLILNPDNSFEILVDQSTPPVNPSREIEDPEDRKPEDWDERPKIPDPEAVKPDDWDEDAPAKIPDEEATKPEGWLDDEPEYVPDPDAEKPEDWDEDMDGEWEAPQIANPRCESAPGCGVWQRPVIDNPNYKGKWKPPMIDNPSYQGIWKPRKIPNPDFFEDLEPFQNDSFLCYWFGDWWSMNL

SEQ ID NO: 1029944 - protein, 66 aa, Homo sapiens
MGKGDPKKPRGKMSSYAFFVQTCREEHKKKHPDASVNSKVLKSLKRVEPMSQRKKFEIATGSPYEN

SEQ ID NO: 1029945 - protein, 215 aa, Homo sapiens
MGKGDPKKPRGKMSSYAFFVQTCREEHKKKHPDASVNFSEFSKKCSERWKTMSAKEKGKFEDMAKADKARYEREMKTYIPPKGETKKKFKDPNAPKRPPSAFFLFCSEYRPKIKGEHPGLSIGDVAKKLGEMWNNTAADDKQPYEKKAAKLKEKYEKDIAAYRAKGKPDAAKKGVVKAEKSKKKKEEEEDEEDEEDEEEEEDEEDEDEEEDDDDE

SEQ ID NO: 1029946 - protein, 215 aa, Homo sapiens; identical to SEQ ID NO: 1029945

SEQ ID NO: 1029947 - protein, 215 aa, Homo sapiens
MGKGDPKKPRGKMSSYAFFVQTCREEHKKKHPDASVNFSEFSKKCSERWKTMSAKEKGKFEDMAKADKARYEREMKTYIPPKGETKKKFKDPNAPKRPPSAFFLFCSEYRPKIKGEHPGLSIGDVAKKLGEMWNNTAADDKQPYEKKAAKLKEKYEKDIAAYRAKGKPDAAKKGVVQAEKSPKKKEEEEDEEDEEDEEEEEDEEDEDEEEDDDDE

SEQ ID NO: 1029948 - protein, 215 aa, Homo sapiens; identical to SEQ ID NO: 1029945

SEQ ID NO: 1029949 - protein, 282 aa, Homo sapiens
MGKGDPKKPRGKMSSYAFFVQTCREEHKKKHPDASVNFSEFSKKCSERWKTMSAKEKGKFEDMAKADKARYEREMKTYIPPKGETKKKFKDPNAPKRPPSAFFLFCSEYRPKIKGEHPGLSIGDVAKKLGEMWNNTAADDKQPYEKKAAKLKEKYEKDIAAYRAKGKPDAAKKGVVKAEKSKKKKEEEEKKKKKKKFLGGKDPKKRCVRATPMWDSRGPSRVKRTRGAQRGSQEETAGQEKGGELTTQKKKGRGEHRVLEQPQEESGETKRDTTERPKRAKK

SEQ ID NO: 1029950 - protein, 205 aa, Homo sapiens
MGKGDPKKPRGKMSSYAFFVQTCREEHKKKHPDASVNFSEFSKKCSERWKTMSAKEKGKFEDMAKADKARYEREMKTYIPPKGETKKKFKDPNAPKRPPSAFFLFCSEYRPKIKGEHPGLSIGDVAKKLGEMWNNTAADDKQPYEKKAAKLKEKYEKDIAAYRAKGKPDAAKKGVVKAEKSKKKKEEEEDEEDVPSLKCFGGVTT

SEQ ID NO: 1029951 - protein, 246 aa, Homo sapiens
MYCAKHSPNNIVVSDFFLFVPLALDDSMCPFNDQDTEVLERCSMRPQVRAMYPAGASGKGQGIVCGDSGGSGGSGQPDLVTLLAHQTILHLPPPMDPLPLCLPVLLMLQWITQHPSLGPMPLKMDLPPGDPGVLPLSCPQECPDPHSYPGPRSPTPGLPSSAVNDDLLLLPSSLPSVTKGLPRCQLWNEGCPWEVMTLRYTGAQQIASSYPQTVFACMQPLALPLCGRKPAQGHTAGQQQHSWSQI

SEQ ID NO: 1029952 - protein, 227 aa, Homo sapiens
MGKGDPKKPRGKMSSYAFFVQTCREEHKKKHPDASVNFSEFSKKCSERWKTMSAKEKGKFEDMAKADKARYEREMKTYIPPKGETKKKFKDPNAPKRPPSAFFLFCSEYRPKIKGEHPGLSIGDVAKKLGEMWNNTAADDKQPYEKKAAKLKKKKKKKKKKKKNPGGYFWGGAEQRGVHDKGGHAAHKRVSRGPGAFWCHQGGKHRGGPTQKGDTKKIGQRPRGNRA

SEQ ID NO: 1029953 - protein, 215 aa, Homo sapiens; identical to SEQ ID NO: 1029945

SEQ ID NO: 1029954 - protein, 218 aa, Homo sapiens
MGKGDPKKPRGKMSSYAFFVQTCREEHKKKHPDASVNFSEFSKKCSERWKTMSAKEKGKFEDMAKADKARYEREMKTYIPPKGETKKKFKDPNAPKRPPSAFFLFCSEYRPKIKGEHPGLSIGDVAKKLGEMWNNTAADDKQPYEKKAAKLKEKYEKDIAAYRAKGKPDAAKKGVVKAEKSKKKKEEGGIYEECMKKDEEEGGRCEEDEDEEEDDDDE

SEQ ID NO: 1029955 - protein, 215 aa, Homo sapiens; identical to SEQ ID NO: 1029945

SEQ ID NO: 1029956 - protein, 215 aa, Homo sapiens; identical to SEQ ID NO: 1029945

SEQ ID NO: 1029957 - protein, 215 aa, Homo sapiens
MGKGDPKKPRGKMSSYAFFVQTCREEHKKKHPDASVNFSEFSKKCSERWKTMSAKEKGKFEDMAKADKARYEREMKTYIPPKGETKKKFKDPNAPKRPPSAFFLFCSEYRPKIKGEHPGLSIGDVAKKLGEMWNNTAADDKQPYEKKAAKLKEKYEKDIAAYRAKGKPDAAKKGVVKAEKSKKKSKNERNEEERLTDTTERRTDGRTDGPTDTND

SEQ ID NO: 1029958 - protein, 282 aa, Homo sapiens; identical to SEQ ID NO: 1029949

SEQ ID NO: 1029959 - protein, 200 aa, Homo sapiens [sequence omitted]

SEQ ID NO: 1029960 - protein, 156 aa, Homo sapiens
MGKGDPKKPRGKMSSYAFFVQTCREEHKKKHPDASVNFSEFSKKCSERWKTMSAKEKGKFEDMAKADKARYEREMKTYIPPKGETKKKFKDPNAPKRPPSAFFLFCSEYRPKIKGEHPGLSIGDVAKKLGEMWNNTAADDKQPYEKKAAKLKEKYE

SEQ ID NO: 1029961 - protein, 167 aa, Homo sapiens
MGKGDPKKPRGKMSSYAFFVQTCREEHKKKHPDASVNFSEFSKKCSERWKTMSAKEKGKFEDMAKADKARYEREMKTYIPPKGETKKKFKDPNAPKRPPSAFFLFCSEYRPKIKGEHPGLSIGDVAKKLGEMWNNTAADDKQPYEKKAAKLKEKLRKGKKCGFCLVN

SEQ ID NO: 1029962 - protein, 223 aa, Homo sapiens
MGKGDPKKPRGKMSSYAFFVQTCREEHKKKHPDASVNFSEFSKKCSERWKTMSAKEKGKFEDMAKADKARYEREMKTYIPPKGETKKKFKDPNAPKRPPSAFFLFCSEYRPKIKGEHPGLSIGDVAKKLGEMWNNTAADDKQPYEKKAAKLKEKYEKDIAAYRAKGKPDAAKKGVVKAEKSKKKMKKMKMKKKMMMMNKLVLAQFFFFLSIKHLTPLYTTHSF

SEQ ID NO: 1029963 - protein, 186 aa, Homo sapiens
MVARARRLIELYKEAGISKDRILIKLSSTWEGIQAGKELEEQHGIHCNMTLLFSFAQAVACAEAGVTLISPFVGRILDWHVANTDKKSYEPLEDPGVKSVTKIYNYYKKFSYKTIVMGASFRNTGEIKALAVWILNIYQVWELRGKAVGCGQAGGQQGWKPRGTPVGPEQWAPRPRPNTAGKQDNP

SEQ ID NO: 1029964 - protein, 220 aa, Homo sapiens [sequence omitted]

SEQ ID NO: 1029965 - protein, 220 aa, Homo sapiens [sequence omitted]

SEQ ID NO: 1029966 - protein, 172 aa, Homo sapiens
MVARARRLIELYKEAGISKDRILIKLSSTWEGIQAGKELEEQHGIHCNMTLLFSFAQAVACAEAGVTLISPFVGRILDWHVANTDKKSYEPLEDPGVKSVTKIYNYYKKFSYKTIVMGASFRNTGEIKALAGCDFLTISPKLLGELLQDNAKLVPVLSAKGAKPVTWKNPPG

SEQ ID NO: 1029967 - protein, 220 aa, Homo sapiens [sequence omitted]

SEQ ID NO: 1029968 - protein, 171 aa, Homo sapiens
MVARARRLIELYKEAGISKDRILIKLSSTWEGIQAGKELEEQHGIHCNMTLLFSFAQAVACAEAGVTLISPFVGRILDWHVANTDKKSYEPLEDPGVKSVTKIYNYYKKFSYKTIVMGASFRNTGEIKALAGCDFLTISPKLLGELLQDNAKLVPVLSAKGARPWPGKIPW

SEQ ID NO: 1029969 - protein, 220 aa, Homo sapiens [sequence omitted]

SEQ ID NO: 1029970 - protein, 333 aa, Homo sapiens
GRISRARGALCRACLALAAALAALLLLPLPLPRAPAPARTPAPAPRAPPSRPAAPSLRPDDVFIAVKTTRKNHGPRLRLLLRTWISRARQQTFIFTDGDDPELELQGGDRVINTNCSAVRTRQALCCKMSVEYDKFIESGRKWFCHVDDDNYVNARSLLHLLSSFSPSQDVYLGRPSLDHPIEATERVQGGRTVTTVKFWFATGGAGFCLSRGLALKMSPWASLGSFMSTAEQVRLPDDCTVGYIVEGLLGARLLHSPLFHSHLENLQRLPPDTLLQQVTLSHGGPENPQNVVNVAGGFSLHQDPTRFKSIHCLLYPDTDWCPRQKQGAPTSR

SEQ ID NO: 1029971 - protein, 220 aa, Homo sapiens [sequence omitted]

SEQ ID NO: 1029972 - protein, 465 aa, Homo sapiens
GRISRARGALCRACLALAAALAALLLLPLPLPRAPAPARTPAPAPRAPPSRPAAPSLRPDDVFIAVKTTRKNHGPRLRLLLRTWISRARQQTFIFTDGDDPELELQGGDRVINTNCSAVRTRQALCCKMSVEYDKFIESGRKWFCHVDDDNYVNARSLLHLLSSFSPSQDVYLGRPSLDHPIEATERVQGGRTVSVGADAIGADAFLDTSPGGTAEGVESWLEKGIGLGAQADPPRWFACGVSGAGQEALTVLGREGVSGPGGEGLEATGQWPAEAPGSSCSKKLLLPGWDLLRGSFRKMPGESHEESGVRSPVLGSSDQHPILQVTTVKFWFATGGAGFCLSRGLALKMSPWASLGSFMSTAEQVRLPDDCTVGYIVEGLLGARLLHSPLFHSHLENLQRLPPDTLLQQVTLSHGGPENPQNVVNVAGGFSLHQDPTRFKSIHCLLYPDTDWCPRQKQGAPTSR

SEQ ID NO: 1029973 - protein, 224 aa, Homo sapiens
MVARARRLIELYKEAGISKDRILINQLSVNLAKRAIQRWNEELEEQHGIHCNMTLLFSFAQAVACAEAGVTLISPFVGRILDWHVANTDKKSYEPLEDPGVKSVTKIYNYYKKFSYKTIVMGASFRNTGEIKALAGCDFLTISPKLLGELLQDNAKLVPVLSAKAAQASDLEKIHLDEKSFRWLHNEDQMAVEKLSDGIRKFAADAVKLERMLTERMFNAENGK

SEQ ID NO: 1029974 - protein, 161 aa, Homo sapiens
MCGLGFNRAEVPFACAHLFWHVANTDKKSYEPLEDPGVKSVTKIYNYYKKFSYKTIVMGASFRNTGEIKALAGCDFLTISPKLLGELLQDNAKLVPVLSAKAAQASDLEKIHLDEKSFRWLHNEDQMAVEKLSDGIRKFAADAVKLERMLTERMFNAENGK

SEQ ID NO: 1029975 - protein, 103 aa, Homo sapiens
MSSSPVKRQRMESALDQLKQFTTVVADTGDFHAIDEYKPQDATTNPSLILAAAQMPAYQELVEEAIAYGRKLGGSQEDQIKNAIETSTTRPSFRSFISTADPH

SEQ ID NO: 1029976 - protein, 113 aa, Homo sapiens
MSSSPVKRQRMESALDQLKQFTTVVADTGDFHAIDEYKPQDATTNPSLILAAAQMPAYQELVEEAIAYGRKLGGSQEDQIKNAIDKLFVLFGAEILREDSGPSIHRSRRKALL

SEQ ID NO: 1029977 - protein, 80 aa, Homo sapiens
SGGKLVIAVVYMVVRCKILVASVMSCNIWCDARGRSASARGNTHSGEAEYNTGWVGVLTNGPVIWGASKRFITNWSRDRS

SEQ ID NO: 1029978 - protein, 220 aa, Homo sapiens [sequence omitted]

SEQ ID NO: 1029979 - protein, 220 aa, Homo sapiens [sequence omitted]

SEQ ID NO: 1029980 - protein, 220 aa, Homo sapiens [sequence omitted]

SEQ ID NO: 1029981 - protein, 220 aa, Homo sapiens [sequence omitted]

SEQ ID NO: 1029982 - protein, 336 aa, Homo sapiens
MVARARRLIELYKEAGISKDRILIKLSSTWEGIQAGKELEEQHGIHCNMTLLFSFAQAVACAEAGVTLISPFVGRILDWHVANTDKKSYEPLEDPGVKSVTKIYNYYKKFSYKTIVMGASFRNTGEIKALAGCDFLTISPKLLGELLQDNAKLVPVLSAKAAGGPTAQLWLLLGQGSTAVPRCPVGDPSHLWAELILGDMKGEVDLNGGLGFPNTSHSSHQPRLCGLNPTSSVSFAGAKAGPGGRCLGAAVQALSPRGKGGQGHGSRHGRLVLVPQAAQASDLEKIHLDEKSFRWLHNEDQMAVEKLSDGIRKFAADAVKLERMLTERMFNAENGK

SEQ ID NO: 1029983 - protein, 186 aa, Homo sapiens; identical to SEQ ID NO: 1029963

SEQ ID NO: 1029984 - protein, 220 aa, Homo sapiens [sequence omitted]

SEQ ID NO: 1029985 - protein, 427 aa, Homo sapiens
GRISRARGALCRACLALAAALAALLLLPLPLPRAPAPARTPAPAPRAPPSRPAAPSLRPDDVFIAVKTTRKNHGPRLRLLLRTWISRARQQTFIFTDGDDPELELQGGECPPHPRRPRDLPPEPFSLRSHGPFLLWVPFSAQAPEARGGPDSCPGHAACGGPTLPAKLCSPPASHTSRFPGRGASATSPEEAPAGNPPFQASDRVINTNCSAVRTRQALCCKMSVEYDKFIESGRKWFCHVDDDNYVNARSLLHLLSSFSPSQDVYLGRPSLDHPIEATERVQGGRTVTTVKFWFATGGAGFCLSRGLALKMSPWASLGSFMSTAEQVRLPDDCTVGYIVEGLLGARLLHSPLFHSHLENLQRLPPDTLLQQVTLSHGGPENPQNVVNVAGGFSLHQDPTRFKSIHCLLYPDTDWCPRQKQGAPTSR

SEQ ID NO: 1029986 - protein, 220 aa, Homo sapiens [sequence omitted]

SEQ ID NO: 1029987 - protein, 358 aa, Homo sapiens
GRISRARGALCRACLALAAALAALLLLPLPLPRAPAPARTPAPAPRAPPSRPAAPSLRPDDVFIAVKTTRKNHGPRLRLLLRTWISRARQQTFIFTDGDDPELELQGGDRVINTNCSAVRTRQALCCKMSVEYDKFIESGRKWFCHVDDDNYVNARSLLHLLSSFSPSQDVYLGRPSLDHPIEATERVQGGRTVTTVKFWFATGGAGFCLSRGLALKMSPWASEWGSSCPGWEAEAETCKVLTGLPPALGSFMSTAEQVRLPDDCTVGYIVEGLLGARLLHSPLFHSHLENLQRLPPDTLLQQVTLSHGGPENPQNVVNVAGGFSLHQDPTRFKSIHCLLYPDTDWCPRQKQGAPTSR

SEQ ID NO: 1029988 - protein, 106 aa, Homo sapiens [sequence omitted]

SEQ ID NO: 1029989 - protein, 333 aa, Homo sapiens; identical to SEQ ID NO: 1029970

SEQ ID NO: 1029990 - protein, 113 aa, Homo sapiens; identical to SEQ ID NO: 1029976

SEQ ID NO: 1029991 - protein, 115 aa, Homo sapiens
TSHIGYWSLGESDEAPVPSPPPPPQTPRSCYVELTREASEDGVRAGPAQAVHPSSWESCCRTTPSWCLCSQPRRPKPVTWKKSTWMRSLSVGCTTRTRWLWRSSLTGSASLPLMQ

SEQ ID NO: 1029992 - protein, 162 aa, Homo sapiens
MVARARRLIELYKEAGISKDRILIKLSSTWEGIQAGKELEEQHGIHCNMTLLFSFAQAVACAEAGVTLISPFVGRILDWHVANTDKKSYEPLEDPGVKSVTKIYNYYKKFAPKPGRGPPSGRGKPAGGGFPHFPSREAARPQGRAPGPRPNLVIRGRQGERA

SEQ ID NO: 1029993 - protein, 220 aa, Homo sapiens [sequence omitted]

SEQ ID NO: 1029994 - protein, 220 aa, Homo sapiens [sequence omitted]

SEQ ID NO: 1029995 - protein, 220 aa, Homo sapiens [sequence omitted]

SEQ ID NO: 1029996 - protein, 220 aa, Homo sapiens [sequence omitted]

SEQ ID NO: 1029997 - protein, 226 aa, Homo sapiens
GRISRARGALCRACLALAAALAALLLLPLPLPRAPAPARTPAPAPRAPPSRPAAPSLRPDDVFIAVKTTRKNHGPRLRLLLRTWISRARQQTFIFTDGDDPELELQGGDRVINTNCSAVRTRQALCCKMSVEYDKFIESGRKWFCHVDDDNYVNARSLLHLLSSFSPSQDVYLGRPSLDHPIEATERVQGGRTVSVGADAIGADAFLDTSHAAAQQRAWKAGLRRA

SEQ ID NO: 1029998 - protein, 199 aa, Homo sapiens
GRISRARGALCRACLALAAALAALLLLPLPLPRAPAPARTPAPAPRAPPSRPAAPSLRPDDVFIAVKTTRKNHGPRLRLLLRTWISRARQQTFIFTDGDDPELELQGGDRVINTNCSAVRTRQALCCKMSVEYDKFIESGRKWFCHVDDDNYVNARSLLHLLSSFSPSQDVYLGRPSLDHPIEATERVQGGRTVTWAAS

SEQ ID NO: 1029999 - protein, 206 aa, Homo sapiens
LGPAPALTRPRPQICPALTCPRPAELEEQHGIHCNMTLLFSFAQAVACAEAGVTLISPFVGRILDWHVANTDKKSYEPLEDPGVKSVTKIYNYYKKFSYKTIVMGASFRNTGEIKALAGCDSSHLPKLLGELLQDNAKLVPVLSAKAAQASDLEKIHLDEKSFRWLHNEDQMAVEKLSDGIRKFAADAVKLERMLTERMFNAENGK

SEQ ID NO: 1030000 - protein, 317 aa, Homo sapiens
MYNMMETELKPPGPQQTSGGGGGNSTAAAAGGNQKNSPDRVKRPMNAFMVWSRGQRRKMAQENPKMHNSEISKRLGAEWKLLSETEKRPFIDEAKRLRALHMKEHPDYKYRPRRKTKTLMKKDKYTLPGGLLAPGGNSMASGVGVGAGLGAGVNQRMDSYAHMNGWSNGSYSMMQDQLGYPQHPGLNAHGAAQMQPMHRYDVSALQYNSMTSSQTYMNGSPTYSMSYSQQGTPGMALGSMGSVVKSEASSSPPVVTSSSHSRAPCQAGDLRDMISMYLPGAEVPEPAAPSRLHMSQHYQSGPVPGTAINGTLPLSHM

SEQ ID NO: 1030001 - protein, 141 aa, Homo sapiens
AQQKRDPASRKSPGEKWEWTGALTEVSALQYNSMTSSQTYMNGSPTYSMSYSQQGTPGMALGSMGSVVKSEASSSPPVVTSSSHSRAPCQAGDLRDMISMYLPGAEVPEPAAPSRLHMSQHYQSGPVPGTAINGTLPLSHM

SEQ ID NO: 1030002 - protein, 273 aa, Homo sapiens
MNAFMVWSRGQRRKMAQENPKMHNSEISKRLGAEWKLLSETEKRPFIDEAKRLRALHMKEHPDYKYRPRRKTKTLMKKDKYTLPGGLLAPGGNSMASGVGVGAGLGAGVNQRMDSYAHMNGWSNGSYSMMQDQLGYPQHPGLNAHGAAQMQPMHRYDVSALQYNSMTSSQTYMNGSPTYSMSYSQQGTPGMALGSMGSVVKSEASSSPPVVTSSSHSRAPCQAGDLRDMISMYLPGAEVPEPAAPSRLHMSQHYQSGPVPGTAINGTLPLSHM

SEQ ID NO: 1030003 - protein, 1015 aa, Homo sapiens
AAPGSGGQLHRVPEGCRIMNRGGANGKGRRGSLNASGRRTPPNCAAEDIKASPSSTNKRKNKPPMELDLNSSSEDNKPGKRVRTNSRSTPTTPQGKPETTFLDQGCSSPVLIDCPHPNCNKKYKHINGLRYHQAHAHLDPENKLEFEPDSEDKISDCEEGLSNVALECSEPSTSVSAYDQLKAPASPGAGNPPGTPKGKRELMSNGPGSIIGAKAGKNSGKKKGLNNELNNLPVISNMTAALDSCSAADGSLAAEMPKLEAEGLIDKKNLGDKEKGKKANNCKTDKNLSKLKSARPIAPAPAPTPPQLIAIPTATFTTTTTGTIPGLPSLTTTVVQATPKSPPLKPIQPKPTIMGEPITVNPALVSLKDKKKKEKRKLKDKEGKETGSPKMDAKLGKLEDSKGASKDLPGHFLKDHLNKNEGLANGLSESQESRMASIKAEADKVYTFTDNAPSPSIGSASRLECSTLVNGQAPMAPLHVLTQNGAESSAAKTSSPAYSDISDAADDGGSDSRSEGMRSKASSPSDIISSKDSVVKGHSSTTAQSSQLKESHSPYYHSYDPYYSPSYMHPGQVGAPAAGNSGSTQGMKIKKESEEDAEKKDKAEQLDSKKVDHNSASLQPQHQSVITQRHPALAQSLYYGQYAYGLYMDQKSLMATSPAYRQQYEKYYEDQRLAEQKMAQTGRGDCERKSELPLKELGKEETKQKNMPSATISKAPSTPEPNKNHSKLGPSVPNKTEETGPRFKNMASLCIPAQILDQQKSEELDREKKLKEDSPRKTPNKESGVPSLPVSLTSIKEEPKEAKHPDSQSMEESKLKNDDRKTPVNWKDSRGTRVAVSSPMSQHQSYIQYLHAYPYPQMYDPSHPAYRAVSPVLMHSYPGAYLSPGFHYPVYGKMSGREETEKVNTSPSVNTKTTTESKALDLLQQHANQYRSKSPAPVEKATAEREREAERERDRHSPFGQRHLHTHHHTHVGMGYPLIPGQYDPFQGLTSAALVASQQVAAQASASGMFPGQRR

SEQ ID NO: 1030004 - protein, 1070 aa, Homo sapiens
AAPGSGGQLHRVPEGCRIMNRGGANGKGRRGSLNASGRRTPPNCAAEDIKASPSSTNKRKNKPPMELDLNSSSEDNKPGKRVRTNSRSTPTTPQGKPETTFLDQGCSSPVLIDCPHPNCNKKYKHINGLRYHQAHAHLDPENKLEFEPDSEDKISDCEEGLSNVALECSEPSTSVSAYDQLKAPASPGAGNPPGTPKGKRELMSNGPGSIIGAKAGKNSGKKKGLNNELNNLPVISNMTAALDSCSAADGSLAAEMPKLEAEGLIDKKNLGDKEKGKKANNCKTDKNLSKLKSARPIAPAPAPTPPQLIAIPTATFTTTTTGTIPGLPSLTTTVVQATPKSPPLKPIQPKPTIMGEPITVNPALVSLKDKKKKEKRKLKDKEGKETGSPKMDAKLGKLEDSKGASKDLPGHFLKDHLNKNEGLANGLSESQESRMASIKAEADKVYTFTDNAPSPSIGSASRLECSTLVNGQAPMAPLHVLTQNGAESSAAKTSSPAYSDISDAADDGGSDSRSEGMRSKASSPSDIISSKDSVVKGHSSTTAQSSQLKESHSPYYHSYDPYYSPSYMHPGQVGAPAAGNSGSTQGMKIKKESEEDAEKKDKAEQLDSKKVDHNSASLQPQHQSVITQRHPALAQSLYYGQYAYGLYMDQKSLMATSPAYRQQYEKYYEDQRLAEQKMAQTGRGDCERKSELPLKELGKEETKQKNMPSATISKAPSTPEPNKNHSKLGPSVPNKTEETGKSQLLSNHQQQLQADSFKAKQMENHQLIKEAVEMKSVMDSMKQTGVDPTSRFKQDPDSRTWHHYVYQPKYLDQQKSEELDREKKLKEDSPRKTPNKESGVPSLPVSLTSIKEEPKEAKHPDSQSMEESKLKNDDRKTPVNWKDSRGTRVAVSSPMSQHQSYIQYLHAYPYPQMYDPSHPAYRAVSPVLMHSYPGAYLSPGFHYPVYGKMSGREETEKVNTSPSVNTKTTTESKALDLLQQHANQYRSKSPAPVEKATAEREREAERERDRHSPFGQRHLHTHHHTHVGMGYPLIPGQYDPFQGLTSAALVASQQVAAQASASGMFPGQRR

SEQ ID NO: 1030005 - protein, 1071 aa, Homo sapiens
AAPGSGGQLHRVPEGCRIMNRGGANGKGRRGSLNASGRRTPPNCAAEDIKASPSSTNKRKNKPPMELDLNSSSEDNKPGKRVRTNSRSTPTTPQGKPETTFLDQGCSSPVLIDCPHPNCNKKYKHINGLRYHQAHAHLDPENKLEFEPDSEDKISDCEEGLSNVALECSEPSTSVSAYDQLKAPASPGAGNPPGTPKGKRELMSNGPGSIIGAKAGKNSGKKKGLNNELNNLPVISNMTAALDSCSAADGSLAAEMPKLEAEGLIDKKNLGDKEKGKKANNCKTDKNLSKLKSARPIAPAPAPTPPQLIAIPTATFTTTTTGTIPGLPSLTTTVVQATPKSPPLKPIQPKPTIMGEPITVNPALVSLKDKKKKEKRKLKDKEGKETGSPKMDAKLGKLEDSKGASKDLPGHFLKDHLNKNEGLANGLSESQESRMASIKAEADKVYTFTDNAPSPSIGSASRLECSTLVNGQAPMAPLHVLTQNGAESSAAKTSSPAYSDISDAADDGGSDSRSEGMRSKASSPSDIISSKDSVVKGHSSTTAQSSQLKESHSPYYHSYDPYYSPSYMHPGQVGAPAAGNSGSTQGMKIKKESEEDAEKKDKAEQLDSKKVDHNSASLQPQHQSVITQRHPALAQSLYYGQYAYGLYMDQKSLMATSPAYRQQYEKYYEDQRLAEQKMAQTGRGDCERKSELPLKELGKEETKQKNMPSATISKAPSTPEPNKNHSKLGPSVPNKTEETGKSQLLSNHQQQLQADSFKAKQMENHQLIKEAVEMKSVMDSMKQTGVDPTSRFKQDPDSRTWHHYVYQPKYLDQQKSEELDREKKLKEDSPRKTPNKESGVPSLPVSLTSIKEEPKEAKHPDSQSMEESKLKNDDRKTPVNWKDSRGTRVAVSSPMSQHQSYIQYLHAYPYPQMYDPSHPAYRAVSPVLMHSYPGAYLSPGFHYPVYGKMSGREETEKVNTSPSVNTKTTTESKALDLLQQHANQYRSKSPAPVEKATAEREREAERERDRHSPFGQRHLHTHHHTHVGMGYPLIPGQYDPFQGLTSAALVASQQVAAQASASGMFPGQKRE

SEQ ID NO: 1030006 - protein, 939 aa, Homo sapiens
AAPGSGGQLHRVPEGCRIMNRGGANGKGRRGSLNASGRRTPPNCAAEDIKASPSSTNKRKNKPPMELDLNSSSEDNKPGKRVRTNSRSTPTTPQGKPETTFLDQGCSSPVLIDCPHPNCNKKYKHINGLRYHQAHAHLDPENKLEFEPDSEDKISDCEEGLSNVALECSEPSTSVSAYDQLKAPASPGAGNPPGTPKGKRELMSNGPGSIIGAKAGKNSGKKKGLNNELNNLPVISNMTAALDSCSAADGSLAAEMPKLEAEGLIDKKNLGDKEKGKKANNCKTDKNLSKLKSARPIAPAPAPTPPQLIAIPTATFTTTTTGTIPGLPSLTTTVVQATPKSPPLKPIQPKPTIMGEPITVNPALVSLKDKKKKEKRKLKDKEGKETGSPKMDAKLGKLEDSKGASKDLPGHFLKDHLNKNEGLANGLSESQESRMASIKAEADKVYTFTDNAPSPSIGSASRLECSTLVNGQAPMAPLHVLTQNGAESSAAKTSSPAYSDISDAADDGGSDSRSEGMRSKASSPSDIISSKDSVVKGHSSTTAQSSQLKESHSPYYHSYDPYYSPSYMHPGQVGAPAAGNSGSTQGMKIKKESEEDAEKKDKAEQLDSKKVDHNSASLQPQHQSVITQRHPALAQSLYYGQYAYGLYMDQKSLMATSPAYRQQYEKYYEDQRLAEQKMAQTGRGDCERKSELPLKELGKEETKQKNMPSATISKAPSTPEPNKNHSKLGPSVPNKTEETGKSQLLSNHQQQLQADSFKAKQMENHQLIKEAVEMKSVMDSMKQTGVDPTSRFKQDPDSRTWHHYVYQPKYLDQQKSEELDREKKLKEDSPRKTPNKESGVPSLPVSLTSIKEEPKEAKHPDSQSMEESKLKNDDRKTPVNWKDSRGTRVAVSSPMSQHQSYIQYLHAYPYPQMYDPSHPAYRAVSPVLMHSYPGTCCRF

SEQ ID NO: 1030007 - protein, 1012 aa, Homo sapiens
AAPGSGGQLHRVPEGCRIMNRGGANGKGRRGSLNASGRRTPPNCAAEDIKASPSSTNKRKNKPPMELDLNSSSEDNKPGKRVRTNSRSTPTTPQGKPETTFLDQGCSSPVLIDCPHPNCNKKYKHINGLRYHQAHAHLDPENKLEFEPDSEDKISDCEEGLSNVALECSEPSTSVSAYDQLKAPASPGAGNPPGTPKGKRELMSNGPGSIIGAKAGKNSGKKKGLNNELNNLPVISNMTAALDSCSAADGSLAAEMPKLEAEGLIDKKNLGDKEKGKKANNCKTDKNLSKLKSARPIAPAPAPTPPQLIAIPTATFTTTTTGTIPGLPSLTTTVVQATPKSPPLKPIQPKPTIMGEPITVNPALVSLKDKKKKEKRKLKDKEGKETGSPKMDAKLGKLEDSKGASKDLPGHFLKDHLNKNEGLANGLSESQESRMASIKAEADKVYTFTDNAPSPSIGSASRLECSTLVNGQAPMAPLHVLTQNGAESSAAKTSSPAYSDISDAADDGGSDSRSEGMRSKASSPSDIISSKDSVVKGHSSTTAQSSQLKESHSPYYHSYDPYYSPSYMHPGQVGAPAAGNSGSTQGMKIKKESEEDAEKKDKAEQLDSKKVDHNSASLQPQHQSVITQRHPALAQSLYYGQYAYGLYMDQKSLMATSPAYRQQYEKYYEDQRLAEQKMAQTGRGDCERKSELPLKELGKEETKQKNMPSATISKAPSTPEPNKNHSKLGPSVPNKTEETGKSQLLSNHQQQLQADSFKAKQMENHQLIKEAVEMKSVMDSMKQTGVDPTSRFKQDPDSRTWHHYVYQPKYLDQQKSEELDREKKLKEDSPRKTPNKESGVPSLPVSLTSIKEEPKEAKHPDSQSMEESKLKNDDRKTPVNWKDSRGTRVAVSSPMSQHQSYIQYLHAYPYPQMYDPSHPAYRAVSPVLMHSYPGAYLSPGFHYPVYGKMSGREETEKVNTSPSVNTKTTTESKALDLLQQHANQYRSKSPAPPSASGTCTRTTTPTLAWVTR

SEQ ID NO: 1030008 - protein, 1105 aa, Homo sapiens
MSAKAISEQTGKELLYKFICTTSAIQNRFKYARVTPDTDWARLLQDHPWLLSQNLVVKPDQLIKRRGKLGLVGVDLTLDGVKSWLKPRLGQEATVGKATGFLKNFLIEPFAPHSQAEEFYVCIYATREGDYVLFHHEGGVDVGDVDAKAQKLLVGVDEKLNPEDIKKHLLVHAPDDKKEILASFISGLFNFYEDLYFTYLEINPLVVTKDGVYVLDLAAKVDATADYICKVKWGDIEFPPPFGRVAYPEEAYIADLDAKSGASLKLTLLNPKGRIWTMVAGGGASVVYSDTICDLGGVNELANYGEYSGAPSEQQTYDYAKTILSLMTREKHPDGKILIIGGSIANFTNVAATFKGIVRAIRDYQGPLKEHEVTIFVRRGGPNYQEGLRVMGEVGKTTGIPIHVFGTETHMTAIVGMAWAPAIPNQPPTAAHTANFLLNAQRETSTPAPSRTASFYESMVDEVRADEVAPAKKAKPAMPQDSVPSPRSLQGKSTTLFSRHTKAIVWGMQTRAVQGMLDFDYVCSRDEPSVAAMVYPFTGDHKQKFYWGHKEILIPVFKNMADAMRKHPEVDVLINFASLRSAYDSTMETMNYAQIRTIAIIAEGIPEALTRKLIKKADQKGVTIIGPATVGGIKPGCFKIGNTGGMLDNILASKLYPQAAVAYVSRSGGMSNELNNIISRTTDGVYEGVAIGGDRYPGSTFMDHVLRYQDTPGVKMIVVLGEIGGTEEYKISRGIKEGRLTKPIVCWCIGTCATMFSSEVQFGHAGACANQASETAVAKNQALKEAGVFVPRSFDELGEIIQSVYEDLVANGVIVPAQEVPPPTVPMDYSWARELGLIRKPASFMTSICDERGQELIYAGMPITEVFKEEMGIGGALGLLWFQKRLPKYSCQFIEMCLMVTADHGPAVSGAHNTIICARTAVELVSSLTSGLLTIGDRFGGALDAAAKMFSKAFDSGIIPMEFVNKMKKEGKLIMGIGHRVKSINNPDMRVQILKDYVRQHFPATPLLDYALEVEKITTSKKPNLILNVDGLIGVAFVDMLRNCGSFTREEADEYIDIGALNGIFVLGRSMGFIGHYLDQKRLKQGLYRHPWDDISYVLPEHMSM

SEQ ID NO: 1030009 - protein, 619 aa, Homo sapiens
MASGAYNPYIEIIEQPRQRGMRFRYKCEGRSAGSIPGEHSTDNNRTYPSIQIMNYYGKGKVRITLVTKNDPYKPHPHDLVGKDCRDGYYEAEFGQERRPLFFQNLGIRCVKKKEVKEAIITRIKAGINPFNVPEKQLNDIEDCDLNVVRLCFQVFLPDEHGNLTTALPPVVSNPIYDNRAPNTAELRICRVNKNCGSVRGGDEIFLLCDKVQKDDIEVRFVLNDWEAKGIFSQADVHRQVAIVFKTPPYCKAITEPVTVKMQLRRPSDQEVSESMDFRYLPDEKDTYGNKAKKQKTTLLFQKLCQDHVETGFRHVDQDGLELLTSGDPPTLASQSAGITVNFPERPRPGLLGSIGEGRYFKKEPNLFSHDAVVREMPTGVSSQAESYYPSPGPISSGLSHHASMAPLPSSSWSSVAHPTPRSGNTNPLSSFSTRTLPSNSQGIPPFLRIPVGNDLNASNACIYNNADDIVGMEASSMPSADLYGISDPNMLSNCSVNMMTTSSDSMGETDNPRLLSMNLENPSCNSVLDPRDLRQLHQMSSSSMSAGANSNTTVFVSQSDAFEGSDFSCADNSMINESGPSNSTNPNSHGFVQDSQYSGIGSMQNEQLSDSFPYEFFQV

SEQ ID NO: 1030010 - protein, 638 aa, Homo sapiens
MLKSIINCYINLTDLLLFKNFSGAYNPYIEIIEQPRQRGMRFRYKCEGRSAGSIPGEHSTDNNRTYPSIQIMNYYGKGKVRITLVTKNDPYKPHPHDLVGKDCRDGYYEAEFGQERRPLFFQNLGIRCVKKKEVKEAIITRIKAGINPFNVPEKQLNDIEDCDLNVVRLCFQVFLPDEHGNLTTALPPVVSNPIYDNRAPNTAELRICRVNKNCGSVRGGDEIFLLCDKVQKDDIEVRFVLNDWEAKGIFSQADVHRQVAIVFKTPPYCKAITEPVTVKMQLRRPSDQEVSESMDFRYLPDEKDTYGNKAKKQKTTLLFQKLCQDHVETGFRHVDQDGLELLTSGDPPTLASQSAGITVNFPERPRPGLLGSIGEGRYFKKEPNLFSHDAVVREMPTGVSSQAESYYPSPGPISSGLSHHASMAPLPSSSWSSVAHPTPRSGNTNPLSSFSTRTLPSNSQGIPPFLRIPVGNDLNASNACIYNNADDIVGMEASSMPSADLYGISDPNMLSNCSVNMMTTSSDSMGETDNPRLLSMNLENPSCNSVLDPRDLRQLHQMSSSSMSAGANSNTTVFVSQSDAFEGSDFSCADNSMINESGPSNSTNPNSHGFVQDSQYSGIGSMQNEQLSDSFPYEFFQV

SEQ ID NO: 1030011 - protein, 545 aa, Homo sapiens
MLLRSKPALPPPLLMLLLLGPLGPLSPGALPRPAQAQQDVVDLDFFTQEPLHLVSPSFLSVTIDANLATDPRFLILLGSPKLRTLARGLSPAYLRFGGTKTDFLIFDPKKESTFEERSYWQSQVNQDICKYGSIPPDVEEKLRLEWPYQEQLLLREHYQKKFKNSTYSRSSVDVLYTFANCSGLDLIFGLNALLRTADLQWNSSNAQLLLDYCSSKGYNISWELGNEPNSFLKKADIFINGSQLGEDFIQLHKLLRKSTFKNAKLYGPDVGQPRRKTAKMLKSFLKAGGEVIDSVTWHHYYLNGRTATREDFLNPDVLDIFISSVQKVFQVVESTRPGKKVWLGETSSAYGGGAPLLSDTFAAGFMWLDKLGLSARMGIEVVMRQVFFGAGNYHLVDENFDPLPDYWLSLLFKKLVGTKVLMASVQGSKRRKLRVYLHCTNTDNPRYKEGDLTLYAINLHNVTKYLRLPYPFSNKQVDKYLLRPLGPHGLLSKSVQLNGLTLKMVDDQTLPPLMEKPLRPGSSLGLPAFSYSFFVIRNAKVAACI

SEQ ID NO: 1030012 - protein, 543 aa, Homo sapiens
MLLRSKPALPPPLMLLLLGPLGPLSPGALPRPAQAQDVVDLDFFTQEPLHLVSPSFLSVTIDANLATDPRFLILLGSPKLRTLARGLSPAYLRFGGTKTDFLIFDPKKESTFEERSYWQSQVNQDICKYGSIPPDVEEKLRLEWPYQEQLLLREHYQKKFKNSTYSRSSVDVLYTFANCSGLDLIFGLNALLRTADLQWNSSNAQLLLDYCSSKGYNISWELGNEPNSFLKKADIFINGSQLGEDFIQLHKLLRKSTFKNAKLYGPDVGQPRRKTAKMLKSFLKAGGEVIDSVTWHHYYLNGRTATREDFLNPDVLDIFISSVQKVFQVVESTRPGKKVWLGETSSAYGGGAPLLSDTFAAGFMWLDKLGLSARMGIEVVMRQVFFGAGNYHLVDENFDPLPDYWLSLLFKKLVGTKVLMASVQGSKRRKLRVYLHCTNTDNPRYKEGDLTLYAINLHNVTKYLRLPYPFSNKQVDKYLLRPLGPHGLLSKSVQLNGLTLKMVDDQTLPPLMEKPLRPGSSLGLPAFSYSFFVIRNAKVAACI

SEQ ID NO: 1030013 - protein, 214 aa, Homo sapiens
SAAPRALLPGRSSPGLPGAWIPAISAPFKWVWVISWRGEQPGEPKMLLRSKPALPPPLMLLLLGPLGPLSPGALPRPAQAQDVVDLDFFTQEPLHLVSPSFLSVTIDANLATDPRFLILLGSPKLRTLARGLSPAYLRFGGTKTDFLIFDPKKESTFEERSYWQSQVNQDICKYGSIPPDVEEKLRLEWPYQEQLLLREHYQKKFKNSTYSSKK

SEQ ID NO: 1030014 - protein, 543 aa, Homo sapiens; identical to SEQ ID NO: 1030012

SEQ ID NO: 1030015 - protein, 326 aa, Homo sapiens
SAAPRALLPGRSSPGLPGAWIPAISAPFKWVWVISWRGEQPGEPKMLLRSKPALPPPLMLLLLGPLGPLSPGALPRPAQAQDVVDLDFFTQEPLHLVSPSFLSVTIDANLATDPRFLILLGSPKLRTLARGLSPAYLRFGGTKTDFLIFDPKKESTFEERSYWQSQVNQDICKYGSIPPDVEEKLRLEWPYQEQLLLREHYQKKFKNSTYSRSSVDVLYTFANCSGLDLIFGLNALLRTADLQWNSSNAQLLLDYCSSKGYNISWELGNEPNSFLKKADIFINGSQLGEDFIQLHKLLRKSTFKNAKLYGPDVGQPRRKTAKMLKR

SEQ ID NO: 1030016 - protein, 100 aa, Homo sapiens
  misc_feature (7)..(7): Xaa can be any naturally occurring amino acid
  misc_feature (13)..(13): Xaa can be any naturally occurring amino acid
  misc_feature (94)..(94): Xaa can be any naturally occurring amino acid
  misc_feature (97)..(97): Xaa can be any naturally occurring amino acid
ASTQTTXELTIPXNFNWAGINSRGANINEIRQMSGAQIKMANPVEGSSGRQVTITGSAASISLAQYLINARLSSEKGMGAVEQCGSLKNPFVLXSHXPTV

SEQ ID NO: 1030017 - protein, 81 aa, Homo sapiens
  misc_feature (7)..(7): Xaa can be any naturally occurring amino acid
  misc_feature (13)..(13): Xaa can be any naturally occurring amino acid
ASTQTTXELTIPXNFNWAGINSRGANINEIRQMSGAQIKMANPVEGSSGRQVTITGSAASISLAQYLINARLSSEKGMGCS

SEQ ID NO: 1030018 - protein, 121 aa, Homo sapiens
QEVPSEAHGTRTPRMAAPGGSDVVMRPSPLFNPPLLCIPLCPFIQSLLLTLHLNICSTYPSVLSFCEFLQFNAAFLLAIQESFRTPPFFFIQPPSSFEPPLPPLCCCLQLSLPWVPCFPRH

SEQ ID NO: 1030019 - protein, 295 aa, Homo sapiens
GRRSRSCREDQKPVMDDQRDLISNNEQLPMLGRRPGAPESKCSRGALYTGFSILVTLLLAGQATTAYFLYQQQGRLDKLTVTSQNLQLENLRMKLPKPPKPVSKMRMATPLLMQALPMGALPQGPMQNATKYGNMTEDHVMHLLQNADPLKVYPPLKGSFPENLRHLKNTMETIDWKVFESWMHHWLLFEMSRHSLEQKPTDAPPKVLTKCQEEVSRHPWRVHPGSFRPKCDENGNYLPLQCYGEHRLLLVCLPQRHGGPQTRSRGHHNCSESLELEDPSSGLGVTKQDLGPVPM

SEQ ID NO: 1030020 - protein, 51 aa, Homo sapiens
GRRSRSCREDQKPVMDDQRDLISNNEQLPMLGRDPDPPARLLKSVLERNLI

SEQ ID NO: 1030021 - protein, 230 aa, Homo sapiens
GRRSRSCREDQKPVMDDQRDLISNNEQLPMLGRRPGAPESKCSRGALYTGFSILVTLLLAGQATTAYFLYQQQGRLDKLTVTSQNLQLENLRMKLPKPPKPVSKMRMATPLLMQALPMGALPQGPMQNATKYGNMTEDHVMHLLQNADPLKVYPPLKGSFPENLRHLKNTMETIDWKVFESWMHHWLLFEMSRHSLEQKPTDAPPKESLELEDPSSGLGVTKQDLGPVPM

SEQ ID NO: 1030022 - protein, 229 aa, Homo sapiens
AALSLRCATEDPGVAMGRRPARCYRYCKNKPYPKSRFCRGVPDAKIRIFDLGRKKAKVDEFPLCGHMVSDEYEQLSSEALEAARICANKYMVKSCGKDGFHIRVRLHPFHVIRINKMLSCAGADRLQTGMRGAFGKPQGTVARVHIGQVIMSIRTKLQNKEHVIEALRRAKFKFPGRQKIHISKKWGFTKFNADEFEDMVAEKRLIPDGCGVKYIPSRGPLDKWRALHS

SEQ ID NO: 1030023 - protein, 128 aa, Homo sapiens
ASTKAPRMPVWSLSAPAQDNILLRLQTGMRGAFGKPQGTVARVHIGQVIMSIRTKLQNKEHVIEALRRAKFKFPGRQKIHISKKWGFTKFNADEFEDMVAEKRLIPDGCGVKYIPSRGPLDKWRALHS

SEQ ID NO: 1030024 - protein, 229 aa, Homo sapiens; identical to SEQ ID NO: 1030022

SEQ ID NO: 1030025 - protein, 101 aa, Homo sapiens
KLRLGTRLGVGTVARVHIGQVIMSIRTKLQNKEHVIEALRRAKFKFPGRQKIHISKKWGFTKFNADEFEDMVAEKRLIPDGCGVKYIPSRGPLDKWRALHS

SEQ ID NO: 1030026 - protein, 236 aa, Homo sapiens
AALSLRCATEDPGVAMGRRPARCYRYCKNKPYPKSRFCRGVPDAKIRIFDLGRKKAKVDEFPLCGHMVSDEYEQLSSEALEAARICANKYMVKSCGKDGFHIRVRLHPFHVIRINKMLSCAGADRRPQHEDCRRVSLLWKTPQGQLCDRAITVGQVIMSIRTKLQNKEHVIEALRRAKFKFPGRQKIHISKKWGFTKFNADEFEDMVAEKRLIPDGCGVKYIPSRGPLDKWRALHS

SEQ ID NO: 1030027 - protein, 142 aa, Homo sapiens
AALSLRCATEDPGVAMGRRPARCYRYCKNKPYPKSRFCRGVPDAKIRIFDLGRKKAKVDEFPLCGHMVSDEYEQLSSEALEAARICANKYMVKSCGKDGFHIRVRLHPFHVIRINKMLSCAGADLKRLPQGIAEGGPLGPQG

SEQ ID NO: 1030028 - protein, 140 aa, Homo sapiens
AALSLRCATEDPGVAMGRRPARCYRYCKNKPYPKSRFCRGVPDAKIRIFDLGRKKAKVDEFPLCGHMVSDEYEQLSSEALEAARICANKYMVKSCGKDGFHIRVRLHPFHVIRINKMLSCAGADAQQDTRCFEARHFAGS

SEQ ID NO: 1030029 - protein, 69 aa, Homo sapiens
  misc_feature (1)..(1): Xaa can be any naturally occurring amino acid
  misc_feature (12)..(12): Xaa can be any naturally occurring amino acid
  misc_feature (14)..(14): Xaa can be any naturally occurring amino acid
  misc_feature (21)..(21): Xaa can be any naturally occurring amino acid
  misc_feature (28)..(29): Xaa can be any naturally occurring amino acid
  misc_feature (40)..(41): Xaa can be any naturally occurring amino acid
XVSKFFLGPPQXRXPPSSKEXGGLPPKXXWLDGIWKDMVXXKAGLIPDGCGVKYIPSRGPLDKWRALHS

SEQ ID NO: 1030030 - protein, 229 aa, Homo sapiens; identical to SEQ ID NO: 1030022

SEQ ID NO: 1030031 - protein, 229 aa, Homo sapiens; identical to SEQ ID NO: 1030022

SEQ ID NO: 1030032 - protein, 229 aa, Homo sapiens; identical to SEQ ID NO: 1030022

SEQ ID NO: 1030033 - protein, 112 aa, Homo sapiens
RGSPLEVLTGPKGIEVLRKPQDIVARVHIGQVIMSIRTKLQNKEHVIEALRRAKFKFPGRQKIHISKKWGFTKFNADEFEDMVAEKRLIPDGCGVKYIPSRGPLDKWRALHS

SEQ ID NO: 1030034 - protein, 131 aa, Homo sapiens
MGCSKGPWRQAFQVDVHVSDLALPQCRLQTGMRGAFGKPQGTVARVHIGQVIMSIRTKLQNKEHVIEALRRAKFKFPGRQKIHISKKWGFTKFNADEFEDMVAEKRLIPDGCGVKYIPSRGPLDKWRALHS

SEQ ID NO: 1030035 - protein, 131 aa, Homo sapiens; identical to SEQ ID NO: 1030034

SEQ ID NO: 1030036 - protein, 106 aa, Homo sapiens
MVQRGRPYLGYMSPMGTVARVHIGQVIMSIRTKLQNKEHVIEALRRAKFKFPGRQKIHISKKWGFTKFNADEFEDMVAEKRLIPDGCGVKYIPSRGPLDKWRALHS

SEQ ID NO: 1030037 - protein, 69 aa, Homo sapiens
QKRVWQDVMSWQAVSSGAEIHISKKWGFTKFNADEFEDMVAEKRLIPDGCGVKYIPSRGPLDKWRALHS

SEQ ID NO: 1030038 - protein, 106 aa, Homo sapiens
NVLTSARKKRMRMCIGYRLGDSSHGIHIGHIIMSIRTKLPQHRILLYMTHALAVYTFPGGQKIPISTKCGFTEIQMLTQLMKTFLLRIALCIPDSCALDYIPRRHY

SEQ ID NO: 1030039 - protein, 232 aa, Homo sapiens
MLVRPGISVCDRRLRVVCDVRDTSRCGGYCKNKPYPKSRFCRGVPDAKIRIFDLGRKKAKVDEFPLCGHMVSDEYEQLSSEALEAARICANKYMVKSCGKDGFHIRVRLHPFHVIRINKMLSCAGADRLQTGMRGAFGKPQGTVARVHIGQVIMSIRTKLQNKEHVIEALRRAKFKFPGRQKIHISKKWGFTKFNADEFEDMVAEKRLIPDGCGVKYIPSRGPLDKWRALHS

SEQ ID NO: 1030040 - protein, 229 aa, Homo sapiens; identical to SEQ ID NO: 1030022

SEQ ID NO: 1030041 - protein, 113 aa, Homo sapiens
NELGPIIRKVTSLLSSGSKHGEGTEAGFIIGQVIMSIRTKLQNKEHVIEALRRAKFKFPGRQKIHISKKWGFTKFNADEFEDMVAEKRLIPDGCGVKYIPSRGPLDKWRALHS

SEQ ID NO: 1030042 - protein, 183 aa, Homo sapiens
MAAHSSFLGSVRSLLVVWVALRDLGDRPFRWMFMFLTLHYPNVGSKQACEVPLESPILGQHDGSRVHIGQVIMSIRTKLQNKEHVIEALRRAKFKFPGRQTGIVVRAARRVLRTIIASRLSVISVLYANGSVEIHISKKWGFTKFNADEFEDMVAEKRLIPDGCGVKYIPSRGPLDKWRALHS

SEQ ID NO: 1030043 - protein, 287 aa, Homo sapiens
SIAVPLKAPPAPSAGAAAAAADSGSHCHAPPTTARRAFPIPFGSKSNMATLKDQLIYNLLKEEQTPQNKITVVGVGAVGMACAISILMKDLADELALVDVIEDKLKGEMMDLQHGSLFLRTPKIVSGKDYNVTANSKLVIITAGARQQEGESRLNLVQRNVNIFKFIIPNVVKYSPNCKLLIVSNPVDILTYVAWKISGFPKNRVIGSGCNLDSARFRYLMGERLGVHPLSCHGWVLGEHGDSSVPVWSGMNVAGVSLKTLHPDLGTDKDKDSGKRFTSRWLRVLMR

SEQ ID NO: 1030044 - protein, 265 aa, Homo sapiens
SIAVPLKAPPAPSAGAAAAAADSGSHCHAPPTTARRAFPIPFGSKSNMATLKDQLIYNLLKEEQTPQNKITVVGVGAVGMACAISILMKDLADELALVDVIEDKLKGEMMDLQHGSLFLRTPKIVSGKDYNVTANSKLVIITAGARQQEGESRLNLVQRNVNIFKFIIPNVVKYSPNCKLLIVSNPVDILTYVAWKISGFPKNRVIGSGCNLDSARFRYLMGNMEIPVGWYGVVESAYEVINSRLHILGYWTLCSRFGREYNEES

SEQ ID NO: 1030045 - protein, 287 aa, Homo sapiens; identical to SEQ ID NO: 1030043

SEQ ID NO: 1030046 - protein, 240 aa, Homo sapiens
MATLKDQLIYNLLKEEQTPQNKITVVGVGAVGMACAISILMKDLADELALVDVIEDKLKGEMMDLQHGSLFLRTPKIVSGKDYNVTANSKLVIITAGARQQEGESRLNLVQRNVNIFKFIIPNVVKYSPNCKLLIVSNPVDILTYVAWKISGFPKNRVIGSGCNLDSARFRYLMGERLGVHPLSCHGWVLGEHGDSSVPVWSGMNVAGVSLKTLHPDLGTDKDKDSGKRFTSRWLRVLMR

SEQ ID NO: 1030047 - protein, 227 aa, Homo sapiens
SIAVPLKAPPAPSAGAAAAAADSGSHCHAPPTTARRAFPIPFGSKSNMATLKDQLIYNLLKEEQTPQNKITVVGVGAVGMACAISILMKDLADELALVDVIEDKLKGEMMDLQHGSLFLRTPKIVSGKDYNVTANSKLVIITAGARQQEGESRLNLVQRNVNIFKFIIPNVVKFSPIPLPNGGKAGSSPIKLSWVGPWGTWRFQCACMEWNECCWCLSEDSAPRFRD

SEQ ID NO: 1030048 - protein, 287 aa, Homo sapiens; identical to SEQ ID NO: 1030043

SEQ ID NO: 1030049 - protein, 572 aa, Homo sapiens
GGPSQTQAAPKPEQAGPDPSFFASASGDPELEPQRDLPGPRLQRASGEQAAHRGLAAHGTRGPAAAAAMFPREKTWNISFAGCGFLGVYYVGVASCLREHAPFLVANATHIYGASAGALTATALVTGVCLGEAGAKFIEVSKEARKRFLGPLHPSFNLVKIIRSFLLKVLPADSHEHASGRLGISLTRVSDGENVIISHFNSKDELIQANVCSGFIPVYCGLIPPSLQGVRYVDGGISDNLPLYELKNTITVSPFSGESDICPQDSSTNIHELRVTNTSIQFNLRNLYRLSKALFPPEPLVLREMCKQGYRDGLRFLQRNGLLNRPNPLLALPPARPHGPEDKDQAVESAQAEDYSQLPGEDHILEHLPARLNEALLEACVEPTDLLTTLSNMLPVRLATAMMVPYTLPLESALSFTIRLLEWLPDVPEDIRWMKEQTGSICQYLVMRAKRKLGRHLPSRLPEQVELRRVQSLPSVPLSCAAYREALPGWMRNNLSLGDALAKWEECQRQLLLGLFCTNVAFPPEALRMRAPADPAPAPADPASPQHQPAGPAPLLSTPAPEARPVIGALGL

SEQ ID NO: 1030050 - protein, 552 aa, Homo sapiens
GGPSQTQAAPKPEQAGPDPSFFASASGDPELEPQRDLPGPRRPAAAAAMFPREKTWNISFAGCGFLGVYYVGVASCLREHAPFLVANATHIYGASAGALTATALVTGVCLGEAGAKFIEVSKEARKRFLGPLHPSFNLVKIIRSFLLKVLPADSHEHASGRLGISLTRVSDGENVIISHFNSKDELIQANVCSGFIPVYCGLIPPSLQGVRYVDGGISDNLPLYELKNTITVSPFSGESDICPQDSSTNIHELRVTNTSIQFNLRNLYRLSKALFPPEPLVLREMCKQGYRDGLRFLQRNGLLNRPNPLLALPPARPHGPEDKDQAVESAQAEDYSQLPGEDHILEHLPARLNEALLEACVEPTDLLTTLSNMLPVRLATAMMVPYTLPLESALSFTIRLLEWLPDVPEDIRWMKEQTGSICQYLVMRAKRKLGRHLPSRLPEQVELRRVQSLPSVPLSCAAYREALPGWMRNNLSLGDALAKWEECQRQLLLGLFCTNVAFPPEALRMRAPADPAPAPADPASPQHQPAGPAPLLSTPAPEARPVIGALGL

SEQ ID NO: 1030051 - protein, 1112 aa, Homo sapiens
GGPSQTQAAPKPEQAGPDPSFFASASGDPELEPQRDLPGPRLQRASGEQAAHRGLAAHGTRGPAAAAAMFPREKTWNISFAGCGFLGVYYVGVASCLREHAPFLVANATHIYGASAGALTATALVTGVCLGERGRGRQAGGWREGRAGPGDGLRERRGPAASRWVPWGGFRSAPGEPGEDPIRVAGLGAGPGLFCSEGARGPPVGRKGFGGGQVQQKLLNWTEKVTRGRDRENPEEGPKSPRGPGYYNRCQRSVTVSWASAVAGCYQVAWAWGSPLERRLGTVTWSSQGPGGGAPLRSGLGAKGLSCPLLAHGALWPGSPLRPTAFAHFMGEGASGLWCLGQEWMGLCVLGWPRLAPSAAMREDVYSTRLQEPVRTPKMTGALCSAGACPGLTPDPLPLMEAFRQAPQSAPWLQDTSRSLLPEPRTPLPQCFPTLLPTRLLLTGGLAQLEPIVQQVLAEEPLAPHCPTPDQGDALEEGLDLSSSLSAPDHFQGLSPSWPALLRPKRSVWGASSWLQWDTGVPSKELGPDYFQPNTPGPVNCDLCAGMGFVVCPIPALLDLAKWVKAKAESELSFCLVPSPGLDATPGPVTHRAGSWEIPGRGQVLVSAGQPLLSAIPGEVAKVPTVSQAPHSLGLLQGLYAMEPWTWGYEGRWVLLSPGAWAPNLGPVPPGEAGAKFIEVSKEARKRFLGPLHPSFNLVKIIRSFLLKVLPADSHEHASGRLGISLTRVSDGENVIISHFNSKDELIQANVCSGFIPVYCGLIPPSLQGVRYVDGGISDNLPLYELKNTITVSPFSGESDICPQDSSTNIHELRVTNTSIQFNLRNLYRLSKALFPPEPLVLREMCKQGYRDGLRFLQRNGLLNRPNPLLALPPARPHGPEDKDQAVESAQAEDYSQLPGEDHILEHLPARLNEALLEACVEPTDLLTTLSNMLPVRLATAMMVPYTLPLESALSFTIRLLEWLPDVPEDIRWMKEQTGSICQYLVMRAKRKLGRHLPSRLPEQVELRRVQSLPSVPLSCAAYREALPGWMRNNLSLGDALAKWEECQRQLLLGLFCTNVAFPPEALRMRAPADPAPAPADPASPQHQPAGPAPLLSTPAPEARPVIGALGL

SEQ ID NO: 1030052 - protein, 697 aa, Homo sapiens
GGPSQTQAAPKPEQAGPDPSFFASASGDPELEPQRDLPGPRLQRASGEQAAHRGLAAHGTRGPAAAAAMFPREKTWNISFAGCGFLGVYYVGVASCLREHAPFLVANATHIYGASAGALTATALVTGVCLGEAGAKFIEVSKEARKRFLGPLHPSFNLVKIIRSFLLKVLPADSHEHASGRLGISLTRVSDGENVIISHFNSKDELIQANVCSGFIPVYCGLIPPSLQGVVSIPSPGHLLWGGPWDEGQRRRPPRAILQALALPPPVTHFPPVLLKKQLWQRTLPGPPFPSSVPAFPRLPSAQCPGWPTASAQWVKRSNEVATEWGPWWPGGVAGVGGSAATGPHIRSCLCVPWKRYVDGGISDNLPLYELKNTITVSPFSGESDICPQDSSTNIHELRVTNTSIQFNLRNLYRLSKALFPPEPLVLREMCKQGYRDGLRFLQRNGLLNRPNPLLALPPARPHGPEDKDQAVESAQAEDYSQLPGEDHILEHLPARLNEALLEACVEPTDLLTTLSNMLPVRLATAMMVPYTLPLESALSFTIRLLEWLPDVPEDIRWMKEQTGSICQYLVMRAKRKLGRHLPSRLPEQVELRRVQSLPSVPLSCAAYREALPGWMRNNLSLGDALAKWEECQRQLLLGLFCTNVAFPPEALRMRAPADPAPAPADPASPQHQPAGPAPLLSTPAPEARPVIGALGL

SEQ ID NO: 1030053 - protein, 309 aa, Homo sapiens
  misc_feature (2)..(5): Xaa can be any naturally occurring amino acid
  misc_feature (7)..(8): Xaa can be any naturally occurring amino acid
  misc_feature (11)..(11): Xaa can be any naturally occurring amino acid
RXXXXPXXSTXVTNTSIQFNLRNLYRLSKALFPPEPLVLREMCKQGYRDGLRFLQRNGLLNRPNPLLALPPARPHGPEDKDQAVESAQAEDYSQLPGEDHILEHLPARLNEALLEACVEPTDLLTTLSNMLPVRLATAMMVPYTLPLESALSFTIRLLEWLPDVPEDIRWMKEQTGSICQYLVMRAKRKLGRHLPSRLPEQVELRRVQSLPSVPLSCAAYREALPGWMRNNLSLGDALAKWEECQRQLLLGLFCTNVAFPPEALRMRAPADPAPAPADPASPQHQPAGPAPLLSTPAPEARPVIGALGL

SEQ ID NO: 1030054 - protein, 344 aa, Homo sapiens
GGPSQTQAAPKPEQAGPDPSFFASASGDPELEPQRDLPGPRLQRASGEQAAHRGLAAHGTRGPAAAAAMFPREKTWNISFAGCGFLGVYYVGVASCLREHAPFLVANATHIYGASAGALTATALVTGVCLGEAGAKFIEVSKEARKRFLGPLHPSFNLVKIIRSFLLKVLPADSHEHASGRLGISLTRVSDGENVIISHFNSKDELIQANVCSGFIPVYCGLIPPSLQGVRYVDGGISDNLPLYELKNTITVSPFSGESDICPQDSSTNIHELRVTNTSIQFNLRNLYRLSKALFPPEPLVLREMCKQGYRDGLRFLQRNGARTRAGEGGVGSALLPPAGRGRK

SEQ ID NO: 1030055 - protein, 289 aa, Homo sapiens
GGPSQTQAAPKPEQAGPDPSFFASASGDPELEPQRDLPGPRLQRASGEQAAHRGLAAHGTRGPAAAAAMFPREKTWNISFAGCGFLGVYYVGVASCLREHAPFLVANATHIYGASAGALTATALVTGVCLGEAGAKFIEVSKEARKRFLGPLHPSFNLVKIIRSFLLKVLPADSHEHASGRLGISLTRVSDGENVIISHFNSKDELIQANVCSGFIPVYCGLIPPSLQGVRYVDGGISDNLPLYELKNTITVSPFSGESDICPQDSSTNIHELRVTNTSIQFRAAPQFR

SEQ ID NO: 1030056 - protein, 282 aa, Homo sapiens
GGPSQTQAAPKPEQAGPDPSFFASASGDPELEPQRDLPGPRLQRASGEQAAHRGLAAHGTRGPAAAAAMFPREKTWNISFAGCGFLGVYYVGVASCLREHAPFLVANATHIYGASAGALTATALVTGVCLGERGRGRQAGGWREGRAGPGDGLRERRGPAASRWVPWGGFRSAPGEPGEDPIRVAGLGAGPGLFCSEGARGPPVGRKGFGGGQVQQKLLNWTEKVTRGRDRENPEEGPKSPRGPGYYNRCQRSVTVSWASAVAGCYQVAWAWGSLLRGVWEP

SEQ ID NO: 1030057 - protein, 552 aa, Homo sapiens; identical to SEQ ID NO: 1030050

SEQ ID NO: 1030058 - protein, 552 aa, Homo sapiens; identical to SEQ ID NO: 1030050

SEQ ID NO: 1030059 - protein, 619 aa, Homo sapiens
GGPSQTQAAPKPEQAGPDPSFFASASGDPELEPQRDLPGPRLQRASGEQAAHRGLAAHGTRGPAAAAAMFPREKTWNISFAGCGFLGVYYVGVASCLREHAPFLVANATHIYGASAGALTATALVTGVCLGEAGAKFIEVSKEARKRFLGPLHPSFNLVKIIRSFLLKVLPADSHEHASGRLGISLTRVSDGENVIISHFNSKDELIQANVCSGFIPVYCGLIPPSLQGVRYVDGGISDNLPLYELKNTITVSPFSGESDICPQDSSTNIHELRVTNTSIQFNLRNLYRLSKALFPPEPLVLREMCKQGYRDGLRFLQRNGLLNRPNPLLALPPARPHGPEDKDQAVESAQAEDYSQLPGEDHILEHLPARLNEGAHLGDGRGGGEAGGKEREERTVSRGGKPSGSWAPLPPLAADLPPTRALLEACVEPTDLLTTLSNMLPVRLATAMMVPYTLPLESALSFTIRLLEWLPDVPEDIRWMKEQTGSICQYLVMRAKRKLGRHLPSRLPEQVELRRVQSLPSVPLSCAAYREALPGWMRNNLSLGDALAKWEECQRQLLLGLFCTNVAFPPEALRMRAPADPAPAPADPASPQHQPAGPAPLLSTPAPEARPVIGALGL

SEQ ID NO: 1030060 - protein, 550 aa, Homo sapiens
GGPSQTQAAPKPEQAGPDPSFFASASGDPELEPQRDLPGPRLQRASGEQAAHRGLAAHGTRGPAAAAAMFPREKTWNISFAGCGFLGVYYVGVASCLREHAPFLVANATHIYGASAGALTATALVTGVCLGEAGAKFIEVSKEARKRFLGPLHPSFNLVKIIRSFLLKVLPADSHEHASGRLGISLTRVSDGENVIISHFNSKDELIQANVCSGFIPVYCGLIPPSLQGVRYVDGGISDNLPLYELKNTITVSPFSGESDICPQDSSTNIHELRVTNTSIQFNLRNLYRLSKALFPPEPLVLREMCKQGYRDGLRFLQRNGLLNRPNPLLALPPARPHGPEDKDQAVESAQAEDYSQLPGEDHILEHLPARLNEALLEACVEPTDLLTTLSNMLPVRLATAMMVPYTLPLESALSFTIRLLEWLPDVPEDIRWMKEQTGSICQYLVMRAKRKLGRHLPSRLPEQVELRRVQSLPSVPLSCAAYREALPGWMRNNLSLGDALAKWEECQRQLLLGLFCTNVAFPPEALRMRAPADPAPAPADPASPFFMAC

SEQ ID NO: 1030061 - protein, 376 aa, Homo sapiens
GGPSQTQAAPKPEQAGPDPSFFASASGDPELEPQRDLPGPRLQRASGEQAAHRGLAAHGTRGPAAAAAMFPREKTWNISFAGCGFLGVYYVGVASCLREHAPFLVANATHIYGASAGALTATALVTGVCLGEAGAKFIEVSKEARKRFLGPLHPSFNLVKIIRSFLLKVLPADSHEHASGRLGISLTRVSDGENVIISHFNSKDELIQANVCSGFIPVYCGLIPPSLQGVRYVDGGISDNLPLYELKNTITVSPFSGESDICPQDSSTNIHELRVTNTSIQFNLRNLYRLSKALFPPEPLVLREMCKQGYRDGLRFLQRNGLLNRPNPLLALPPARPHGPEDKDQAVESAQAEDYSQLPGEDHILEHLPARLNETW

SEQ ID NO: 1030062 - protein, 267 aa, Homo sapiens
AAALMNCESLLSPTPGLLNRPNPLLALPPARPHGPEDKDQAVESAQAEDYSQLPGEDHILEHLPARLNEALLEACVEPTDLLTTLSNMLPVRLATAMMVPYTLPLESALSFTIRLLEWLPDVPEDIRWMKEQTGSICQYLVMRAKRKLGRHLPSRLPEQVELRRVQSLPSVPLSCAAYREALPGWMRNNLSLGDALAKWEECQRQLLLGLFCTNVAFPPEALRMRAPADPAPAPADPASPQHQPAGPAPLLSTPAPEARPVIGALGL

SEQ ID NO: 1030063 - protein, 180 aa, Homo sapiens
MLPVRLATAMMVPYTLPLESALSFTIRLLEWLPDVPEDIRWMKEQTGSICQYLVMRAKRKLGRHLPSRLPEQVELRRVQSLPSVPLSCAAYREALPGWMRNNLSLGDALAKWEECQRQLLLGLFCTNVAFPPEALRMRAPADPAPAPADPASPQHQPAGPAPLLSTPAPEARPVIGALGL

SEQ ID NO: 1030064 - protein, 470 aa, Homo sapiens
GGPSQTQAAPKPEQAGPDPSFFASASGDPELEPQRDLPGPRLQRASGEQAAHRGLAAHGTRGPAAAAAMFPREKTWNISFAGCGFLGVYYVGVASCLREHAPFLVANATHIYGASAGALTATALVTGVCLGEAGAKFIEVSKEARKRFLGPLHPSFNLVKIIRSFLLKVLPADSHEHASGRLGISLTRVSDGENVIISHFNSKDELIQANVCSGFIPVYCGLIPPSLQGVVSIPSPGHLLWGGPWDEGQRRRPPRAILQALALPPPVTHFPPVLLKKQLWQRTLPGPPFPSSVPAFPRLPSAQCPGWPTASAQWVKRSNEVATEWGPWWPGGVAGVGGSAATGPHIRSCLCVPWKRYVDGGISDNLPLYELKNTITVSPFSGESDICPQDSSTNIHELRVTNTSIQFNLRNLYRLSKALFPPEPLVLREMCKQGYRDGLRFLQRNGARTRAGEGGVGSALLPPAGRGRKL

SEQ ID NO: 1030065 - protein, 440 aa, Homo sapiens
GGPSQTQAAPKPEQAGPDPSFFASASGDPELEPQRDLPGPRLQRASGEQAAHRGLAAHGTRGPAAAAAMFPREKTWNISFAGCGFLGVYYVGVASCLREHAPFLVANATHIYGASAGALTATALVTGVCLGEAGAKFIEVSKEARKRFLGPLHPSFNLVKIIRSFLLKVLPADSHEHASGRLGISLTRVSDGENVIISHFNSKDELIQANVCSGFIPVYCGLIPPSLQGVRYVDGGISDNLPLYELKNTITVSPFSGESDICPQDSSTNIHELRVTNTSIQFNLRNLYRLSKALFPPEPLVLREMCKQGYRDGLRFLQRNGLLNRPNPLLALPPARPHGPEDKDQAVESAQAEDYSQLPGEDHILEHLPARLNEGAHLFCMAERPAEAQWSSVLSQNFARGERRSRLELELQIREQDLRARLPPSSSVLGRDGPLLGYWR

SEQ ID NO: 1030066 - protein, 265 aa, Homo sapiens
  misc_feature (11)..(11): Xaa can be any naturally occurring amino acid
DSRGSLSAFQXRNGLLNRPNPLLALPPARPHGPEDKDQAVESAQAEDYSQLPGEDHILEHLPARLNEALLEACVEPTDLLTTLSNMLPVRLATAMMVPYTLPLESALSFTIRLLEWLPDVPEDIRWMKEQTGSICQYLVMRAKRKLGRHLPSRLPEQVELRRVQSLPSVPLSCAAYREALPGWMRNNLSLGDALAKWEECQRQLLLGLFCTNVAFPPEALRMRAPADPAPAPADPASPQHQPAGPAPLLSTPAPEARPVIGALGL

SEQ ID NO: 1030067 - protein, 282 aa, Homo sapiens; identical to SEQ ID NO: 1030056

SEQ ID NO: 1030068 - protein, 134 aa, Homo sapiens
RSNEIKCVQGGMAVDKKVTLNKQSLCSPGGLLEAAEGHLDCDMPRGPGLCVYPPLAGPLPGSQPVMSVWHAVGAQALIESFEDKTKLSLFHSPAQITRKFRLNSEGKLEQTVSMATTTQPMTQHLHVTYKKVTP

SEQ ID NO: 1030069 - protein, 252 aa, Homo sapiens
MSINEVILSASGACKLIDSLHSYCFSSRQNKSQVCCLREQVEKKNGELKSLRQRVSRSDSQVRKLQEKLDELRRVSVPYPSSLLSPSREPPKMNPVVEPLSWMLGTWLSDPPGAGTYPTLQPFQYLEEVHISHVGQPMLNFSFNSFHPDTRKPMHRECGFIRLKPDTNKVAFVSAQNTGVVEVEEGEVNGQELCIASHSIARISFAKEPHVEQITRKFRLNSEGKLEQTVSMATTTQPMTQHLHVTYKKVTP

SEQ ID NO: 1030070 - protein, 252 aa, Homo sapiens; identical to SEQ ID NO: 1030069

SEQ ID NO: 1030071 - protein, 643 aa, Homo sapiens
MTRAGAGAGAGPLRGACASILPYGAGAAGRPTSRAVSPPRSLPRGGPRAGGRLGPGPGCAAGPRPAMVICCAAVNCSNRQGKGEKRAVSFHRFPLKDSKRLIQWLKAVQRDNWTPTKYSFLCSEHFTKDSFSKRLEDQHRLLKPTAVPSIFHLTEKKRGAGGHGRTRRKDASKATGGVRGHSSAATSRGAAGWSPSSSGNPMAKPESRRLKQAALQGEATPRAAQEAASQEQAQQALERTPGDGLATMVAGSQGKAEASATDAGDESATSSIEGGVTDKSGISMDDFTPPGSGACKFIGSLHSYSFSSKHTRERPSVPREPIDRKRLKKDVEPSCSGSSLGPDKGLAQSPPSSSLTATPQKPSQSPSAPPADVTPKPATEAVQSEHSDASPMSINEVILSASGACKLIDSLHSYCFSSRQNKSQVCCLREQVEKKNGELKSLRQRVSRSDSQVRKLQEKLDELRRVSVPYPSSLLSPSREPPKMNPVVEPLSWMLGTWLSDPPGAGTYPTLQPFQYLEEVHISHVGQPMLNFSFNSFHPDTRKPMHRECGFIRLKPDTNKVAFVSAQNTGVVEVEEGEVNGQELCIASHSIARISFAKEPHVEQITRKFRLNSEGKLEQTVSMATTTQPMTQHLHVTYKKVTP

SEQ ID NO: 1030072 - protein, 371 aa, Homo sapiens
MTRAGAGAGAGPLRGACASILPYGAGAAGRPTSRAVSPPRSLPRGGPRAGGRLGPGPGCAAGPRPAMVICCAAVNCSNRQGKGEKRAVSFHRFPLKDSKRLIQWLKAVQRDNWTPTKYSFLCSEHFTKDSFSKRLEDQHRLLKPTAVPSIFHLTEKKRGAGGHGRTRRKDASKATGGVRGHSSAATSRGAAGWSPSSSGNPMAKPESRRLKQAALQGEATPRAAQEAASQEQAQQALERTPGDGLATMVAGSQGKAEASATDAGDESATSSIEGGVTDKSGISMDDFTPPGSGACKFIGSLHSYSFSSKHTRERPSVPREPIDRKRLKKDVEPSCSGSSLGPDKGLAGPGYCASTVRLLNRQSLRQKWVWP

SEQ ID NO: 1030073 - protein, 187 aa, Homo sapiens
SQLFAFPVRLWTHHFEFKCSIFLEPPKMNPVVEPLSWMLGTWLSDPPGAGTYPTLQPFQYLEEVHISHVGQPMLNFSFNSFHPDTRKPMHRECGFIRLKPDTNKVAFVSAQNTGVVEVEEGEVNGQELCIASHSIARISFAKEPHVEQITRKFRLNSEGKLEQTVSMATTTQPMTQHLHVTYKKVTP

SEQ ID NO: 1030074 - protein, 433 aa, Homo sapiens
MQQSAVNSCSAVTHQRQRQQEQAQQALERTPGDGLATMVAGSQGKAEASATDAGDESATSSIEGGVTDKSGISMDDFTPPGSGACKFIGSLHSYSFSSKHTRERPSVPREPIDRKRLKKDVEPSCSGSSLGPDKGLAQSPPSSSLTATPQKPSQSPSAPPADVTPKPATEAVQSEHSDASPMSINEVILSASGACKLIDSLHSYCFSSRQNKSQVCCLREQVEKKNGELKSLRQRVSRSDSQVRKLQEKLDELRRVSVPYPSSLLSPSREPPKMNPVVEPLSWMLGTWLSDPPGAGTYPTLQPFQYLEEVHISHVGQPMLNFSFNSFHPDTRKPMHRECGFIRLKPDTNKVAFVSAQNTGVVEVEEGEVNGQELCIASHSIARISFAKEPHVEQITRKFRLNSEGKLEQTVSMATTTQPMTQHLHVTYKKVTP

SEQ ID NO: 1030075 - protein, 580 aa, Homo sapiens
MTRAGAGAGAGPLRGACASILPYGAGAAGRPTSRAVSPPRSLPRGGPRAGGRLGPGPGCAAGPRPAMVICCAAVNCSNRQGKGEKRAVSFHRFPLKDSKRLIQWLKAVQRDNWTPTKYSFLCSEHFTKDSFSKRLEDQHRLLKPTAVPSIFHLTEKKRGAGGHGRTRRKDASKATGGVRGHSSAATSRGAAGWSPSSSGNPMAKPESRRLKQAALQGEATPRAAQEAASQEQAQQALERTPGDGLATMVAGSQGKAEASATDAGDESATSSIEGGVTDKSGISMDDFTPPGSGACKFIGSLHSYSFSSKHTRERPSVPREPIDRKRLKKDVEPSCSGSSLGPDKGLAQSPPSSSLTATPQKPSQSPSAPPADVTPKPATEAVQSEHSDASPMSINEVILSASGACKLIDSLHSYCFSSRQNKSQVCCLREQVEKKNGELKSLRQRVSRSDSQVRKLQEKLDELRRVSVPYPSSLLSPSREPPKMNPVVEPLSWMLGTWLSDPPGAGTYPTLQPFQYLEEVHISHVGQPMLNFSFNSFKQNPRKGGEQQEGIKNAIRAKSKKRGPWQGPKKTNVGGKTHQG

SEQ ID NO: 1030076 - protein, 112 aa, Homo sapiens
  misc_feature (6)..(6): Xaa can be any naturally occurring amino acid
GEDAGXGWGGGGPAAGRLRLHLAVRRGRRGPAHVPSRVAAALPPSGRSAGGRAARAGAWLRGWAKARDGDLLCGRELLQPAGKGREARRLLPQVPPKGLKTSNPMVKSCSEG

SEQ ID NO: 1030077 - protein, 252 aa, Homo sapiens; identical to SEQ ID NO: 1030069

SEQ ID NO: 1030078 - protein, 252 aa, Homo sapiens; identical to SEQ ID NO: 1030069

SEQ ID NO: 1030079 - protein, 169 aa, Homo sapiens [sequence omitted]

SEQ ID NO: 1030080 - protein, 165 aa, Homo sapiens
MEPPKMNPVVEPLSWMLGTWLSDPPGAGTYPTLQPFQYLEEVHISHVGQPMLNFSFNSFHPDTRKPMHRECGFIRLKPDTNKVAFVSAQNTGVVEVEEGEVNGQELCIASHSIARISFAKEPHVEQITRKFRLNSEGKLEQTVSMATTTQPMTQHLHVTYKKVTP

SEQ ID NO: 1030081 - protein, 165 aa, Homo sapiens; identical to SEQ ID NO: 1030080

SEQ ID NO: 1030082 - protein, 73 aa, Homo sapiens
KEPHVKQVSPALLPARSCLLFAAVCGVSLFLFREIRRKFRLNSEGKLEQTVSMATTTQPMTQHLHVTYKKVTP

SEQ ID NO: 1030083 - protein, 252 aa, Homo sapiens; identical to SEQ ID NO: 1030069

SEQ ID NO: 1030084 - protein, 333 aa, Homo sapiens
WIMYCTGKNPVDEVEFCLKQKTINSLEDIPDSSPGPRVGSQELTENLALDGDAQSPSAPPADVTPKPATEAVQSEHSDASPMSINEVILSASGACKLIDSLHSYCFSSRQNKSQVCCLREQVEKKNGELKSLRQRVSRSDSQVRKLQEKLDELRRVSVPYPSSLLSPSREPPKMNPVVEPLSWMLGTWLSDPPGAGTYPTLQPFQYLEEVHISHVGQPMLNFSFNSFHPDTRKPMHRECGFIRLKPDTNKVAFVSAQNTGVVEVEEGEVNGQELCIASHSIARISFAKEPHVEQITRKFRLNSEGKLEQTVSMATTTQPMTQHLHVTYKKVTP

SEQ ID NO: 1030085 - protein, 404 aa, Homo sapiens
MEAGEEPLLLAELKPGRPHQFDWKSSCETWSVAFSPDGSWFAWSQGHCIVKLIPWPLEEQFIPKGFEAKSRSSKNETKGRGSPKEKTLDCGQIVWGLAFSPWPSPPSRKLWARHHPQVPDVSCLVLATGLNDGQIKIWEVQTGLLLLNLSGHQDVVRDLSFTPSGSLILVSASRDKTLRIWDLNKHGKQIQVLSGHLQWVYCCSISPDCSMLCSAAGEKSVFLWSMRSYTLIRKLEGHQSSVVSCDFSPDSALLVTASYDTNVIMWDPYTGERLRSLHHTQVDPAMDDSDVHISSLRSVCFSPEGLYLATVADDRLLRIWALELKTPIAFAPMTNGLCCTFFPHGGVIATGTRDGHVQFWTAPRVLSSLKHLCRKALRSFLTTYQVLALPIPKKMKEFLTYRTF

SEQ ID NO: 1030086 - protein, 404 aa, Homo sapiens; identical to SEQ ID NO: 1030085

SEQ ID NO: 1030087 - protein, 404 aa, Homo sapiens; identical to SEQ ID NO: 1030085

SEQ ID NO: 1030088 - protein, 404 aa, Homo sapiens; identical to SEQ ID NO: 1030085

SEQ ID NO: 1030089 - protein, 404 aa, Homo sapiens; identical to SEQ ID NO: 1030085

SEQ ID NO: 1030090 - protein, 404 aa, Homo sapiens; identical to SEQ ID NO: 1030085

SEQ ID NO: 1030091 - protein, 404 aa, Homo sapiens; identical to SEQ ID NO: 1030085

SEQ ID NO: 1030092 - protein, 163 aa, Homo sapiens
MEAGEEPLLLAELKPGRPHQFDWKSSCETWSVAFSPDGSWFAWSQGHCIVKLIPWPLEEQFIPKGFEAKSRSSKNETKGRGSPKEKTLDCGQIVWGLAFSPWPSPSARCLLPGSCYGTQRWADQDLGGADRAPAFESFRPPRCRERSELHTQWQFDFGLRVTG

SEQ ID NO: 1030093 - protein, 145 aa, Homo sapiens
GRVGRPTRRGRVGRLRSLHHTQVDPAMDDSDVHISSLRSVCFSPEGLYLATVADDRLLRIWALELKTPIAFAPMTNGLCCTFFPHGGVIATGTRDGHVQFWTAPRVLSSLKHLCRKALRSFLTTYQVLALPIPKKMKEFLTYRTF

SEQ ID NO: 1030094 - protein, 194 aa, Homo sapiens
MLCSAAGEKSVFLWSMRSYTLIRKLEGHQSSVVSCDFSPDSALLVTASYDTNVIMWDPYTGERLRSLHHTQVDPAMDDSDVHISSLRSVCFSPEGLYLATVADDRLLRIWALELKTPIAFAPMTNGLCCTFFPHGGVIATGTRDGHVQFWTAPRVLSSLKHLCRKALRSFLTTYQVLALPIPKKMKEFLTYRTF

SEQ ID NO: 1030095 - protein, 404 aa, Homo sapiens; identical to SEQ ID NO: 1030085

SEQ ID NO: 1030096 - protein, 404 aa, Homo sapiens; identical to SEQ ID NO: 1030085

SEQ ID NO: 1030097 - protein, 404 aa, Homo sapiens; identical to SEQ ID NO: 1030085

SEQ ID NO: 1030098 - protein, 404 aa, Homo sapiens; identical to SEQ ID NO: 1030085

SEQ ID NO: 1030099 - protein, 404 aa, Homo sapiens; identical to SEQ ID NO: 1030085

SEQ ID NO: 1030100 - protein, 404 aa, Homo sapiens; identical to SEQ ID NO: 1030085

SEQ ID NO: 1030101 - protein, 404 aa, Homo sapiens; identical to SEQ ID NO: 1030085

SEQ ID NO: 1030102 - protein, 404 aa, Homo sapiens [sequence omitted]

SEQ ID NO: 1030103 - protein, 404 aa, Homo sapiens; identical to SEQ ID NO: 1030085

SEQ ID NO: 1030104 - protein, 213 aa, Homo sapiens [sequence omitted]

SEQ ID NO: 1030105 - protein, 404 aa, Homo sapiens; identical to SEQ ID NO: 1030085

SEQ ID NO: 1030106 - protein, 272 aa, Homo sapiens
MEAGEEPLLLAELKPGRPHQFDWKSSCETWSVAFSPDGSWFAWSQGHCIVKLIPWPLEEQFIPKGFEAKSRSSKNETKGRGSPKEKTLDCGQIVWGLAFSPWPSPPSRKLWARHHPQVPDVSCLVLATGLNDGQIKIWEVQTGLLLLNLSGHQDVVRDLSFTPSGSLILVSASRDKTLRIWDLNKHGKQIQVLSGHLQWVYCCSISPDCSMLCSAAGEKSVFLWSMRSYTLIRKLEGHQSSVVSCDFSPDSALLVTASYDTNKAEVTPPHPG

SEQ ID NO: 1030107 - protein, 404 aa, Homo sapiens; identical to SEQ ID NO: 1030085

SEQ ID NO: 1030108 - protein, 1356 aa, Homo sapiens
KAQTDTLTQMMTSTLFSSPSVHNVMETVTQETAPPDEMTTSFPSSVTNTLMMTSKTITMTTSTDSTLGNTEETSTAGTESSTPVTSAVSITAGQEGQSRTTSWRTSIQDTSASSQNHWTRSTQTTRESQTSTLTHRTTSTPSFSPSVHNVTGTVSQKTSPSGETATSSLCSVTNTSMMTSEKITVTTSTGSTLGNPGETSSVPVTGSLMPVTSAALVTVDPEGQSPATFSRTSTQDTTAFSKNHQTQSVETTRVSQINTLNTLTPVTTSTVLSSPSGFNPSGTVSQETFPSGETTISSPSSVSNTFLVTSKVFRMPISRDSTLGNTEETSLSVSGTISAITSKVSTIWWSDTLSTALSPSSLPPKISTAFHTQQSEGAETTGRPHERSSFSPGVSQEIFTLHETTTWPSSFSSKGHTTWSQTELPSTSTGAATRLVTGNPSTGTAGTIPRVPSKVSAIGEPGEPTTYSSHSTTLPKTTGAGAQTQWTQETGTTGEALLSSPSYSVTQMIKTATSPSSSPMLDRHTSQQITTAPSTNHSTIHSTSTSPQESPAVSQRGHTQAPQTTQESQTTRSVSPMTDTKTVTTPGSSFTASGHSPSEIVPQDAPTISAATTFAPAPTGDGHTTQAPTTALQAAPSSHDATLGPSGGTSLSKTGALTLANSVVSTPGGPEGQWTSASASTSPDTAAAMTHTHQAESTEASGQTQTSEPASSGSRTTSAGTATPSSSGASGTTPSGSEGISTSGETTRFSSNPSRDSHTTQSTTELLSASASHGAIPVSTGMASSIVPGTFHPTLSEASTAGRPTGQSSPTSPSASPQETAAISRMAQTQRTRTSRGSDTISLASQATDTFSTVPPTPPSITSTGLTSPQTQTHTLSPSGSGKTFTTALISNATPLPVTYASSASTGHTTPLHVTDASSVSTGHATPLPVTDTSSASTGHATPLPVTSPSSASTGHATPLPVTDTSSVSTGDTTPLPVTDASSVASTGDTTPFMSPTLPQHPQVTPPLFLSPAFPQYPQVTPRLFLSLALPQHPQVTPPLFLSPTLPQYPQVTPPLFLSPTLPQHPQVTPPLFMSPTLPQHPQVTPPLFLSPTLPQHPQVTPPLFLSPTLPQHPQVTPPLFLSPTLPQHPQVTPPLFMSPTLPQYPQVTPPLFLSPALPQHPQVTPPLFLSPTLPQYPQVTPPLFLSPAFPQHPQVTPPLFLSPTLPQHPQVTPPLFLSPAFPQYPQVTPPLFLSPTLPQHPQVTPPLFLSPTLPQYPQVTPPLFMSPMLSSVSTGDTTPLPVTSPSSASTGDTTPLPVTDTSSVSTRRHHPSSCHRHFLSIHKPRHLSSCHRHFLSIHKPRHLSSCHRPFLSIHR

SEQ ID NO: 1030109 - protein, 1107 aa, Homo sapiens
KAQTDTLTQMMTSTLFSSPSVHNVMETVTQETAPPDEMTTSFPSSVTNTLMMTSKTITMTTSTDSTLGNTEETSTAGTESSTPVTSAVSITAGQEGQSRTTSWRTSIQDTSASSQNHWTRSTQTTRESQTSTLTHRTTSTPSFSPSVHNVTGTVSQKTSPSGETATSSLCSVTNTSMMTSEKITVTTSTGSTLGNPGETSSVPVTGSLMPVTSAALVTVDPEGQSPATFSRTSTQDTTAFSKNHQTQSVETTRVSQINTLNTLTPVTTSTVLSSPSGFNPSGTVSQETFPSGETTISSPSSVSNTFLVTSKVFRMPISRDSTLGNTEETSLSVSGTISAITSKVSTIWWSDTLSTALSPSSLPPKISTAFHTQQSEGAETTGRPHERSSFSPGVSQEIFTLHETTTWPSSFSSKGHTTWSQTELPSTSTGAATRLVTGNPSTGTAGTIPRVPSKVSAIGEPGEPTTYSSHSTTLPKTTGAGAQTQWTQETGTTGEALLSSPSYSVTQMIKTATSPSSSPMLDRHTSQQITTAPSTNHSTIHSTSTSPQESPAVSQRGHTQAPQTTQESQTTRSVSPMTDTKTVTTPGSSFTASGHSPSEIVPQDAPTISAATTFAPAPTGDGHTTQAPTTALQAAPSSHDATLGPSGGTSLSKTGALTLANSVVSTPGGPEGQWTSASASTSPDTAAAMTHTHQAESTEASGQTQTSEPASSGSRTTSAGTATPSSSGASGTTPSGSEGISTSGETTRFSSNPSRDSHTTQSTTELLSASASHGAIPVSTGMASSIVPGTFHPTLSEASTAGRPTGQSSPTSPSASPQETAAISRMAQTQRTRTSRGSDTISLASQATDTFSTVPPTPPSITSTGLTSPQTQTHTLSPSGSGKTFTTALISNATPLPVTYASSASTGHTTPLHVTDASSVSTGHATPLPVTDTSSASTGHATPLPVTSPSSASTGHATPLPVTDTSSVSTGQTPPLFLSPTLPQYPQVTPPLFLSPALPQHPQVTPPLFLSPTLPQHPQVTPPLFLSPAFPQYPQVTPPLFLSLALPQHPQVTPPLFLSPTLPQHPQVTPPLFLSPALPQHPQVTHPDEAYSPFRRSSLGSPLESPR

SEQ ID NO: 1030110 - protein, 1223 aa, Homo sapiens
KAQTDTLTQMMTSTLFSSPSVHNVMETVTQETAPPDEMTTSFPSSVTNTLMMTSKTITMTTSTDSTLGNTEETSTAGTESSTPVTSAVSITAGQEGQSRTTSWRTSIQDTSASSQNHWTRSTQTTRESQTSTLTHRTTSTPSFSPSVHNVTGTVSQKTSPSGETATSSLCSVTNTSMMTSEKITVTTSTGSTLGNPGETSSVPVTGSLMPVTSAALVTVDPEGQSPATFSRTSTQDTTAFSKNHQTQSVETTRVSQINTLNTLTPVTTSTVLSSPSGFNPSGTVSQETFPSGETTISSPSSVSNTFLVTSKVFRMPISRDSTLGNTEETSLSVSGTISAITSKVSTIWWSDTLSTALSPSSLPPKISTAFHTQQSEGAETTGRPHERSSFSPGVSQEIFTLHETTTWPSSFSSKGHTTWSQTELPSTSTGAATRLVTGNPSTGTAGTIPRVPSKVSAIGEPGEPTTYSSHSTTLPKTTGAGAQTQWTQETGTTGEALLSSPSYSVTQMIKTATSPSSSPMLDRHTSQQITTAPSTNHSTIHSTSTSPQESPAVSQRGHTQAPQTTQESQTTRSVSPMTDTKTVTTPGSSFTASGHSPSEIVPQDAPTISAATTFAPAPTGDGHTTQAPTTALQAAPSSHDATLGPSGGTSLSKTGALTLANSVVSTPGGPEGQWTSASASTSPDTAAAMTHTHQAESTEASGQTQTSEPASSGSRTTSAGTATPSSSGASGTTPSGSEGISTSGETTRFSSNPSRDSHTTQSTTELLSASASHGAIPVSTGMASSIVPGTFHPTLSEASTAGRPTGQSSPTSPSASPQETAAISRMAQTQRTRTSRGSDTISLASQATDTFSTVPPTPPSITSTGLTSPQTQTHTLSPSGSGKTFTTALISNATPLPVTYASSASTGHTTPLHVTDASSVSTGHATPLPVTDTSSASTGHATPLPVTSPSSASTGHATPLPVTDTSSVSTGDTTPLPVTDASSVASTGDTTPFMSPTLPQHPQVTPPLFLSPAFPQYPQVTPRLFLSLALPQHPQVTPPLFLSPTLPQYPQVTPPLFLSPTLPQHPQVTPPLFMSPTLPQHPQVTPPLFLSPTLPQHPQVTPPLFLSPTLPQHPQVTPPLFLSPTLPQHPQVTPPLFMSPTLPQYPQVTPPLFLSPALPQHPQVTPPLFLSPTLPQYPQVTPHPSSCHRHFLSIHRSRHPSFLSAALPQLPQYPRLPSEVYVM

SEQ ID NO: 1030111 - protein, 1388 aa, Homo sapiens
KAQTDTLTQMMTSTLFSSPSVHNVMETVTQETAPPDEMTTSFPSSVTNTLMMTSKTITMTTSTDSTLGNTEETSTAGTESSTPVTSAVSITAGQEGQSRTTSWRTSIQDTSASSQNHWTRSTQTTRESQTSTLTHRTTSTPSFSPSVHNVTGTVSQKTSPSGETATSSLCSVTNTSMMTSEKITVTTSTGSTLGNPGETSSVPVTGSLMPVTSAALVTVDPEGQSPATFSRTSTQDTTAFSKNHQTQSVETTRVSQINTLNTLTPVTTSTVLSSPSGFNPSGTVSQETFPSGETTISSPSSVSNTFLVTSKVFRMPISRDSTLGNTEETSLSVSGTISAITSKVSTIWWSDTLSTALSPSSLPPKISTAFHTQQSEGAETTGRPHERSSFSPGVSQEIFTLHETTTWPSSFSSKGHTTWSQTELPSTSTGAATRLVTGNPSTGTAGTIPRVPSKVSAIGEPGEPTTYSSHSTTLPKTTGAGAQTQWTQETGTTGEALLSSPSYSVTQMIKTATSPSSSPMLDRHTSQQITTAPSTNHSTIHSTSTSPQESPAVSQRGHTQAPQTTQESQTTRSVSPMTDTKTVTTPGSSFTASGHSPSEIVPQDAPTISAATTFAPAPTGDGHTTQAPTTALQAAPSSHDATLGPSGGTSLSKTGALTLANSVVSTPGGPEGQWTSASASTSPDTAAAMTHTHQAESTEASGQTQTSEPASSGSRTTSAGTATPSSSGASGTTPSGSEGISTSGETTRFSSNPSRDSHTTQSTTELLSASASHGAIPVSTGMASSIVPGTFHPTLSEASTAGRPTGQSSPTSPSASPQETAAISRMAQTQRTRTSRGSDTISLASQATDTFSTVPPTPPSITSTGLTSPQTQTHTLSPSGSGKTFTTALISNATPLPVTYASSASTGHTTPLHVTDAQHPQVTPPLFLSPALPQHPQVTPPLFLSPTLPQYPQVTPPLFLSPTLPQYPQVTPPLFLSPALPQHPQVTPPLFLSPTLPQYPQVRHHPSSCHRRFLSSIQQVTPPLFMSPTLPQHPQVTPPLFLSPAFPQYPQVTPRLFLSLALPQHPQVTPPLFLSPTLPQYPQVTPPLFLSPTLPQHPQVTPPLFMSPTLPQHPQVTPPLFLSPTLPQHPQVTPPLFLSPTLPQHPQVTPPLFLSPTLPQHPQVTPPLFMSPTLPQYPQVTPPLFLSPALPQHPQVTPPLFLSPTLPQYPQVTPPLFLSPAFPQHPQVTPPLFLSPTLPQHPQVTPPLFLSPAFPQYPQVTPPLFLSPTLPQHPQVTPPLFLSPTLPQYPQVTPPLFMSPMLSSVSTGDTTPLPVTSPSSASTGDTTPLPVTDTSSVSTRRHHPSSCHRHFLSIHKPRHLSSCHRHFLSIHKPRHLSSCHRPFLSIHR

SEQ ID NO: 1030112 - protein, 1036 aa, Homo sapiens
KAQTDTLTQMMTSTLFSSPSVHNVMETVTQETAPPDEMTTSFPSSVTNTLMMTSKTITMTTSTDSTLGNTEETSTAGTESSTPVTSAVSITAGQEGQSRTTSWRTSIQDTSASSQNHWTRSTQTTRESQTSTLTHRTTSTPSFSPSVHNVTGTVSQKTSPSGETATSSLCSVTNTSMMTSEKITVTTSTGSTLGNPGETSSVPVTGSLMPVTSAALVTVDPEGQSPATFSRTSTQDTTAFSKNHQTQSVETTRVSQINTLNTLTPVTTSTVLSSPSGFNPSGTVSQETFPSGETTISSPSSVSNTFLVTSKVFRMPISRDSTLGNTEETSLSVSGTISAITSKVSTIWWSDTLSTALSPSSLPPKISTAFHTQQSEGAETTGRPHERSSFSPGVSQEIFTLHETTTWPSSFSSKGHTTWSQTELPSTSTGAATRLVTGNPSTGTAGTIPRVPSKVSAIGEPGEPTTYSSHSTTLPKTTGAGAQTQWTQETGTTGEALLSSPSYSVTQMIKTATSPSSSPMLDRHTSQQITTAPSTNHSTIHSTSTSPQESPAVSQRGHTQAPQTTQESQTTRSVSPMTDTKTVTTPGSSFTASGHSPSEIVPQDAPTISAATTFAPAPTGDGHTTQAPTTALQAAPSSHDATLGPSGGTSLSKTGALTLANSVVSTPGGPEGQWTSASASTSPDTAAAMTHTHQAESTEASGQTQTSEPASSGSRTTSAGTATPSSSGASGTTPSGSEGISTSGETTRFSSNPSRDSHTTQSTTELLSASASHGAIPVSTGMASSIVPGTFHPTLSEASTAGRPTGQSSPTSPSASPQETAAISRMAQTQRTRTSRGSDTISLASQATDTFSTVPPTPPSITSTGLTSPQTQTHTLSPSGSGKTFTTALISNATPLPVTYASSASTGHTTPLHVTDASSVSTGHATPLPVTDTSSASTGHATPLPVTSPSSASTGHATPLPVTDTSSVSTGQYPQVTPPLFLSLALPQHPQVTPPLFLSPTLPQHPQVTPPLFLSPALPPLRRRGREFSSSSRPPL

SEQ ID NO: 1030113 - protein, 314 aa, Homo sapiens
STTTTKFAGASTRPLHVTDTSSASTGHATPLPVTSLSSVSTGDTTPLPVTSPSSASTGHATPLLVTDASSVSTGHATPLPVTDASSASTGHATPLHVTELPQYPQVTPPLFLSPALPQHPQVTPPLFLSPTLPQYPQVTPPLFLSPAFPQHPQVTPPLFLSPTLPQHPQVTPPLFLSPAFPQYPQVTPPLFLSPTLPQHPQVTPPLFLSPTLPQYPQVTPPLFMSPMLSSVSTGDTTPLPVTSPSSASTGDTTPLPVTDTSSVSTRRHHPSSCHRHFLSIHKPRHLSSCHRHFLSIHKPRHLSSCHRPFLSIHR

SEQ ID NO: 1030114 - protein, 130 aa, Homo sapiens
TLGGAADEVLAVLKIEKLRDKERRGEIDLLLGQTPFTPLPVTSLSSASTGDTTPLPVTDTSSASTGHATPLPVTSLSSVSTGDTTPLPVTDTSSASTGHATSLLVTDASSVSTGHATPLHVTDAFLSIHR

SEQ ID NO: 1030115 - protein, 234 aa, Homo sapiens
STTTTKFAGASTRSASTGHATPLPVTSPSSASTGDTTPLPVTDTSSVSTGHATPLPVTDTSSASTGHATPLPVTSPSSASTGHATPLPVTDTSSVSTGQTPPLFLSPTLPQYPQVTPPLFLSPALPQHPQVTPPLFLSPTLPQHPQVTPPLFLSPAFPQYPQVTPPLFLSLALPQHPQVTPPLFLSPTLPQHPQVTPPLFLSPALPQHPQVTHPDEAYSPFRRSSLGSPLESPR

SEQ ID NO: 1030116 - protein, 208 aa, Homo sapiens
PTSPTASTGQATPLPVTSPSSASTGDATLFLSPALPQHPQVTPPLFLSPALPQHPQVTPPLFLSPTLPQHPQVTPPLFLSPTLPQHPQVTPPLFLSPALPQHPQVTPPLFLSPTLPQHPQVTPPLFLSPAFPQYPQVTPPLFLSLALPQHPQVTPPLFLSPTLPQHPQVTPPLFLSPALPQHPQVTHPDEAYSPFRRSSLGSPLESPR

SEQ ID NO: 1030117 - protein, 1356 aa, Homo sapiens; identical to SEQ ID NO: 1030108

SEQ ID NO: 1030118 - protein, 988 aa, Homo sapiens
KAQTDTLTQMMTSTLFSSPSVHNVMETVTQETAPPDEMTTSFPSSVTNTLMMTSKTITMTTSTDSTLGNTEETSTAGTESSTPVTSAVSITAGQEGQSRTTSWRTSIQDTSASSQNHWTRSTQTTRESQTSTLTHRTTSTPSFSPSVHNVTGTVSQKTSPSGETATSSLCSVTNTSMMTSEKITVTTSTGSTLGNPGETSSVPVTGSLMPVTSAALVTVDPEGQSPATFSRTSTQDTTAFSKNHQTQSVETTRVSQINTLNTLTPVTTSTVLSSPSGFNPSGTVSQETFPSGETTISSPSSVSNTFLVTSKVFRMPISRDSTLGNTEETSLSVSGTISAITSKVSTIWWSDTLSTALSPSSLPPKISTAFHTQQSEGAETTGRPHERSSFSPGVSQEIFTLHETTTWPSSFSSKGHTTWSQTELPSTSTGAATRLVTGNPSTGTAGTIPRVPSKVSAIGEPGEPTTYSSHSTTLPKTTGAGAQTQWTQETGTTGEALLSSPSYSVTQMIKTATSPSSSPMLDRHTSQQITTAPSTNHSTIHSTSTSPQESPAVSQRGHTQAPQTTQESQTTRSVSPMTDTKTVTTPGSSFTASGHSPSEIVPQDAPTISAATTFAPAPTGDGHTTQAPTTALQAAPSSHDATLGPSGGTSLSKTGALTLANSVVSTPGGPEGQWTSASASTSPDTAAAMTHTHQAESTEASGQTQTSEPASSGSRTTSAGTATPSSSGASGTTPSGSEGISTSGETTRFSSNPSRDSHTTQSTTELLSASASHGAIPVSTGMASSIVPGTFHPTLSEASTAGRPTGQSSPTSPSASPQETAAISRMAQTQRTRTSRGSDTISLASQATDTFSTVPPTPPSITSTGLTSPQTQTHTLSPSGSGKTFTTALISNATPLPVTYASSASTGHTTPLHVTDASSVSTGHATPLPVTDTSSASTGHATPLPVTSPSSASTGHATPLPVTDTSSVSTGRHHPSSCHRRFLSSIHR

SEQ ID NO: 1030119 - protein, 988 aa, Homo sapiens; identical to SEQ ID NO: 1030118

SEQ ID NO: 1030120 - protein, 988 aa, Homo sapiens; identical to SEQ ID NO: 1030118

SEQ ID NO: 1030121 - protein, 1017 aa, Homo sapiens
KAQTDTLTQMMTSTLFSSPSVHNVMETVTQETAPPDEMTTSFPSSVTNTLMMTSKTITMTTSTDSTLGNTEETSTAGTESSTPVTSAVSITAGQEGQSRTTSWRTSIQDTSASSQNHWTRSTQTTRESQTSTLTHRTTSTPSFSPSVHNVTGTVSQKTSPSGETATSSLCSVTNTSMMTSEKITVTTSTGSTLGNPGETSSVPVTGSLMPVTSAALVTVDPEGQSPATFSRTSTQDTTAFSKNHQTQSVETTRVSQINTLNTLTPVTTSTVLSSPSGFNPSGTVSQETFPSGETTISSPSSVSNTFLVTSKVFRMPISRDSTLGNTEETSLSVSGTISAITSKVSTIWWSDTLSTALSPSSLPPKISTAFHTQQSEGAETTGRPHERSSFSPGVSQEIFTLHETTTWPSSFSSKGHTTWSQTELPSTSTGAATRLVTGNPSTGTAGTIPRVPSKVSAIGEPGEPTTYSSHSTTLPKTTGAGAQTQWTQETGTTGEALLSSPSYSVTQMIKTATSPSSSPMLDRHTSQQITTAPSTNHSTIHSTSTSPQESPAVSQRGHTQAPQTTQESQTTRSVSPMTDTKTVTTPGSSFTASGHSPSEIVPQDAPTISAATTFAPAPTGDGHTTQAPTTALQAAPSSHDATLGPSGGTSLSKTGALTLANSVVSTPGGPEGQWTSASASTSPDTAAAMTHTHQAESTEASGQTQTSEPASSGSRTTSAGTATPSSSGASGTTPSGSEGISTSGETTRFSSNPSRDSHTTQSTTELLSASASHGAIPVSTGMASSIVPGTFHPTLSEASTAGRPTGQSSPTSPSASPQETAAISRMAQTQRTRTSRGSDTISLASQATDTFSTVPPTPPSITSTGLTSPQTQTHTLSPSGSGKTFTTALISNATPLPVTYASSASTGHTTPLHVTDASSVSTGHATPLPVTDTSSASTGHATPLPVTSPSSASTGHATPLPVTDTSSVSTGLFLSPALPQHPQVTPPLFLSPTLPQHPQVTLRRRGREFSSSSRPPL

SEQ ID NO: 1030122 - protein, 205 aa, Homo sapiens
LGTRQTLNYVSTGHATPLPVTDTSSVSTGHATPLPVTSLSSASTGDTTPLPVTDTSSASTGHATPLPVTSLSSVSTGDTTPLPVTDTSSASTGHATSLLVTDASSVSTGHATPLHVTDASSVSTGDTTPLPVTSPSSASTGDTTPLPVTDTSSVSTRRHHPSSCHRHFLSIHKPRHLSSCHRHFLSIHKPRHLSSCHRPFLSIHR

SEQ ID NO: 1030123 - protein, 182 aa, Homo sapiens
QTIGKAAKPEGPIDKIPQCPQVTPPLFLSPTLPQHPQVTPPLFLSPAFPQYPQVTPPLFLSPTLPQHPQVTPPLFLSPTLPQYPQVTPPLFMSPMLSSVSTGDTTPLPVTSPSSASTGDTTPLPVTDTSSVSTRRHHPSSCHRHFLSIHKPRHLSSCHRHFLSIHKPRHLSSCHRPFLSIHR

SEQ ID NO: 1030124 - protein, 109 aa, Homo sapiens
QTLNYVSTGHATPLPVTSLSSASTGDTTPLPVTDTSSASTGHATPLPVTSLSSVSTGDTTPLPVTDTSSASTATPLPVTDTSSASTGHATLLPVRTLHSAHSSASEQGS

SEQ ID NO: 1030125 - protein, 1356 aa, Homo sapiens; identical to SEQ ID NO: 1030108

SEQ ID NO: 1030126 - protein, 988 aa, Homo sapiens; identical to SEQ ID NO: 1030118

SEQ ID NO: 1030127 - protein, 988 aa, Homo sapiens; identical to SEQ ID NO: 1030118

SEQ ID NO: 1030128 - protein, 208 aa, Homo sapiens
MASKCPKCDKTVYFAEKVSSLGKDWHKFCLKCERCSKTLTPGGHAEHDGKPFCHKPCYATLFGPKGVNIGGAGSYIYEKPLAEGPQVTGPIEVPAARAEERKASGPPKGPSRASSVTTFTGEPNTCPRCSKKVYFAEKVTSLGKDWHRPCLRCERCGKTLTPGGHAEHDGQPYCHKPCYGILFGPKGVNTGAVGSYIYDRDPEGKVQP

SEQ ID NO: 1030129 - protein, 220 aa, Homo sapiens
GTRPRAKLARGTMASKCPKCDKTVYFAEKVSSLGKDWHKFCLKCERCSKTLTPGGHAEHDGKPFCHKPCYATLFGPKGVNIGGAGSYIYEKPLAEGPQVTGPIEVPAARAEERKASGPPKGPSRASSVTTFTGEPNTCPRCSKKVYFAEKVTSLGKDWHRPCLRCERCGKTLTPGGHAEHDGQPYCHKPCYGILFGPKGVNTGAVGSYIYDRDPEGKVQP

SEQ ID NO: 1030130 - protein, 320 aa, Homo sapiens
GRQVLERGQVLERWAGSSTGPFTAGTEGTNSDKPLVPLLKWLGSSGVPVLGGAETQRENRAWGDVAPPGLRRRGMGPPGGMEGACGDLLKVVDPRSCVGVVAASVGAEGVRGCAPCLTPLPPLPLQAEKVSSLGKDWHKFCLKCERCSKTLTPGGHAEHDGKPFCHKPCYATLFGPKGVNIGGAGSYIYEKPLAEGPQVTGPIEVPAARAEERKASGPPKGPSRASSVTTFTGEPNTCPRCSKKVYFAEKVTSLGKDWHRPCLRCERCGKTLTPGGHAEHDGQPYCHKPCYGILFGPKGVNTGAVGSYIYDRDPEGKVQP

SEQ ID NO: 1030131 - protein, 218 aa, Homo sapiens
GRQVLERGQVLERWAGSSTGPFTAAEKVSSLGKDWHKFCLKCERCSKTLTPGGHAEHDGKPFCHKPCYATLFGPKGVNIGGAGSYIYEKPLAEGPQVTGPIEVPAARAEERKASGPPKGPSRASSVTTFTGEPNTCPRCSKKVYFAEKVTSLGKDWHRPCLRCERCGKTLTPGGHAEHDGQPYCHKPCYGILFGPKGVNTGAVGSYIYDRDPEGKVQP

SEQ ID NO: 1030132 - protein, 306 aa, Homo sapiens
KLGTRDRRAGGAGRGRRRPGGERAEGAGRPGAPTMASKCPKCDKTVYFAEKVSSLGKDWHKFCLKCERCSKTLTPGGHAEHDGKPFCHKPCYATLFGPKGVNIGGAGSYIYEKPLAEGPQVTGPIEVPAARAEERKASGPPKGPSRASSVTTFTGEPNTCPRCSKKVYFAEKVTSLGKDWHRPCLRCERCGKTLTPGGHAEHDGQPYCHKPCYGILFGPKGVNTGAVGSYIYDRDPEGKVMMWAHLRPRPCRGPPAWLCWESAQPPSPACKPRASIGGGAATGRAPCCPSPSLWCVCPLWHPLGVP

SEQ ID NO: 1030133 - protein, 208 aa, Homo sapiens; identical to SEQ ID NO: 1030128

SEQ ID NO: 1030134 - protein, 308 aa, Homo sapiens
MEMAVAAGCVCKGGGCCHREPSQDHHESQEHRGPLVGSQTCLVHQAEGTAEKVSSLGKDWHKFCLKCERCSKTLTPGGHAEHDGKPFCHKPCYATLFGPKGVNIGGAGSYIYEKPLAEGPQVTGPIEVPAARAEERKASGPPKGPSRASSVTTFTGEPNTCPRCSKKVYFAEKVTSLGKDWHRPCLRCERCGKTLTPGGHAEHDGQPYCHKPCYGILFGPKGVNTGAVGSYIYDRDPEGKVGLMMWVTCAPDLQGAPAWLCWESAQPPSPACKPRASIGGGAATGRAPCCPSPSLWCVCPLWHPLGVP

SEQ ID NO: 1030135 - protein, 242 aa, Homo sapiens
KLGTRDRRAGGAGRGRRRPGGERAEGAGRPGAPTMASKCPKCDKTVYFAEKVSSLGKDWHKFCLKCERCSKTLTPGGHAEHDGKPFCHKPCYATLFGPKGVNIGGAGSYIYEKPLAEGPQVTGPIEVPAARAEERKASGPPKGPSRASSVTTFTGEPNTCPRCSKKVYFAEKVTSLGKDWHRPCLRCERCGKTLTPGGHAEHDGQPYCHKPCYGILFGPKGVNTGAVGSYIYDRDPEGKVQP

SEQ ID NO: 1030136 - protein, 281 aa, Homo sapiens
KLGTRDRRAGGAGRGRRRPGGERAEGAGRPGAPTMASKCPKCDKTVYFAEKVSSLGKDWHKFCLKCERCSKTLTPGGHAEHDGKPFCHKPCYATLFGPKGVNIGGAGSYIYEKPLAEGPQVTGPIEVPAARAEERKASGPPKGPSRASSVTTFTGEPNTCPRCSKKVYFAEKVTSLGKDWHRPCLRCERCGKTLTPGGHAEHDGQPYCHKPCYGILFGPKGVNTGAVGSYIHDPFCVCVSESPCDPVPAFSRRPCVSPWRCPLSLSCCPPTCQCYLCSLRG

SEQ ID NO: 1030137 - protein, 306 aa, Homo sapiens; identical to SEQ ID NO: 1030132

SEQ ID NO: 1030138 - protein, 80 aa, Homo sapiens
AWHEGQTGRRGWARAAAARRRTGGGRGPTGRTDHGLQMPQVRQDRVLRREGELPGEGLAQVLPQVRALQQDADARGPRRA

SEQ ID NO: 1030139 - protein, 128 aa, Homo sapiens
KLGTRDRRAGGAGRGRRRPGGERAEGAGRPGAPTMASKCPKCDKTVYFAEKVSSLGKDWHKFCLKCAVALSALPLLLPTHLPVLFMLPSWVMATPSPCPWQRASLRDPLPGAHTASQALATLTWLTCC

SEQ ID NO: 1030140 - protein, 186 aa, Homo sapiens
MASKCPKCDKTVYFAEKVSSLGKDWHKFCLKCERCSKTLTPGGHAEHDGKPFCHKPCYATLFGPKGELRLPSACPGTCWEGRGAGAGEGWGSRPPWIPAQSPCHPGKPSAPQSPAGRFLRCPVAAADNRKSDTVRHHRQHGVDEDKEDRRITIRETLNHSSHTAALTVNKTMQEQQRTENPRDDQP

SEQ ID NO: 1030141 - protein, 286 aa, Homo sapiens
KLGTRDRRAGGAGRGRRRPGGERAEGAGRPGAPTMASKCPKCDKTVYFAEKVSSLGKDWHKFCLKCERCSKTLTPGGHAEHDGKPFCHKPCYATLFGPKGKAVNIGGAGSYIYEKAPGGGGPARSTGPPFGGPPAGPRAEGKPGKGAKAGPPRKGAPGQKALPRCSPPTFHRGEGPQTRFAPGPWKHRKRGSLPGVNTRDEPSLYGGQGILAARGPGALGLVADGPPFARGKETPVSPPRGAALPRESGALSFPRRVGFTPPGLRGWGTSHLFFMTRGNPPMGTGV

SEQ ID NO: 1030142 - protein, 243 aa, Homo sapiens
MEMAVAAGCVCKGGGCCHREPSQDHHESQEHRGPLVGSQTCLVHQAEGTAEKVSSLGKDWHKFCLKCERCSKTLTPGGHAEHDGKPFCHKPCYATLFGPKGVNIGGAGSYIYEKPLAEGPQVTGPIEVPAARAEERKASGPPKGPSRASSVTTFTGEPNTCPRCSKKVYFAEKVTSLGKDWHRPCLRCERCGKTLTPGGHAEHDGQPYCHKPCYGILFGPKGVNTGAVGSYIYDRDPEGKVQP

SEQ ID NO: 1030143 - protein, 243 aa, Homo sapiens; identical to SEQ ID NO: 1030142

SEQ ID NO: 1030144 - protein, 272 aa, Homo sapiens
KLGTRDRRAGGAGRGRRRPGGERAEGAGRPGAPTMASKCPKCDKTVYFAEKVSSLGKDWHKFCLKCERCSKTLTPGGHAEVSPTARRGRGRGSRLPPPSGRVLTRAPLQQHDGKPFCHKPCYATLFGPKGVNIGGAGSYIYEKPLAEGPQVTGPIEVPAARAEERKASGPPKGPSRASSVTTFTGEPNTCPRCSKKVYFAEKVTSLGKDWHRPCLRCERCGKTLTPGGHAEHDGQPYCHKPCYGILFGPKGVNTGAVGSYIYDRDPEGKVQP

SEQ ID NO: 1030145 - protein, 242 aa, Homo sapiens
KLGTRDRRAGGAGRGRRRPGGERAEGAGRPGAPTMASKCPKCDKTVYFAEKVSSLGKDWHKFCLKCERCSKTLTPGGHAEHDGKPFCHKPCYATLFGPKGVNIGGAGSYIYEKPLAEGPQVTGPIEVPAARAEERKASGPPKGPSRASSVTTFTGEPNTCPRCSKKVYFAEKVTSLGKDWHRPCLRCERCGKTLTPGGHAEHDGQPYCHKPCYGILFGPKGVNTGAVGSYIYDRDPEGKVVS

SEQ ID NO: 1030146 - protein, 146 aa, Homo sapiens
VLLGAACPLPHGEPACTFWKPPGDGSGESVDSSLSTHLLPQHDGQPYCHKPCYGILFGPKGVNTGAVGSYIYDRDPEGKVMMWAHLRPRPCRGPPAWLCWESAQPPSPACKPRASIGGGAATGRAPCCPSPSLWCVCPLWHPLGVP

SEQ ID NO: 1030147 - protein, 273 aa, Homo sapiens
KLGTRDRRAGGAGRGRRRPGGERAEGAGRPGAPTMASKCPKCDKTVYFAEKVSSLGKDWHKFCLKCERCSKTLTPGGHAEHDGKPFCHKPCYATLFGPKGVNIGGAGSYIYEKPLAEGPQVTGPIEVPAARAEERKASGPPKGPSRASSVTTFTGEPNTCPRCSKKVYFAEKVTSLGKDWHRPCLRCERCGKTLTPGGHAEHDGQPYCHKPCYGILFGPKGVNTHLPVLFMLPSWVMATPSPCPWQRASLRDPLPGAHTASQALATLTWLTCC

SEQ ID NO: 1030148 - protein, 242 aa, Homo sapiens; identical to SEQ ID NO: 1030135

SEQ ID NO: 1030149 - protein, 196 aa, Homo sapiens
KLGTRDRRAGGAGRGRRRPGGERAEGAGRPGAPTMASKCPKCDKTVYFAEKVSSLGKDWHKFCLKCERCSKTLTPGGHAEHDGKPFCHKPCYATLFGPKGVNIGGAGSYIYEKPLAEGPQVTGPIEVPAARAEERKASGPPKGPSRASSVTTFTGEPNTCPRCSKKVYFAEKVTSLGKDWHRPCQALATLTWLTCC

SEQ ID NO: 1030150 - protein, 150 aa, Homo sapiens
MASKCPKCDKTVYFAEKVSSLGKDWHKFCLKCERCSKTLTPGGHAEHDGKPFCHKPCYATLFGPKGELRLPSACPGTCWEGRGAGAGEGWGSRPPWIPAQSPCHPLGKAKVPHPRSPMRGRLFLKNRAGWHLRAGDQDRENRQEDDVRDK

SEQ ID NO: 1030151 - protein, 208 aa, Homo sapiens; identical to SEQ ID NO: 1030128

SEQ ID NO: 1030152 - protein, 208 aa, Homo sapiens; identical to SEQ ID NO: 1030128

SEQ ID NO: 1030153 - protein, 698 aa, Homo sapiens
MVEPGQDLLLAALSESGISPNDLFDIDGGDAGLATPMPTPSVQQSVPLSALELGLETEAAVPVKQEPETVPTPALLNVRQQPPSTTTFVLNQINHLPPLGSTIVMTKTPPVTTNRQTITLTKFIQTTASTRPSVSAPTVRNAMTSAPSKDQVQLKDLLKNNSLNELMKLKPPANIAQPVATAATDVSNGTVKKESSNKEGARMWINDMKMRSFSPTMKVPVVKEDDEPEEEDEEEMGHAETYAEYMPIKLKIGLRHPDAVVETSSLSSVTPPDVWYKTSISEETIDNGWLSALQLEAITYAAQQHETFLPNGDRAGFLIGDGAGVGKGRTIAGIIYENYLLSRKRALWFSVSNDLKYDAERDLRDIGAKNILVHSLNKFKYGKISSKHNGSVKKGVIFATYSSLIGESQSGGKYKTRLKQLLHWCGDDFDGVIVFDECHKAKNLCPVGSSKPTKTGLAVLELQNKLPKARVVYASATGASEPRNMAYMNRLGIWGEGTPFREFSDFIQAVERRGVGAMEIVAMDMKLRGMYIARQLSFTGVTFKIEEVLLSQSYVKMYNKAVKLWVIARERFQQAADLIDAEQRMKKSMWGQFWSAHQRFFKYLCIASKVKRVVQLAREEIKNGKCVVIGLQSTGEARTLEALEEGGGELNDFVSTAKGVLQSLIEKHFPAPDRKKLYSLLGIDLTAPSKNSSPRDSL

SEQ ID NO: 1030154 - protein, 658 aa, Homo sapiens
MVEPGQDLLLAALSESGISPNDLFDIDGGDAGLATPMPTPSVQQSVPLSALELGLETEAAVPVKQEPETVPTPALLNVRQQPPSTTTFVLNQINHLPPLGSTIVMTKTPPVTTNRQTITLTKFIQTTASTRPSVSAPTVRNAMTSAPSKDQVQLKDLLKNNSLNELMKLKPPANIAQPVATAATDVSNGTVKKESSNKEGARMWINDMKMRSFSPTMKVPVVKEDDEPEEEDEEEMGHAETYAEYMPIKLKIGLRHPDAVVETSSLSSVTPPDVWYKTSISEETIDNGWLSALQLEAITYAAQQHETFLPNGDRAGFLIGDGAGVGKGRTIAGIIYENYLLSRKRALWFSVSNDLKYDAERDLRDIGAKNILVHSLNKFKYGKISSKHNGSVKKGVIFATYSSLIGESQSGGKYKTRLKQLLHWCGDDFDGVIVFDECHKAKNLCPVGSSKPTKTGLAVLELQNKLPKARVVYASATGASEPRNMAYMNRLGIWGEGTPFREFSDFIQAVERRGVGAMEIVAMDMKLRGMYIARQLSFTGVTFKIEEVLLSQSYVKMYNKAVKLWVIARERFQQAADLIDAEQRMKKSMWGQFWSAHQRFFKYLCIASKVKRVVQLAREEIKNGKCVVIGLQSTGEARTLEALEEGGGELNDFVSTAK

SEQ ID NO: 1030155 - protein, 698 aa, Homo sapiens; identical to SEQ ID NO: 1030153

SEQ ID NO: 1030156 - protein, 74 aa, Homo sapiens
DTMISGLWIQILDGRGGWIHNAAATVHSNPRWLRRGISPFTSTRSPLLGMSKCVCECVYTYMCTHCLHTNHLDL

SEQ ID NO: 1030157 - protein, 123 aa, Homo sapiens
GSPGLQARAEFGTRKPVSTKRDAQCPTGQDGKPSLGPLCAHSSGLPSFLWASHHPTLVSLSCLVLRTQEGPGWGPACVYPRLLSSQQAPGKEASHCCCYRFSTPTLTDAQIPVVRHRRHTHTS

SEQ ID NO: 1030158 - protein, 123 aa, Homo sapiens; identical to SEQ ID NO: 1030157

SEQ ID NO: 1030159 - protein, 123 aa, Homo sapiens; identical to SEQ ID NO: 1030157

SEQ ID NO: 1030160 - protein, 646 aa, Homo sapiens
MSTENVEGKPSNLGERGRARSSTFLRVVQPMFNHSIFTSAVSPAAERIRFILGEEDDSPAPPQLFTELDELLAVDGQEMEWKETARWIKFEEKVEQGGERWSKPHVATLSLHSLFELRTCMEKGSIMLDREASSLPQLVEMIVDHQIETGLLKPELKDKVTYTLLRKHRHQTKKSNLRSLADIGKTVSSASRMFTNPDNGSPAMTHRNLTSSSLNDISDKPEKDQLKNKFMKKLPRDAEASNVLVGEVDFLDTPFIAFVRLQQAVMLGALTEVPVPTRFLFILLGPKGKAKSYHEIGRAIATLMSDEVFHDIAYKAKDRHDLIAGIDEFLDEVIVLPPGEWDPAIRIEPPKSLPSSDKRKNMYSGGENVQMNGDTPHDGGHGGGGHGDCEELQRTGRFCGGLIKDIKRKAPFFASDFYDALNIQALSAILFIYLATVTNAITFGGLLGDATDNMQGVLESFLGTAVSGAIFCLFAGQPLTILSSTGPVLVFERLLFNFSKDNNFDYLEFRLWIGLWSAFLCLILVATDASFLVQYFTRFTEEGFSSLISFIFIYDAFKKMIKLADYYPINSNFKVGYNTLFSCTCVPPDPGEGITLCVYARFVFGGRCRLHACKFSTCCHGPQELVLFFSLKNSATEFDVSLPEVF

SEQ ID NO: 1030161 - protein, 439 aa, Homo sapiens
  misc_feature (18)..(18): Xaa can be any naturally occurring amino acid
EEVEGHHTIYIGVHVPKXYRRRRRHKRKTGHKEKKEKERISENYSDKSDIENADESSSSILKPLISPAAERIRFILGEEDDSPAPPQLFTELDELLAVDGQEMEWKETARWIKFEEKVEQGGERWSKPHVATLSLHSLFELRTCMEKGSIMLDREASSLPQLVEMIVDHQIETGLLKPELKDKVTYTLLRKHRHQTKKSNLRSLADIGKTVSSASRMFTNPDNGSPAMTHRNLTSSSLNDISDKPEKDQLKNKFMKKLPRDAEASNVLVGEVDFLDTPFIAFVRLQQAVMLGALTEVPVPTRFLFILLGPKGKAKSYHEIGRAIATLMSDEVFHDIAYKAKDRHDLIAGIDEFLDEVIVLPPGEWDPAIRIEPPKSLPSSDKRKNMYSGGENVQMNGDTPHDGGHGGGGHGDCEELQRTGRFCGGLIKDIKRESAIFCQ

SEQ ID NO: 1030162 - protein, 422 aa, Homo sapiens
VDGDSPTAGVWRVSWALLSLEPSFDFLDTPFIAFVRLQQAVMLGALTEVPVPTRFLFILLGPKGKAKSYHEIGRAIATLMSDEVFHDIAYKAKDRHDLIAGIDEFLDEVIVLPPGEWDPAIRIEPPKSLPSSDKRKNMYSGGENVQMNGDTPHDGGHGGGGHGDCEELQRTGRFCGGLIKDIKRKAPFFASDFYDALNIQALSAILFIYLATVTNAITFGGLLGDATDNMQGVLESFLGTAVSGAIFCLFAGQPLTILSSTGPVLVFERLLFNFSKDNNFDYLEFRLWIGLWSAFLCLILVATDASFLVQYFTRFTEEGFSSLISFIFIYDAFKKMIKLADYYPINSNFKVGYNTLFSCTCVPPDPGEGITLCVYARFVFGGRCRLHACKFSTCCHGPQELVLFFSLKNSATEFDVSLPEVF

SEQ ID NO: 1030163 - protein, 1172 aa, Homo sapiens
MVWRLVLLALWVWPSTQAGHQDKDTTFDLFSISNINRKTIGAKQFRGPDPGVPAYRFVRFDYIPPVNADDLSKITKIMRQKEGFFLTAQLKQDGKSRGTLLALEGPGLSQRQFEIVSNGPADTLDLTYWIDGTRHVVSLEDVGLADSQWKNVTVQVAGETYSLHVGCDLIGPVALDEPFYEHLQAEKSRMYVAKGSARESHFRGLLQNVHLVFENSVEDILSKKGCQQGQGAEINAISENTETLRLGPHVTTEYVGPSSERRPEVCERSCEELGNMVQELSGLHVLVNQLSENLKRVSNDNQFLWELIGGPPKTRNMSACWQDGRFFAENETWVVDSCTTCTCKKFKTICHQITCPPATCASPSFVEGECCPSCLHSVDGEEGWSPWAEWTQCSVTCGSGTQQRGRSCDVTSNTCLGPSIQTRACSLSKCDTRIRQDGGWSHWSPWSSCSVTCGVGNITRIRLCNSPVPQMGGKNCKGSGRETKACQGAPCPIDGRWSPWSPWSACTVTCAGGIRERTRVCNSPEPQYGGKACVGDVQERQMCNKRSCPVDGCLSNPCFPGAQCSSFPDGSWSCGFCPVGFLGNGTHCEDLDECALVPDICFSTSKVPRCVNTQPGFHCLPCPPRYRGNQPVGVGLEAAKTEKQVCEPENPCKDKTHNCHKHAECIYLGHFSDPMYKCECQTGYAGDGLICGEDSDLDGWPNLNLVCATNATYHCIKDNCPHLPNSGQEDFDKDGIGDACDDDDDNDGVTDEKDNCQLLFNPRQADYDKDEVGDRCDNCPYVHNPAQIDTDNNGEGDACSVDIDGDDVFNERDNCPYVYNTDQRDTDGDGVGDHCDNCPLVHNPDQTDVDNDLVGDQCDNNEDIDDDGHQNNQDNCPYISNANQADHDRDGQGDACDPDDDNDGVPDDRDNCRLVFNPDQEDLDGDGRGDICKDDFDNDNIPDIDDVCPENNAISETDFRNFQMVPLDPKGTTQIDPNWVIRHQGKELVQTANSDPGIAVGFDEFGSVDFSGTFYVNTDRDDDYAGFVFGYQSSSRFYVVMWKQVTQTYWEDQPTRAYGYSGVSLKVVNSTTGTGEHLRNALWHTGNTPGQVRTLWHDPRNIGWKDYTAYRWHLTHRPKTGYIRVLVHEGKQVMADSGPIYDQTYAGGRLGLFVFSQEMVYFSDLKYECRDI

SEQ ID NO: 1030164 - protein, 315 aa, Homo sapiens
GGDGIQYRGAGLGPLQQPCTGEAAYKAALPGSRSATSTGASCTAGPVSRSSRACAFLTRSGTLKPVITASFWQTRSSAAGGRMVWRLVLLALWVWPSTQAGHQDKDTTFDLFSISNINRKTIGAKQFRGPDPGVPAYRFVRFDYIPPVNADDLSKITKIMRQKEGFFLTAQLKQDGKSRGTLLALEGPGLSQRQFEIVSNGPADTLDLTYWIDGTRHVVSLEDVGLADSQWKNVTVQVAGETYSLHVGCDLIDSFALDEPFYEHLQAEKSRMYVAKGSARESHFRGLLQNVHLVFENSVEDILSKKGCQQGQGGR

SEQ ID NO: 1030165 - protein, 143 aa, Homo sapiens
QGTPLTGKYPSEAAQPDLSLLLVLVRQDGGWSHWSPWSSCSVTCGVGNITRIRLCNSPVPQMGGKNCKGSGRETKACQGAPCPIDGRWSPWSPWSACTVTCAGGIRERTRVCNSPEPQYGGKACVGDVQERQMCNKRSCPVGE

SEQ ID NO: 1030166 - protein, 1256 aa, Homo sapiens
GGDGIQYRGAGLGPLQQPCTGEAAYKAALPGSRSATSTGASCTAGPVSRSSRACAFLTRSGTLKPVITASFWQTRSSAAGGRMVWRLVLLALWVWPSTQAGHQDKDTTFDLFSISNINRKTIGAKQFRGPDPGVPAYRFVRFDYIPPVNADDLSKITKIMRQKEGFFLTAQLKQDGKSRGTLLALEGPGLSQRQFEIVSNGPADTLDLTYWIDGTRHVVSLEDVGLADSQWKNVTVQVAGETYSLHVGCDLIDSFALDEPFYEHLQAEKSRMYVAKGSARESHFRGLLQNVHLVFENSVEDILSKKGCQQGQGAEINAISENTETLRLGPHVTTEYVGPSSERRPEVCERSCEELGNMVQELSGLHVLVNQLSENLKRVSNDNQFLWELIGGPPKTRNMSACWQDGRFFAENETWVVDSCTTCTCKKFKTICHQITCPPATCASPSFVEGECCPSCLHSVDGEEGWSPWAEWTQCSVTCGSGTQQRGRSCDVTSNTCLGPSIQTRACSLSKCDTRIRQDGGWSHWSPWSSCSVTCGVGNITRIRLCNSPVPQMGGKNCKGSGRETKACQGAPCPIDGRWSPWSPWSACTVTCAGGIRERTRVCNSPEPQYGGKACVGDVQERQMCNKRSCPVDGCLSNPCFPGAQCSSFPDGSWSCGFCPVGFLGNGTHCEDLDECALVPDICFSTSKVPRCVNTQPGFHCLPCPPRYRGNQPVGVGLEAAKTEKQVCEPENPCKDKTHNCHKHAECIYLGHFSDPMYKCECQTGYAGDGLICGEDSDLDGWPNLNLVCATNATYHCIKDNCPHLPNSGQEDFDKDGIGDACDDDDDNDGVTDEKDNCQLLFNPRQADYDKDEVGDRCDNCPYVHNPAQIDTDNNGEGDACSVDIDGDDVFNERDNCPYVYNTDQRDTDGDGVGDHCDNCPLVHNPDQTDVDNDLVGDQCDNNEDIDDDGHQNNQDNCPYISNANQADHDRDGQGDACDPDDDNDGVPDDRDNCRLVFNPDQEDLDGDGRGDICKDDFDNDNIPDIDDVCPENNAISETDFRNFQMVPLDPKGTTQIDPNWVIRHQGKELVQTANSDPGIAVGFDEFGSVDFSGTFYVNTDRDDDYAGFVFGYQSSSRFYVVMWKQVTQTYWEDQPTRAYGYSGVSLKVVNSTTGTGEHLRNALWHTGNTPGQVRTLWHDPRNIGWKDYTAYRWHLTHRPKTGYIRVLVHEGKQVMADSGPIYDQTYAGGRLGLFVFSQEMVYFSDLKYECTEMNI

SEQ ID NO: 1030167 - protein, 305 aa, Homo sapiens
GGDGIQYRGAGLGPLQQPCTGEAAYKAALPGSRSATSTGASCTAGPVSRSSRACAFLTRSGTLKPVITASFWQTRSSAAGGRMVWRLVLLALWVWPSTQAGHQDKDTTFDLFSISNINRKTIGAKQFRGPDPGVPAYRFVRFDYIPPVNADDLSKITKIMRQKEGFFLTAQLKQDGKSRGTLLALEGPGLSQRQFEIVSNGPADTLDLTYWIDGTRHVVSLEDVGLADSQWKNVTVQVAGETYSLHVGCDLIDSFALDEPFYEHLQAEKSRMYVAKGSARESHFRVRSAGRWPPVRGGKELKLGT

SEQ ID NO: 1030168 - protein, 1254 aa, Homo sapiens
GGDGIQYRGAGLGPLQQPCTGEAAYKAALPGSRSATSTGASCTAGPVSRSSRACAFLTRSGTLKPVITASFWQTRSSAAGGRMVWRLVLLALWVWPSTQAGHQDKDTTFDLFSISNINRKTIGAKQFRGPDPGVPAYRFVRFDYIPPVNADDLSKITKIMRQKEGFFLTAQLKQDGKSRGTLLALEGPGLSQRQFEIVSNGPADTLDLTYWIDGTRHVVSLEDVGLADSQWKNVTVQVAGETYSLHVGCDLIDSFALDEPFYEHLQAEKSRMYVAKGSARESHFRGLLQNVHLVFENSVEDILSKKGCQQGQGAEINAISENTETLRLGPHVTTEYVGPSSERRPEVCERSCEELGNMVQELSGLHVLVNQLSENLKRVSNDNQFLWELIGGPPKTRNMSACWQDGRFFAENETWVVDSCTTCTCKKFKTICHQITCPPATCASPSFVEGECCPSCLHSVDGEEGWSPWAEWTQCSVTCGSGTQQRGRSCDVTSNTCLGPSIQTRACSLSKCDTRIRQDGGWSHWSPWSSCSVTCGVGNITRIRLCNSPVPQMGGKNCKGSGRETKACQGAPCPIDGRWSPWSPWSACTVTCAGGIRERTRVCNSPEPQYGGKACVGDVQERQMCNKRSCPVDGCLSNPCFPGAQCSSFPDGSWSCGFCPVGFLGNGTHCEDLDECALVPDICFSTSKVPRCVNTQPGFHCLPCPPRYRGNQPVGVGLEAAKTEKQVCEPENPCKDKTHNCHKHAECIYLGHFSDPMYKCECQTGYAGDGLICGEDSDLDGWPNLNLVCATNATYHCIKDNCPHLPNSGQEDFDKDGIGDACDDDDDNDGVTDEKDNCQLLFNPRQADYDKDEVGDRCDNCPYVHNPAQIDTDNNGEGDACSVDIDGDDVFNERDNCPYVYNTDQRDTDGDGVGDHCDNCPLVHNPDQTDVDNDLVGDQCDNNEDIDDDGHQNNQDNCPYISNANQADHDRDGQGDACDPDDDNDGVPDDRDNCRLVFNPDQEDLDGDGRGDICKDDFDNDNIPDIDDVCPENNAISETDFRNFQMVPLDPKGTTQIDPNWVIRHQGKELVQTANSDPGIAVGFDEFGSVDFSGTFYVNTDRDDDYAGFVFGYQSSSRFYVVMWKQVTQTYWEDQPTRAYGYSGVSLKVVNSTTGTGEHLRNALWHTGNTPGQVRTLWHDPRNIGWKDYTAYRWHLTHRPKTGYIRVLVHEGKQVMADSGPIYDQTYAGGRLGLFVFSQEMVYFSDLKYECRDI

SEQ ID NO: 1030169 - protein, 89 aa, Homo sapiens
GGDGIQYRGAGLGPLQQPCTGEAAYKAALPGSRSATSTGASCTAGPVSRSSRACAFLTRSGTLKPVITASFWQTRYDYFLNSINYLMVL

SEQ ID NO: 1030170 - protein, 503 aa, Homo sapiens
MPGQRGERGMPGLPGPAGTPGKVGPTGATGDKGPPGPVGPPGSNGPVGEPGPEGPAGNDGTPGRDGAVGERGDRGDPGPAGLPGSQGAPGTPGPVGAPGDAGQRGDPGSRGPIGHLVELGNVDYLDPKDLVVTKVIMETEATEVRRATEALLVFRVFLALLVQMVNKEVLESLDHLAQEVLQAQLVLQVKKETLGHLGQLDLQVYEAVVGEAGPEGPPGEPGPPGPPGPPGHLTAALGDIMGHYDESMPDPLPEFTEDQAAPDDKNKTDPGVHATLKSLSSQIETMRSPDGSKKHPARTCDDLKLCHSAKQSGEYWIDPNQGSVEDAIKVYCNMETGETCISANPSSVPRKTWWASKSPDNKPVWYGLDMNRGSQFAYGDHQSPNTAITQMTFLRLLSKEASQNITYICKNSVGYMDDQAKNLKKAVVLKGANDLDIKAEGNIRFRYIVLQDTCSKRNGNVGKTVFEYRTQNVARLPIIDLAPVDVGGTDQEFGVEIGPVCFV

SEQ ID NO: 1030171 - protein, 1340 aa, Homo sapiens
PQGIDGEPGVPGQPGAPGPPGHPSHPGPDGLSRPFSAQMAGLDEKSGLGSQVGLMPGSVGPVGPRGPQGLQGQQGGAGPTGPPGEPGDPGPMGPIGSRGPEGPPGKPGEDGEPGRNGNPGEVGFAGSPGARGFPGAPGLPGLKGHRGHKGLEGPKGEVGAPGSKGEAGPTGPMGAMGPLGPRGMPGERGRLGPQGAPGQRGAHGMPGKPGPMGPLGIPGSSGFPGNPGMKGEAGPTGARGPEGPQGQRGETGPPGPVGSPGLPGAIGTDGTPGPKGPTGSPGTSGPPGSAGPPGSPGPQGSTGPQGNSGLPGDPGFKGEAGPKGEPGPHGIQGPIGPPGEEGKRGPRGDPGTLGPPGPVGERGAPGNRGFPGSDGLPGPKGAQGERGPVGSSGPKGSQGDPGRPGEPGLPGARGLTGNPGVQGPEGKLGPLGAPGEDGRPGPPGSIGIKGQPGTMGLPGPKGSNGDPGKPGEAGNPGVPGQRGAPGKDGKVGPYGPPGPPGLRGERGEQGPPGPTGFQGHPGPPGPPGEGGKPGDQGVPGGPGAVGPLGPRGERGNPGERGEPGITGLPGEKGMAGGHGPDGPKGSPGPSGTPGDTGPPGLQGMPGERGIAGTPGPKGDRGGIGEKGAEGTAGNDGAGGLPGPLGPPGPAGLLGEKGEPGPRGLVGPPGSRGNPGSRGENGPTGAVGFAGPQGSDGQPGVKGEPGEPGQKGDAGSPGPQGLAGSPGPHGPNGVPGLKGGRGTQGPPGATGFPGSAGRVGPPGPAGAPGPAGPLGEPGKEGPPGPRGDPGSHGRVGDRGPAGPPGGPGDKGDPGEDGQPGPDGPPGPAGTTGQRGIVGMPGQRGERGMPGLPGPAGTPGKVGPTGATGDKGPPGPVGPPGSNGPVGEPGPEGPAGNDGTPGRDGAVGERGDRGDPGPAGLPGSQGAPGTPGPVGAPGDAGQRGDPGSRGPIGHLVELGNVDYLDPKDLVVTKVIMETEATEVRRATEALLVFRVFLALLVQMVNKEVLESLDHLAQEVLQAQLVLQVKKETLGHLGQLDLQVYEAVVGEAGPEGPPGEPGPPGPPGPPGHLTAALGDIMGHYDESMPDPLPEFTEDQAAPDDKNKTDPGVHATLKSLSSQIETMRSPDGSKKHPARTCDDLKLCHSAKQSGEYWIDPNQGSVEDAIKVYCNMETGETCISANPSSVPRKTWWASKSPDNKPVWYGLDMNRGSQFAYGDHQSPNTAITQMTFLRLLSKEASQNITYICKNSVGYMDDQAKNLKKAVVLKGANDLDIKAEGNIRFRYIVLQDTCSKRNGNVGKTVFEYRTQNVARLPIIDLAPVDVGGTDQEFGVEIGPVCFV

SEQ ID NO: 1030172 - protein, 1340 aa, Homo sapiens; identical to SEQ ID NO: 1030171

SEQ ID NO: 1030173 - protein, 78 aa, Homo sapiens
PGPINVGIDSWPGTDTDPKSAHIVLQDTCSKRNGNVGKTVFEYRTQNVARLPIIDLAPVDVGGTDQEFGVEIGPVCFV

SEQ ID NO: 1030174 - protein, 1340 aa, Homo sapiens; identical to SEQ ID NO: 1030171

SEQ ID NO: 1030175 - protein, 1340 aa, Homo sapiens; identical to SEQ ID NO: 1030171

SEQ ID NO: 1030176 - protein, 1340 aa, Homo sapiens; identical to SEQ ID NO: 1030171

SEQ ID NO: 1030177 - protein, 1340 aa, Homo sapiens; identical to SEQ ID NO: 1030171

SEQ ID NO: 1030178 - protein, 1340 aa, Homo sapiens; identical to SEQ ID NO: 1030171

SEQ ID NO: 1030179 - protein, 1340 aa, Homo sapiens; identical to SEQ ID NO: 1030171

SEQ ID NO: 1030180 - protein, 693 aa, Homo sapiens
MDRPDEGPPAKTRRLSSSESPQRDPPPPPPPPPLLRLPLPPPQQRPRLQEETEAAQVLADMRGVGLGPALPPPPPYVILEEGGIRAYFTLGAECPGWDSTIESGYGEAPPPTESLEALPTPEASGGSLEIDFQVVQSSSFGGEGALETCSAVGWAPQRLVDPKSKEEAIIIVEDEDEDERESMRSSRRRRRRRRRKQRKVKRESRERNAERMESILQALEDIQLDLEAVNIKAGKAFLRLKRKFIQMRRPFLERRDLIIQHIPGFWVKAFLNHPRISILINRRDEDIFRYLTNLQVQDLRHISMGYKMKLYFQTNPYFTNMVIVKEFQRNRSGRLVSHSTPIRWHRGQEPQARRHGNQDASHSFFSWFSNHSLPEADRIAEIIKNDLWVNPLRYYLRERGSRIKRKKQEMKKRKTRGRCEVVIMEDAPDYYAVEDIFSEISDIDETIHDIKISDFMETTDYFETTDNEITDINENICDSENPDHNEVPNNETTDNNESADDHETTDNNESADDNNENPEDNNKNTDDNEENPNNNENTYGNNFFKGGFWGSHGNNQDSSDSDNEADEASDDEDNDGNEGDNEGSDDDGNEGDNEGSDDDDRDIEYYEKVIEDFDKDQADYEDVIEIISDESVEEEGIEEGIQQDEDIYEEGNYEEEGSEDVWEEGEDSDDSDLEDVLQVPNGWANPGKRGKTG

SEQ ID NO: 1030181 - protein, 698 aa, Homo sapiens
MDRPDEGPPAKTRRLSSSESPQRDPPPPPPPPPLLRLPLPPPQQRPRLQEETEAAQVLADMRGVGLGPALPPPPPYVILEEGGIRAYFTLGAECPGWDSTIESGYGEAPPPTESLEALPTPEASGGSLEIDFQVVQSSSFGGEGALETCSAVGWAPQRLVDPKSKEEAIIIVEDEDEDERESMRSSRRRRRRRRRKQRKVKRESRERNAERMESILQALEDIQLDLEAVNIKAGKAFLRLKRKFIQMRRPFLERRDLIIQHIPGFWVKAFLNHPRISILINRRDEDIFRYLTNLQVQDLRHISMGYKMKLYFQTNPYFTNMVIVKEFQRNRSGRLVSHSTPIRWHRGQEPQARRHGNQDASHSFFSWFSNHSLPEADRIAEIIKNDLWVNPLRYYLRERGSRIKRKKQEMKKRKTRGRCEVVIMEDAPDYYAVEDIFSEISDIDETIHDIKISDFMETTDYFETTDNEITDINENICDSENPDHNEVPNNETTDNNESADDHETTDNNESADDNNENPEDNNKNTDDNEENPNNNENTYGNNFFKGGFWGSHGNNQDSSDSDNEADEASDDEDNDGNEGDNEGSDDDGNEGDNEGSDDDDRDIEYYEKVIEDFDKDQADYEDVIEIISDESVEEEGIEEGIQQDEDIYEEGNYEEEGSEDVWEEGEDSDDSDLETAHPEEGKPDKILPPTIPFALLLS

SEQ ID NO: 1030182 - protein, 315 aa, Homo sapiens
LEDPLCLIVRVLFVVISVLVIVSRIKRKKQEMKKRKTRGRCEVVIMEDAPDYYAVEDIFSEISDIDETIHDIKISDFMETTDYFETTDNEITDINENICDSENPDHNEVPNNETTDNNESADDHETTDNNESADDNNENPEDNNKNTDDNEENPNNNENTYGNNFFKGGFWGSHGNNQDSSDSDNEADEASDDEDNDGNEGDNEGSDDDGNEGDNEGSDDDDRDIEYYEKVIEDFDKDQADYEDVIEIISDESVEEEGIEEGIQQDEDIYEEGNYEEEGSEDVWEEGEDSDDSDLEDVLQVPNGWANPGKRGKTG

SEQ ID NO: 1030183 - protein, 252 aa, Homo sapiens
IESSWLPYIRVPLTSGDTDYFETTDNEITDINENICDSENPDHNEVPNNETTDNNESADDHETTDNNESADDNNENPEDNNKNTDDNEENPNNNENTYGNNFFKGGFWGSHGNNQDSSDSDNEADEASDDEDNDGNEGDNEGSDDDGNEGDNEGSDDDDRDIEYYEKVIEDFDKDQADYEDVIEIISDESVEEEGIEEGIQQDEDIYEEGNYEEEGSEDVWEEGEDSDDSDLEDVLQVPNGWANPGKRGKTG

SEQ ID NO: 1030184 - protein, 622 aa, Homo sapiens
MDRPDEGPPAKTRRLSSSESPQRDPPPPPPPPPLLRLPLPPPQQRPRLQEETEAAQVLADMRGVGLGPALPPPPPYVILEEGGIRAYFTLGAECPGWDSTIESGYGEAPPPTESLEALPTPEASGGSLEIDFQVVQSSSFGGEGALETCSAVGWAPQRLVDPKSKEEAIIIVEDEDEDERESMRSSRRRRRRRRRKQRKVKRESRERNAERMESILQALEDIQLDLEAVNIKAGKAFLRLKRKFIQMRRPFLERRDLIIQHIPGFWVKAFLNHPRISILINRRDEDIFRYLTNLQVQDLRHISMGYKMKLYFQTNPYFTNMVIVKEFQRNRSGRLVSHSTPIRWHRGQEPQARRHGNQDASHSFFSWFSNHSLPEADRIAEIIKNDLWVNPLRYYLRERGSRIKRKKQEMKKRKTRGRCEVVIMEDAPDYYAVEDIFSEISDIDETIHDIKISDFMETTDYFETTDNEITDINENICDSENPDHNEVPNNETTDNNESADDHETTDNNESADDNNENPEDNNKNTDDNEENPNNNENTYGNNFFKGGFWGSHGNNQDSSDSDNEADEASDDEDNDGNEGDNEGSDDDGNEGDNEGSDDDDRDIEYYEKVIEDLTRISFSGDR

SEQ ID NO: 1030185 - protein, 546 aa, Homo sapiens
SPLLRRGGLSWKPWGQMAGIEGHAVEDEDEDERESMRSSRRRRRRRRRKQRKVKRESRERNAERMESILQALEDIQLDLEAVNIKAGKAFLRLKRKFIQMRRPFLERRDLIIQHIPGFWVKAFLNHPRISILINRRDEDIFRYLTNLQVQDLRHISMGYKMKLYFQTNPYFTNMVIVKEFQRNRSGRLVSHSTPIRWHRGQEPQARRHGNQDASHSFFSWFSNHSLPEADRIAEIIKNDLWVNPLRYYLRERGSRIKRKKQEMKKRKTRGRCEVVIMEDAPDYYAVEDIFSEISDIDETIHDIKISDFMETTDYFETTDNEITDINENICDSENPDHNEVPNNETTDNNESADDHETTDNNESADDNNENPEDNNKNTDDNEENPNNNENTYGNNFFKGGFWGSHGNNQDSSDSDNEADEASDDEDNDGNEGDNEGSDDDGNEGDNEGSDDDDRDIEYYEKVIEDFDKDQADYEDVIEIISDESVEEEGIEEGIQQDEDIYEEGNYEEEGSEDVWEEGEDSDDSDLEDVLQVPNGWANPGKRGKTG

SEQ ID NO: 1030186 - protein, 526 aa, Homo sapiens
IPEDNTRTLMYNEQNPNNNGRRRRRRRRKQRKVKRESRERNAERMESILQALEDIQLDLEAVNIKAGKAFLRLKRKFIQMRRPFLERRDLIIQHIPGFWVKAFLNHPRISILINRRDEDIFRYLTNLQVQDLRHISMGYKMKLYFQTNPYFTNMVIVKEFQRNRSGRLVSHSTPIRWHRGQEPQARRHGNQDASHSFFSWFSNHSLPEADRIAEIIKNDLWVNPLRYYLRERGSRIKRKKQEMKKRKTRGRCEVVIMEDAPDYYAVEDIFSEISDIDETIHDIKISDFMETTDYFETTDNEITDINENICDSENPDHNEVPNNETTDNNESADDHETTDNNESADDNNENPEDNNKNTDDNEENPNNNENTYGNNFFKGGFWGSHGNNQDSSDSDNEADEASDDEDNDGNEGDNEGSDDDGNEGDNEGSDDDDRDIEYYEKVIEDFDKDQADYEDVIEIISDESVEEEGIEEGIQQDEDIYEEGNYEEEGSEDVWEEGEDSDDSDLEDVLQVPNGWANPGKRGKTG

SEQ ID NO: 1030187 - protein, 390 aa, Homo sapiens [sequence omitted]

SEQ ID NO: 1030188 - protein, 298 aa, Homo sapiens
MSTPPPTNPILSHSLPYSKTRGRCEVVIMEDAPDYYAVEDIFSEISDIDETIHDIKISDFMETTDYFETTDNEITDINENICDSENPDHNEVPNNETTDNNESADDHETTDNNESADDNNENPEDNNKNTDDNEENPNNNENTYGNNFFKGGFWGSHGNNQDSSDSDNEADEASDDEDNDGNEGDNEGSDDDGNEGDNEGSDDDDRDIEYYEKVIEDFDKDQADYEDVIEIISDESVEEEGIEEGIQQDEDIYEEGNYEEEGSEDVWEEGEDSDDSDLEDVLQVPNGWANPGKRGKTG

SEQ ID NO: 1030189 - protein, 257 aa, Homo sapiens
ELICLASLGSIHDIKISDFMETTDYFETTDNEITDINENICDSENPDHNEVPNNETTDNNESADDHETTDNNESADDNNENPEDNNKNTDDNEENPNNNENTYGNNFFKGGFWGSHGNNQDSSDSDNEADEASDDEDNDGNEGDNEGSDDDGNEGDNEGSDDDDRDIEYYEKVIEDFDKDQADYEDVIEIISDESVEEEGIEEGIQQDEDIYEEGNYEEEGSEDVWEEGEDSDDSDLEDVLQVPNGWANPGKRGKTG

SEQ ID NO: 1030190 - protein, 246 aa, Homo sapiens
VRNRRLGEGSFQPPAGHQHGEGNSALSPLNPGEPPDHNEVPNNETTDNNESADDHETTDNNESADDNNENPEDNNKNTDDNEENPNNNENTYGNNFFKGGFWGSHGNNQDSSDSDNEADEASDDEDNDGNEGDNEGSDDDGNEGDNEGSDDDDRDIEYYEKVIEDFDKDQADYEDVIEIISDESVEEEGIEEGIQQDEDIYEEGNYEEEGSEDVWEEGEDSDDSDLEDVLQVPNGWANPGKRGKTG

SEQ ID NO: 1030191 - protein, 466 aa, Homo sapiens
MDRPDEGPPAKTRRLSSSESPQRDPPPPPPPPPLLRLPLPPPQQRPRLQEETEAAQVLADMRGVGLGPALPPPPPYVILEEGGIRAYFTLGAECPGWDSTIESGYGEAPPPTESLEALPTPEASGGSLEIDFQVVQSSSFGGEGALETCSAVGWAPQRLVDPKSKEEAIIIVEDEDEDERESMRSSRRRRRRRRRKQRKVKRESRERNAERMESILQALEDIQLDLEAVNIKAGKAFLRLKRKFIQMRRPFLERRDLIIQHIPGFWVKAFLNHPRISILINRRDEDIFRYLTNLQVQDLRHISMGYKMKLYFQTNPYFTNMVIVKEFQRNRSGRLVSHSTPIRWHRGQEPQARRHGNQDASHSFFSWFSNHSLPEADRIAEIIKNDLWVNPLRYYLRERGSRIKRKKQEMKKRKTRGRCEVVIMEDAPDYYAVEDIFSEISDIDETIHDIKISDFMETTDNEITDI

SEQ ID NO: 1030192 - protein, 482 aa, Homo sapiens
MESILQALEDIQLDLEAVNIKAGKAFLRLKRKFIQMRRPFLERRDLIIQHIPGFWVKAFLNHPRISILINRRDEDIFRYLTNLQVQDLRHISMGYKMKLYFQTNPYFTNMVIVKEFQRNRSGRLVSHSTPIRWHRGQEPQARRHGNQDASHSFFSWFSNHSLPEADRIAEIIKNDLWVNPLRYYLRERGSRIKRKKQEMKKRKTRGRCEVVIMEDAPDYYAVEDIFSEISDIDETIHDIKISDFMETTDYFETTDNEITDINENICDSENPDHNEVPNNETTDNNESADDHETTDNNESADDNNENPEDNNKNTDDNEENPNNNENTYGNNFFKGGFWGSHGNNQDSSDSDNEADEASDDEDNDGNEGDNEGSDDDGNEGDNEGSDDDDRDIEYYEKVIEDFDKDQADYEDVIEIISDESVEEEGIEEGIQQDEDIYEEGNYEEEGSEDVWEEGEDSDDSDLEDVLQVPNGWANPGKRGKTG

SEQ ID NO: 1030193 - protein, 735 aa, Homo sapiens
MDRPDEGPPAKTRRLSSSESPQRDPPPPPPPPPLLRLPLPPPQQRPRLQEETEAAQVLADMRGVGLGPALPPPPPYVILEEGGIRAYFTLGAECPGWDSTIESGYGEAPPPTESLEALPTPEASGGSLEIDFQVVQSSSFGGEGALETCSAVGWAPQRLVDPKSKEEAIIIVEDEDEDERESMRSSRRRRRRRRRKQRKVKRESRERNAERMESILQALEDIQLDLEAVNIKAGKAFLRLKRKFIQMRRPFLERRDLIIQHIPGFWVKAFLNHPRISILINRRDEDIFRYLTNLQVQDLRHISMGYKMKLYFQTNPYFTNMVIVKEFQRNRSGRLVSHSTPIRWHRGQEPQARRHGNQDASHSFFSWFSNHSLPEADRIAEVGPFLASPEKALLGLFLGAGELRGGSGACTNGCLIPSPLFQQIIKNDLWVNPLRYYLRERGSRIKRKKQEMKKRKTRGRCEVVIMEDAPDYYAVEDIFSEISDIDETIHDIKISDFMETTDYFETTDNEITDINENICDSENPDHNEVPNNETTDNNESADDHETTDNNESADDNNENPEDNNKNTDDNEENPNNNENTYGNNFFKGGFWGSHGNNQDSSDSDNEADEASDDEDNDGNEGDNEGSDDDGNEGDNEGSDDDDRDIEYYEKVIEDFDKDQADYEDVIEIISDESVEEEGIEEGIQQDEDIYEEGNYEEEGSEDVWEEGEDSDDSDLEDVLQVPNGWANPGKRGKTG

SEQ ID NO: 1030194 - protein, 324 aa, Homo sapiens
MAVLFLLPFLQQIIKNDLWVNPLRYYLRERGSRIKRKKQEMKKRKTRGRCEVVIMEDAPDYYAVEDIFSEISDIDETIHDIKISDFMETTDYFETTDNEITDINENICDSENPDHNEVPNNETTDNNESADDHETTDNNESADDNNENPEDNNKNTDDNEENPNNNENTYGNNFFKGGFWGSHGNNQDSSDSDNEADEASDDEDNDGNEGDNEGSDDDGNEGDNEGSDDDDRDIEYYEKVIEDFDKDQADYEDVIEIISDESVEEEGIEEGIQQDEDIYEEGNYEEEGSEDVWEEGEDSDDSDLEDVLQVPNGWANPGKRGKTG

SEQ ID NO: 1030195 - protein, 515 aa, Homo sapiens
MDRPDEGPPAKTRRLSSSESPQRDPPPPPPPPPLLRLPLPPPQQRPRLQEETEAAQVLADMRGVGLGPALPPPPPYVILEEGGIRAYFTLGAECPGWDSTIESGYGEAPPPTESLEALPTPEASGGSLEIDFQVVQSSSFGGEGALETCSAVGWAPQRLVDPKSKEEAIIIVEDEDEDERESMRSSRRRRRRRRRKQRKVKRESRERNAERMESILQALEDIQLDLEAVNIKAGKAFLRLKRKFIQMRRPFLERRDLIIQHIPGFWVKAFLNHPRISILINRRDEDIFRYLTNLQVQDLRHISMGYKMKLYFQTNPYFTNMVIVKEFQRNRSGRLVSHSTPIRWHRGQEPQARRHGNQDASHSFFSWFSNHSLPEADRIAEIIKNDLWVNPLRYYLRERGSRIKRKKQEMKKRKTRGRCEVVIMEDAPDYYAVEDIFSEISDIDETIHDIKISDFMETTDYFETTDNEITDINENICDSENPDHNEVPNNETTDNNESADDHPGILHHHPDSSVP

SEQ ID NO: 1030196 - protein, 277 aa, Homo sapiens
MCEPECKTQLTASTWRSGTPGHTGPYAGSLWDPKPLWVVLGDSSSWAFPANCHRCLCYSAFLHLGQNNFAEAHRFFTEILRMDPRNAVVRSPSCRILHPLPFTDARNIHPHTSQQGPARSLSSPPAPGSGCGPSGEVTQQGHLGSAQQLCTTPRPLTRPSTQPGMGGRLSWLCGPTLGVCSSLGQQQRCRVSALPGQAQGLPAAAGGHGPAGPQALPARERALQPDHHVRAGVLTEHAEETGPAGGCRRQGGGQLQHTVPQAGLAASNTLRQKDPGL

SEQ ID NO: 1030197 - protein, 581 aa, Homo sapiens
VPASGLSRTRRAAARHAQAYRAARGCQFLSDSRLLSPSSRTLVTAAGDPLAQLQWAGGRVMEDAGGGEETPAPEAPHPPQLAPPEEQGLLFQEETIDLGGDEFGSEENETASEGSSPLADKLNEHMMESVLISDSPNSEGDAGDLGRVRDEAEPGGEGDPGPEPAGTPSPSGEADGDCAPEDAAPSSGGAPRQDAAREVPGSEAARPEQEPPVAEPVPVCTIFSQRAPPASGDGFEPQMVKSPSFGGASEASARTPPQVVQPSPSLSTFFGDTAASHSLASDFFDSFTTSAFISVSNPGAGSPAPASPPPLAVPGTEGRPEPVAMRGPQAAAPPASPEPFAHIQAVFAGSDDPFATALSMGEMDRRNDAWLPGEATRGVLRAVATQQRGAVFVDKENLTMPGLRFDNIQGDAVKDLMLRFLGEKAAAKRQVLNADSVEQSFVGLKQLISCRNWRAAVDLCGRLLTAHGQGYGKSGLLTSHTTDSLQLWFVRLALLVKLGLFQNAEMEFEPFGNLDQPDLYYEYYPHVYPGRRGSMVPFSMRILHAELQQYLGNPQESLDRLHKVKTVCSKILAPYCRHLTG

SEQ ID NO: 1030198 - protein, 97 aa, Homo sapiens
RPPTTTKFAAASTRNAVANNNAAVCLLYLGKLKDSLRQLEAMVQQDPRHYLHESVLFNLTTMYELESSRSMQKKQALLEAVAGKEGDSFNTQCLKLA

SEQ ID NO: 1030199 - protein, 379 aa, Homo sapiens
MLRFLGEKAAAKRQVLNADSVEQSFVGLKQLISCRNWRAAVDLCGRLLTAHGQGYGKSGLLTSHTTDSLQLWFVRLALLVKLGLFQNAEMEFEPVGNLDQPDLYYEYYPHVYPGRRGSMVPFSMRILHADLQQYLGNPQESLDRLHKVKTVCSKILANLEQGLAEDGGMSSVTQEGRQASIRLWRSRLGRVMYSMANCLLLMKDYVLAVEAYHSVIKYYPEQEPQLLSGIGRISLQIGDIKTAEKYFQDVEKVTQKLDGLQGKIMVLMNSAFLHLGQNNFAEAHRFFTEILRMDPRNAVANNNAAVCLLYLGKLKDSLRQLEAMVQQDPRHYLHESVLFNLTTMYELESSRSMQKKQALLEAVAGKEGDSFNTQCLKLA

SEQ ID NO: 1030200 - protein, 379 aa, Homo sapiens; identical to SEQ ID NO: 1030199

SEQ ID NO: 1030201 - protein, 660 aa, Homo sapiens
VPASGLSRTRRAAARHAQAYRAARGCQFLSDSRLLSPSSRTLVTAAGDPLAQLQWAGGRVMEDAGGGEETPAPEAPHPPQLAPPEEQGLLFQEETIDLGGDEFGSEENETASEGSSPLADKLNEHMMESVLISDSPNSEGDAGDLGRVRDEAEPGGEGDPGPEPAGTPSPSGEADGDCAPEDAAPSSGGAPRQDAAREVPGSEAARPEQEPPVAEPVPVCTIFSQRAPPASGDGFEPQMVKSPSFGGASEASARTPPQVVQPSPSLSTFFGDTAASHSLASDFFDSFTTSAFISVSNPGAGSPAPASPPPLAVPGTEGRPEPVAMRGPQAAAPPASPEPFAHIQAVFAGSDDPFATALSMGEMDRRNDAWLPGEATRGVLRAVATQQRGAVFVDKENLTMPGLRFDNIQGDAVKDLMLRFLGEKAAAKRQVLNADSVEQSFVGLKQLISCRNWRAAVDLCGRLLTAHGQGYGKSGLLTSHTTDSLQLWFVRLALLVKLGLFQNAEMEFEPFGNLDQPDLYYEYYPHVYPGRRGSMVPFSMRILHAELQQYLGNPQESLDRLHKVKTVCSKILANLEQGLAEDGGMSSVTQEGRQASIRLWRSRLGRVMYSMANCLLLMKDYVLAVEAYHSVIKYYPEQEPQLLSGIGRISLQRVPSPRAE

SEQ ID NO: 1030202 - protein, 374 aa, Homo sapiens
  misc_feature (12)..(12): Xaa can be any naturally occurring amino acid
GGGKNNLPRLWXPMAPGFNRHRGKQLISCRNWRAAVDLCGRLLTAHGQGYGKSGLLTSHTTDSLQLWFVRLALLVKLGLFQNAEMEFEPFGNLDQPDLYYEYYPHVYPGRRGSMVPFSMRILHAELQQYLGNPQESLDRLHKVKTVCSKILANLEQGLAEDGGMSSVTQEGRQASIRLWRSRLGRVMYSMANCLLLMKDYVLAVEAYHSVIKYYPEQEPQLLSGIGRISLQIGDIKTAEKYFQDVEKVTQKLDGLQGKIMVLMNSAFLHLGQNNFAEAHRFFTEILRMDPRNAVANNNAAVCLLYLGKLKDSLRQLEAMVQQDPRHYLHESVLFNLTTMYELESSRSMQKKQALLEAVAGKEGDSFNTQCLKLA

SEQ ID NO: 1030203 - protein, 659 aa, Homo sapiens
VPASGLSRTRRAAARHAQAYRAARGCQFLSDSRLLSPSSRTLVTAAGDPLAQLQWAGGRVMEDAGGGEETPAPEAPHPPQLAPPEEQGLLFQEETIDLGGDEFGSEENETASEGSSPLADKLNEHMMESVLISDSPNSEGDAGDLGRVRDEAEPGGEGDPGPEPAGTPSPSGEADGDCAPEDAAPSSGGAPRQDAAREVPGSEAARPEQEPPVAEPVPVCTIFSQRAPPASGDGFEPQMVKSPSFGGASEASARTPPQVVQPSPSLSTFFGDTAASHSLASDFFDSFTTSAFISVSNPGAGSPAPASPPPLAVPGTEGRPEPVAMRGPQAAAPPASPEPFAHIQAVFAGSDDPFATALSMGEMDRRNDAWLPGEATRGVLRAVATQQRGAVFVDKENLTMPGLRFDNIQGDAVKDLMLRFLGEKAAAKRQVLNADSVEQSFVGLKQLISCRNWRAAVDLCGRLLTAHGQGYGKSGLLTSHTTDSLQLWFVRLALLVKLGLFQNAEMEFEPFGNLDQPDLYYEYYPHVYPGRRGSMVPFSMRILHAELQQYLGNPQESLDRLHKVKTVCSKILANLEQGLAEDGGMSSVTQEGRQASIRLWRSRLGRVMYSMANCLLLMKDYVLAVEAYHSVIKYYPEQEPQLLSGIGRISLQVPVHGQT

SEQ ID NO: 1030204 - protein, 638 aa, Homo sapiens
VPASGLSRTRRAAARHAQAYRAARGCQFLSDSRLLSPSSRTLVTAAGDPLAQLQWAGGRVMEDAGGGEETPAPEAPHPPQLAPPEEQGLLFQEETIDLGGDEFGSEENETASEGSSPLADKLNEHMMESVLISDSPNSEGDAGDLGRVRDEAEPGGEGDPGPEPAGTPSPSGEADGDCAPEDAAPSSGGAPRQDAAREVPGSEAARPEQEPPVAEPVPVCTIFSQRAPPASGDGFEPQMVKSPSFGGASEASARTPPQVVQPSPSLSTFFGDTAASHSLASDFFDSFTTSAFISVSNPGAGSPAPASPPPLAVPGTEGRPEPVAMRGPQAAAPPASPEPFAHIQAVFAGSDDPFATALSMGEMDRRNDAWLPGEATRGVLRAVATQQRGAVFVDKENLTMPGLRFDNIQGDAVKDLMLRFLGEKAAAKRQVLNADSVEQSFVGLKQLISCRNWRAAVDLCGRLLTAHGQGYGKSGLLTSHTTDSLQLWFVRLALLVKLGLFQNAEMEFEPFGNLDQPDLYYEYYPHVYPGRRGSMVPFSMRILHAELQQYLGNPQESLDRLHKVKTVCSKILANLEQGLAEDGGMSSVTQEGRQASIRLWRSRLGRVMYSMANCLLLMKKVSFVLPIFVEGVFFTSWF

SEQ ID NO: 1030205 - protein, 211 aa, Homo sapiens
MSSVTQEGRQASIRLWRSRLGRVMYSMANCLLLMKDYVLAVEAYHSVIKYYPEQEPQLLSGIGRISLQIGDIKTAEKYFQDVEKVTQKLDGLQGKIMVLMNSAFLHLGQNNFAEAHRFFTEILRMDPRNAVANNNAAVCLLYLGKLKDSLRQLEAMVQQDPRHYLHESVLFNLTTMYELESSRSMQKKQALLEAVAGKEGDSFNTQCLKLA

SEQ ID NO: 1030206 - protein, 185 aa, Homo sapiens
MANCLLLMKDYVLAVEAYHSVIKYYPEQEPQLLSGIGRISLQIGDIKTAEKYFQDVEKVTQKLDGLQGKIMVLMNSAFLHLGQNNFAEAHRFFTEILRMDPRNAVANNNAAVCLLYLGKLKDSLRQLEAMVQQDPRHYLHESVLFNLTTMYELESSRSMQKKQALLEAVAGKEGDSFNTQCLKLA

SEQ ID NO: 1030207 - protein, 219 aa, Homo sapiens
LKLDCRSPCWLQNGCKSSFTACKHVWLLKRNGEDGAKIDLSLEDYVLAVEAYHSVIKYYPEQEPQLLSGIGRISLQIGDIKTAEKYFQDVEKVTQKLDGLQGKIMVLMNSAFLHLGQNNFAEAHRFFTEILRMDPRNAVANNNAAVCLLYLGKLKDSLRQLEAMVQQDPRHYLHESVLFNLTTMYELESSRSMQKKQALLEAVAGKEGDSFNTQCLKLA

SEQ ID NO: 1030208 - protein, 168 aa, Homo sapiens [sequence omitted]

SEQ ID NO: 1030209 - protein, 115 aa, Homo sapiens [sequence omitted]

SEQ ID NO: 1030210 - protein, 129 aa, Homo sapiens
MCAKYECVLSYGKQTQLSTDWIPGSMVPFSMRILHAELQQYLGNPQESLDRLHKVKTVCSKILALSFFPATGRTCPPRPPHRTCPCCSLPVLPHAPSAASAFRRLGDPGLCGLVVVALAEIFFRDGKSF

SEQ ID NO: 1030211 - protein, 904 aa, Homo sapiens
VPASGLSRTRRAAARHAQAYRAARGCQFLSDSRLLSPSSRTLVTAAGDPLAQLQWAGGRVMEDAGGGEETPAPEAPHPPQLAPPEEQGLLFQEETIDLGGDEFGSEENETASEGSSPLADKLNEHMMESVLISDSPNSEGDAGDLGRVRDEAEPGGEGDPGPEPAGTPSPSGEADGDCAPEDAAPSSGGAPRQDAAREVPGSEAARPEQEPPVAEPVPVCTIFSQRAPPASGDGFEPQMVKSPSFGGASEASARTPPQVVQPSPSLSTFFGDTAASHSLASDFFDSFTTSAFISVSNPGAGSPAPASPPPLAVPGTEGRPEPVAMRGPQAAAPPASPEPFAHIQAVFAGSDDPFATALSMGEMDRRNDAWLPGEATRGVLRAVATQQRGAVFVDKENLTMPGLRFDNIQGDAVKDLMLRFLGEKAAAKRQVLNADSVEQSFVGLKQLISCRNWRAAVDLCGRLLTAHGQGYGKSGLLTSHTTDSLQLWFVRLALLVKLGLFQNAEMEFEPFGNLDQPDLYYEYYPHVYPGRRGSMVPFSMRILHAELQQYLGNPQESLDRLHKVKTVCSKILANLEQGLAEDGGMSSVTQEGRQASIRLWRSRLGRVMYSMANCLLLMKDYVLAVEAYHSVIKYYPEQEPQLLSGIGRISLQIGDIKTAEKYFQDVEKVTQKLDGLQGKIMVLMNSAFLHLGQNNFAEAHRFFTEILRMDPRNAVVRSPSCRILHPLPFTDARNIHPHTSQQGPARSLSSPPAPGSGCGPSGEVTQQGHLGSAQQLCTTPRPLTRPSTQPGMGGRLSWLCGPTLGVCSSLGQQQRCRVSALPGQAQGLPAAAGGHGPAGPQALPARERALQPDHHVRAGVLTEHAEETGPAGGCRRQGGGQLQHTVPQAGLAASNTLRQKDPGL

SEQ ID NO: 1030212 - protein, 469 aa, Homo sapiens
GQPKGVGDGGLQCDCCLGTCTPRSPEFLSCLQEERDYADNQSVRRADKSFIEHKTALSREGRRGWSPTESQVVSLPVWLAQGLFWAQNGGVHADCEYAKKKAKTKSPPKVGTTVEKTSWGRGDAVKDLMLRFLGEKAAAKRQVLNADSVEQSFVGLKQLILWFVRLALLVKLGLFQNAEMEFEPFGNLDQPDLYYEYYPHVYPGRRGSMVPFSMRILHAELQQYLGNPQESLDRLHKVKTVCSKILANLEQGLAEDGGMSSVTQEGRQASIRLWRSRLGRVMYSMANCLLLMKDYVLAVEAYHSVIKYYPEQEPQLLSGIGRISLQIGDIKTAEKYFQDVEKVTQKLDGLQGKIMVLMNSAFLHLGQNNFAEAHRFFTEILRMDPRNAVANNNAAVCLLYLGKLKDSLRQLEAMVQQDPRHYLHESVLFNLTTMYELESSRSMQKKQALLEAVAGKEGDSFNTQCLKLA

SEQ ID NO: 1030213 - protein, 630 aa, Homo sapiens
VPASGLSRTRRAAARHAQAYRAARGCQFLSDSRLLSPSSRTLVTAAGDPLAQLQWAGGRVMEDAGGGEETPAPEAPHPPQLAPPEEQGLLFQEETIDLGGDEFGSEENETASEGSSPLADKLNEHMMESVLISDSPNSEGDAGDLGRVRDEAEPGGEGDPGPEPAGTPSPSGEADGDCAPEDAAPSSGGAPRQDAAREVPGSEAARPEQEPPVAEPVPVCTIFSQRAPPASGDGFEPQMVKSPSFGGASEASARTPPQVVQPSPSLSTFFGDTAASHSLASDFFDSFTTSAFISVSNPGAGSPAPASPPPLAVPGTEGRPEPVAMRGPQAAAPPASPEPFAHIQAVFAGSDDPFATALSMGEMDRRNDAWLPGEATRGVLRAVATQQRGAVFVDKENLTMPGLRFDNIQGDAVKDLMLRFLGEKAAAKRQVLNADSVEQSFVGLKQLISCRNWRAAVDLCGRLLTAHGQGYGKSGLLTSHTTDSLQVENNFQVLEFNLAYHSLGTWTGPWPFMPITKSMFSYPASFSPNYIVYTILGHWNSHFGPSGRLCAPEARSQVPTLSLMVEPAWLWVSRWVRLTTGSSNWPVRGSGACLGPVGNSDRSSWFCPPQGRRVHVPFAPRGISLAIKIH

SEQ ID NO: 1030214 - protein, 211 aa, Homo sapiens; identical to SEQ ID NO: 1030205

SEQ ID NO: 1030215 - protein, 147 aa, Homo sapiens [sequence omitted]

SEQ ID NO: 1030216 - protein, 379 aa, Homo sapiens; identical to SEQ ID NO: 1030199

SEQ ID NO: 1030217 - protein, 379 aa, Homo sapiens; identical to SEQ ID NO: 1030199

SEQ ID NO: 1030218 - protein, 240 aa, Homo sapiens
WRSVSPALTAPRRKPVGTQTHRRPASPLGLARPRAMEFLWAPLLGLCCSLAAADRHTVFWNSSNPKFRNEDYTIHVQLNDYVDIICPHYEDHSVADAAMEQYILYLVEHEEYQLCQPQSKDQVRWQCNRPSAKHGPEKLSEKFQRFTPFTLGKEFKEGHSYYYISKPIHQHEDRCLRLKVTVSGKITHSPQAHDNPQEKRLAADDPEVRVLHSIGHSAAPRLFPLAWTVLLLPLLLLQTP

SEQ ID NO: 1030219 - protein, 218 aa, Homo sapiens
WRSVSPALTAPRRKPVGTQTHRRPASPLGLARPRAMEFLWAPLLGLCCSLAAADRHTVFWNSSNPKFRNEDYTIHVQLNDYVDIICPHYEDHSVADAAMEQYILYLVEHEEYQLCQPQSKDQVRWQCNRPSAKHGPEKLSEKFQRFTPFTLGKEFKEGHSYYYISHSPQAHDNPQEKRLAADDPEVRVLHSIGHSAAPRLFPLAWTVLLLPLLLLQTP

SEQ ID NO: 1030220 - protein, 227 aa, Homo sapiens
WRSVSPALTAPRRKPVGTQTHRRPASPLGLARPRAMEFLWAPLLGLCCSLAAADRHTVFWNSSNPKFRNEDYTIHVQLNDYVDIICPHYEDHSVADAAMEQYILYLVEHEEYQLCQPQSKDQVRWQCNRPSAKHGPEKLSEKFQRFTPFTLGKEFKEGHSYYYISKPIHQHEDRCLRLKVTVSGKISECRSPVGLLPPSLCWVRSSDLGWYRSLAAQPTHTYSPLPL

SEQ ID NO: 1030221 - protein, 227 aa, Homo sapiens; identical to SEQ ID NO: 1030220

SEQ ID NO: 1030222 - protein, 240 aa, Homo sapiens; identical to SEQ ID NO: 1030218

SEQ ID NO: 1030223 - protein, 233 aa, Homo sapiens
MAERNVRHQDQYILGVETSEKSLGVQCEDVRGHVNIQRPKDLAWLLNDHLLLPPVCVPRFRNEDYTIHVQLNDYVDIICPHYEDHSVADAAMEQYILYLVEHEEYQLCQPQSKDQVRWQCNRPSAKHGPEKLSEKFQRFTPFTLGKEFKEGHSYYYISKPIHQHEDRCLRLKVTVSGKITHSPQAHDNPQEKRLAADDPEVRVLHSIGHSAAPRLFPLAWTVLLLPLLLLQTP

SEQ ID NO: 1030224 - protein, 248 aa, Homo sapiens
WRSVSPALTAPRRKPVGTQTHRRPASPLGLARPRAMEFLWAPLLGLCCSLAAADRHTVFWNSSNPKFRNEDYTIHVQLNDYVDIICPHYEDHSVADAAMEQYILYLVEHEEYQLCQPQSKDQVRWQCNRPSAKHGPEKLSEKFQRFTPFTLGKEFKEGHSYYYISKPIHQHEDRCLRLKVTVSGKIITVLRPMTIHRRRDLQQMTQRCGFYIASVTVLPHASSHLPGLCCSFHFCCCKPREGVCHTWP

SEQ ID NO: 1030225 - protein, 240 aa, Homo sapiens; identical to SEQ ID NO: 1030218

SEQ ID NO: 1030226 - protein, 240 aa, Homo sapiens; identical to SEQ ID NO: 1030218

SEQ ID NO: 1030227 - protein, 133 aa, Homo sapiens
MEFLWAPLLGLCCSLAAADRHTVFWNSSNPKFRNEDYTIHVQLNDYVDIICPHYEDHSVADAAMEQYILYLVEHEEYQLCQPQSKDQVRWQCNRPSAKHGPEKLSEKFQRFTPFTLGKEFKEGHSYYYICECL

SEQ ID NO: 1030228 - protein, 205 aa, Homo sapiens
MEFLWAPLLGLCCSLAAADRHTVFWNSSNPKFRNEDYTIHVQLNDYVDIICPHYEDHSVADAAMEQYILYLVEHEEYQLCQPQSKDQVRWQCNRPSAKHGPEKLSEKFQRFTPFTLGKEFKEGHSYYYISKPIHQHEDRCLRLKVTVSGKITHSPQAHVNPQEKRLAADDPEVRVLHSIGHSAAPRLFPLAWTVLLLPLLLLQTP

SEQ ID NO: 1030229 - protein, 205 aa, Homo sapiens; identical to SEQ ID NO: 1030228

SEQ ID NO: 1030230 - protein, 240 aa, Homo sapiens; identical to SEQ ID NO: 1030218

SEQ ID NO: 1030231 - protein, 817 aa, Homo sapiens
LSRRGRKRRRKHRAKKEKKTKRRKKGEGDGGQKQVEQKSSATLLLTWGLEDVEHVFSEEDYHTLTNYKAFSQFMRPLIAKKNPKIPMSKMMTILGAKWREFSANNPFKGSAAAVAAAAAAAAAAVAEQVSAAVSSATPIAPSGPPALPPPPAADIQPPPIRRAKTKEGKGPGHKRRSKSPRVPDGRKKLRGKKMAPLKIKLGLLGGKRKKGGSSDEGPEPEAEESDLDSGSVHSASGRPDGPVRTKKLKRGRPGRKKKKVLGCPAVAGEEEVDGYETDHQDYCEVCQQGGEIILCDTCPRAYHLVCLDPELDRAPEGKWSCPHCEKEGVQWEAKEEEEEYEEEGEEEGEKEEEDDHMEYCRVCKDGGELLCCDACISSYHIHCLNPPLPDIPNGEWLCPRCTCPVLKGRVQKILHWRWGEPPVAVPAPQQADGNPDVPPPRPLQGRSEREFFVKWVGLSYWHCSWAKELQLEIFHLVMYRNYQRKNDMDEPPPLDYGSGEDDGKSDKRKVKDPHYAEMEEKYYRFGIKPEWMTVHRIINHSVDKKGNYHYLVKWRDLPYDQSTWEEDEMNIPEYEEHKQSYWRHRELIMGEDPAQPRKYKKKKKELQGDGPPSSPTNDPTVKYETQPRFITATGGTLHMYQLEGLNWLRFSWAQALTTILADEMGLGKTYNTIVFLYSLYKEGHTKGPFLVVPISTIINWEREFQMWDPKFYAGMTIQRGDKDQTGAIHSREAMEILPLEGQRHPEGGARKAYTCTGTTHETSTRQPTNRHATQPHDHRRGGSPRGTVAPHRRRHTTQATTPELTGEPHTTATHTQM

SEQ ID NO: 1030232 - protein, 710 aa, Homo sapiens
WAPLKIKLGLLGGKRKKGGSSDEGPEPEAEESDLDMAVSTVPQAGLMALSAPIRRAKTKEGKGPGHKRRSKSPRVPDGRKKLRGKKMAPLKIKLGLLGGKRKKGGSSDEGPEPEAEESDLDSGSVHSASGRPDGPVRTKKLKRGRPGRKKKKVLGCPAVAGEEEVDGYETDHQDYCEVCQQGGEIILCDTCPRAYHLVCLDPELDRAPEGKWSCPHCEKEGVQWEAKEEEEEYEEEGEEEGEKEEEDDHMEYCRVCKDGGELLCCDACISSYHIHCLNPPLPDIPNGEWLCPRCTCPVLKGRVQKILHWRWGEPPVAVPAPQQADGNPDVPPPRPLQGRSEREFFVKWVGLSYWHCSWAKELQLEIFHLVMYRNYQRKNDMDEPPPLDYGSGEDDGKSDKRKVKDPHYAEMEEKYYRFGIKPEWMTVHRIINHSVDKKGNYHYLVKWRDLPYDQSTWEEDEMNIPEYEEHKQSYWRHRELIMGEDPAQPRKYKKKKKELQGDGPPSSPTNDPTVKYETQPRFITATGGTLHMYQLEGLNWLRFSWAQALTTILADEMGLGKTYNTIVFLYSLYKEGHTKGPFLVVPISTIINWEREFQMWDPKFYAGMTIQRGDKDQTGAIHSREAMEILPLEGQRHPEGGARKAYTCTGTTHETSTRQPTNRHATQPHDHRRGGSPRGTVAPHRRRHTTQATTPELTGEPHTTATHTQM

SEQ ID NO: 1030233 - protein, 665 aa, Homo sapiens
SSSRFPFIRRAKTKEGKGPGHKRRSKSPRVPDGRKKLRGKKMAPLKIKLGLLGGKRKKGGSSDEGPEPEAEESDLDSGSVHSASGRPDGPVRTKKLKRGRPGRKKKKVLGCPAVAGEEEVDGYETDHQDYCEVCQQGGEIILCDTCPRAYHLVCLDPELDRAPEGKWSCPHCEKEGVQWEAKEEEEEYEEEGEEEGEKEEEDDHMEYCRVCKDGGELLCCDACISSYHIHCLNPPLPDIPNGEWLCPRCTCPVLKGRVQKILHWRWGEPPVAVPAPQQADGNPDVPPPRPLQGRSEREFFVKWVGLSYWHCSWAKELQLEIFHLVMYRNYQRKNDMDEPPPLDYGSGEDDGKSDKRKVKDPHYAEMEEKYYRFGIKPEWMTVHRIINHSVDKKGNYHYLVKWRDLPYDQSTWEEDEMNIPEYEEHKQSYWRHRELIMGEDPAQPRKYKKKKKELQGDGPPSSPTNDPTVKYETQPRFITATGGTLHMYQLEGLNWLRFSWAQALTTILADEMGLGKTVQTIVFLYSLYKEGHTKGPFLVMPISTIINWEREFQMWDPKFYAGMTIQRGDKDQTGAIHSREAMEILPLEGQRHPEGGARKAYTCTGTTHETSTRQPTNRHATQPHDHRRGGSPRGTVAPHRRRHTTQATTPELTGEPHTTATHTQM

SEQ ID NO: 1030234 - protein, 1282 aa, Homo sapiens
ELVQPRTVGVDRLHSCLSQWTKTSRKWVKKPSQQKKLEERPVNKCSDQIKLKNTTDKKNNENRESEKKGQRTSTFQINGKDNKPKIYLKGECLKEISESRVVSGNVEPKVNNINKIIPENDIKSLTVKESAIRPFINGDVIMEDFNERNSSETKSHLLSSSDAEGNYRDSLETLPSTKESDSTQTTTPSASCPESNSVNQVEDMEIETSEVKKVTSSPITSEEESNLSNDFIDENGLPINKNENVNGESKRKTVITEVTTMTSTVATESKTVIKVEKGDKQTVVSSTENCAKSTVTTTTTTVTKLSTPSTGGSVDIISVKEQSKTVVTTTVTDSLTIPREATGYIYDCEQRVFHTRQSETDVNFQDQRRLVQVQLCPSYRKFVTKSSKKSIFVLPNDDLKKLARKGGIREVPYFNYNAKPALDIWPYPSPRPTFGITWRYRLQTVKSLAGVSLMLRLLWASLRWDDMAAKAPPGGGTTRTETSETEITTTEIIKRRDVGPYGIRSEYCIRKIICPIGVPETPKETPTPQRKGLRSSALRPKRPETPKQTGPVIIETWVAEEELELWEIRAFAERVEKEKAQAVEQQAKKRLEQQKPTVIATSTTSPTSSTTSTISPAQKVMVAPISGSVTTGTKMVLTTKVGSPATVTFQQNKNFHQTFATWVKQGQSNSGVVQVQQKVLGIIPSSTGTSQQTFTSFQPRTATVTIRPNTSGSGGTTSNSQVITGPQIRPGMTVIRTPLQQSTLGKAIIRTPVMVQPGAPQQVMTQIIRGQPVSTAVSAPNTVSSTPGQKSLTSATSTSNIQSSASQPPRPQQGQVKLTMAQLTQLTQGHGGNQGLTVVIQGQGQTTGQLQLIPQGVTVLPGPGQQLMQAAMPNGTVQRFLFTPLATTATTASTTTTTVSTTAAGTGEQRQSKLSPQMQVHQDKTLPPAQSSSVGPAEAQPQTAQPSAQPQPQTQPQSPAQPEVQTQPEVQTQTTVSSHVPSEAQPTHAQSSKPQVAAQSQPQSNVQGQSPVRVQSPSQTRIRPSTPSQLSPGQQSQVQTTTSQPIPIQPHTSLQIPSQGQPQSQPQVVMKHNAVIEHLKQKKSMTPAEREENQRMIVCNQVMKYILDKIDKEEKQAAKKRKREESVEQKRSKQNATKLSALLFKHKEQLRAEILKKRALLDKDLQIEVQEELKRDLKIKKEKDLMQLAQATAVAAPCPPVTPAPPAPPAPPPSPPPPPAVQHTGLLSTPTLPAASQKRKREEEKDSSSKSKKKKMISTTSKETKKDTKLYCICKTPYDESK

SEQ ID NO: 1030235 - protein, 1115 aa, Homo sapiens
IPCLDVLPSTKESDSTQTTTPSASCPESNSVNQVEDMEIETSEVKKVTSSPITSEEESNLSNDFIDENGLPINKNENVNGESKRKTVITEVTTMTSTVATESKTVIKVEKGDKQTVVSSTENCAKSTVTTTTTTVTKLSTPSTGGSVDIISVKEQSKTVVTTTVTDSLTIPREATGYIYDCEQRVFHTRQSETDVNFQDQRRLVQVQLCPSYRKFVTKSSKKSIFVLPNDDLKKLARKGGIREVPYFNYNAKPALDIWPYPSPRPTFGITWRYRLQTVKSLAGVSLMLRLLWASLRWDDMAAKAPPGGGTTRTETSETEITTTEIIKRRDVGPYGIRSEYCIRKIICPIGVPETPKETPTPQRKGLRSSALRPKRPETPKQTGPVIIETWVAEEELELWEIRAFAERVEKEKAQAVEQQAKKRLEQQKPTVIATSTTSPTSSTTSTISPAQKVMVAPISGSVTTGTKMVLTTKVGSPATVTFQQNKNFHQTFATWVKQGQSNSGVVQVQQKVLGIIPSSTGTSQQTFTSFQPRTATVTIRPNTSGSGGTTSNSQVITGPQIRPGMTVIRTPLQQSTLGKAIIRTPVMVQPGAPQQVMTQIIRGQPVSTAVSAPNTVSSTPGQKSLTSATSTSNIQSSASQPPRPQQGQVKLTMAQLTQLTQGHGGNQGLTVVIQGQGQTTGQLQLIPQGVTVLPGPGQQLMQAAMPNGTVQRFLFTPLATTATTASTTTTTVSTTAAGTGEQRQSKLSPQMQVHQDKTLPPAQSSSVGPAEAQPQTAQPSAQPQPQTQPQSPAQPEVQTQPEVQTQTTVSSHVPSEAQPTHAQSSKPQVAAQSQPQSNVQGQSPVRVQSPSQTRIRPSTPSQLSPGQQSQVQTTTSQPIPIQPHTSLQIPSQGQPQSQPQVVMKHNAVIEHLKQKKSMTPAEREENQRMIVCNQVMKYILDKIDKEEKQAAKKRKREESVEQKRSKQNATKLSALLFKHKEQLRAEILKKRALLDKDLQIEVQEELKRDLKIKKEKDLMQLAQATAVAAPCPPVTPAPPAPPAPPPSPPPPPAVQHTGLLSTPTLPAASQKRKREEEKDSSSKSKKKKMISTTSKETKKDTKLYCICKTPYDESK

SEQ ID NO: 1030236 - protein, 597 aa, Homo sapiens
  misc_feature (32)..(32): Xaa can be any naturally occurring amino acid
YSVMEVISGRVGKSSSGPEIESGSRTTLLTFXCKSLELTTTTPGQNSQLQKISFRFFFNHSFMFQSNRNGSSFLFTGTGEQRQSKLSPQMQVHQDKTLPPAQSSSVGPAEAQPQTAQPSAQPQPQTQPQSPAQPEVQTQPEVQTQTTVSSHVPSEAQPTHAQSSKPQVAAQSQPQSNVQGQSPVRVQSPSQTRIRPSTPSQLSPGQQSQVQTTTSQPIPIQPHTSLQIPSQGQPQSQPQVQSSTQTLSSGQTLNQVTVSSPSRPQLQIQQPQPQVIAVPQLQQQVQVLSQIQSQVVAQIQAQQSGVPQQIKLQLPIQIQQSSAVQTHQIQNVVTVQAASVQEQLQRVQQLRDQQQKKKQQQIEIKREHTLQASNQSEIIQKQVVMKHNAVIEHLKQKKSMTPAEREENQRMIVCNQVMKYILDKIDKEEKQAAKKRKREESVEQKRSKQNATKLSALLFKHKEQLRAEILKKRALLDKDLQIEVQEELKRDLKIKKEKDLMQLAQATAVAAPCPPVTPAPPAPPAPPPSPPPPPAVQHTGLLSTPTLPAASQKRKREEEKDSSSKSKKKKMISTTSKETKKDTKLYCICKTPYDESK

SEQ ID NO: 1030237 - protein, 1404 aa, Homo sapiens
KGNDFFIDDSKLASADDIGTLICKNKKPLIQEESDTIVSSSKSALHSSVPKSTNDRDATPLSRAMDFEGKLGCDSESNSTLENSSDTVSIQDSSEEDMIVQNSNESISEQFRTREQDVEVLEPLKCELVSGESTGNCEDRLPVKGTEANGKKPSQQKKLEERPVNKCSDQIKLKNTTDKKNNENRESEKKGQRTSTFQINGKDNKPKIYLKGECLKEISESRVVSGNVEPKVNNINKIIPENDIKSLTVKESAIRPFINGDVIMEDFNERNSSETKSHLLSSSDAEGNYRDSLETLPSTKESDSTQTTTPSASCPESNSVNQVEDMEIETSEVKKVTSSPITSEEESNLSNDFIDENGLPINKNENVNGESKRKTVITEVTTMTSTVATESKTVIKVEKGDKQTVVSSTENCAKSTVTTTTTTVTKLSTPSTGGSVDIISVKEQSKTVVTTTVTDSLTIPREATGYIYDCEQRVFHTRQSETDVNFQDQRRLVQVQLCPSYRKFVTKSSKKSIFVLPNDDLKKLARKGGIREVPYFNYNAKPALDIWPYPSPRPTFGITWRYRLQTVKSLAGVSLMLRLLWASLRWDDMAAKAPPGGGTTRTETSETEITTTEIIKRRDVGPYGIRSEYCIRKIICPIGVPETPKETPTPQRKGLRSSALRPKRPETPKQTGPVIIETWVAEEELELWEIRAFAERVEKEKAQAVEQQAKKRLEQQKPTVIATSTTSPTSSTTSTISPAQKVMVAPISGSVTTGTKMVLTTKVGSPATVTFQQNKNFHQTFATWVKQGQSNSGVVQVQQKVLGIIPSSTGTSQQTFTSFQPRTATVTIRPNTSGSGGTTSNSQVITGPQIRPGMTVIRTPLQQSTLGKAIIRTPVMVQPGAPQQVMTQIIRGQPVSTAVSAPNTVSSTPGQKSLTSATSTSNIQSSASQPPRPQQGQVKLTMAQLTQLTQGHGGNQGLTVVIQGQGQTTGQLQLIPQGVTVLPGPGQQLMQAAMPNGTVQRFLFTPLATTATTASTTTTTVSTTAAGTGEQRQSKLSPQMQVHQDKTLPPAQSSSVGPAEAQPQTAQPSAQPQPQTQPQSPAQPEVQTQPEVQTQTTVSSHVPSEAQPTHAQSSKPQVAAQSQPQSNVQGQSPVRVQSPSQTRIRPSTPSQLSPGQQSQVQTTTSQPIPIQPHTSLQIPSQGQPQSQPQVVMKHNAVIEHLKQKKSMTPAEREENQRMIVCNQVMKYILDKIDKEEKQAAKKRKREESVEQKRSKQNATKLSALLFKHKEQLRAEILKKRALLDKDLQIEVQEELKRDLKIKKEKDLMQLAQATAVAAPCPPVTPAPPAPPAPPPSPPPPPAVQHTGLLSTPTLPAASQKRKREEEKDSSSKSKKKKMISTTSKETKKDTKLYCICKTPYDESK

SEQ ID NO: 1030238 - protein, 1404 aa, Homo sapiens; identical to SEQ ID NO: 1030237

SEQ ID NO: 1030239 - protein, 1547 aa, Homo sapiens
KGNDFFIDDSKLASADDIGTLICKNKKPLIQEESDTIVSSSKSALHSSVPKSTNDRDATPLSRAMDFEGKLGCDSESNSTLENSSDTVSIQDSSEEDMIVQNSNESISEQFRTREQDVEVLEPLKCELVSGESTGNCEDRLPVKGTEANGKKPSQQKKLEERPVNKCSDQIKLKNTTDKKNNENRESEKKGQRTSTFQINGKDNKPKIYLKGECLKEISESRVVSGNVEPKVNNINKIIPENDIKSLTVKESAIRPFINGDVIMEDFNERNSSETKSHLLSSSDAEGNYRDSLETLPSTKESDSTQTTTPSASCPESNSVNQVEDMEIETSEVKKVTSSPITSEEESNLSNDFIDENGLPINKNENVNGESKRKTVITEVTTMTSTVATESKTVIKVEKGDKQTVVSSTENCAKSTVTTTTTTVTKLSTPSTGGSVDIISVKEQSKTVVTTTVTDSLTIPREATGYIYDCEQRVFHTRQSETDVNFQDQRRLVQVQLCPSYRKFVTKSSKKSIFVLPNDDLKKLARKGGIREVPYFNYNAKPALDIWPYPSPRPTFGITWRYRLQTVKSLAGVSLMLRLLWASLRWDDMAAKAPPGGGTTRTETSETEITTTEIIKRRDVGPYGIRSEYCIRKIICPIGVPETPKETPTPQRKGLRSSALRPKRPETPKQTGPVIIETWVAEEELELWEIRAFAERVEKEKAQAVEQQAKKRLEQQKPTVIATSTTSPTSSTTSTISPAQKVMVAPISGSVTTGTKMVLTTKVGSPATVTFQQNKNFHQTFATWVKQGQSNSGVVQVQQKVLGIIPSSTGTSQQTFTSFQPRTATVTIRPNTSGSGGTTSNSQVITGPQIRPGMTVIRTPLQQSTLGKAIIRTPVMVQPGAPQQVMTQIIRGQPVSTAVSAPNTVSSTPGQKSLTSATSTSNIQSSASQPPRPQQGQVKLTMAQLTQLTQGHGGNQGLTVVIQGQGQTTGQLQLIPQGVTVLPGPGQQLMQAAMPNGTVQRFLFTPLATTATTASTTTTTVSTTAAGTGEQRQSKLSPQMQVHQDKTLPPAQSSSVGPAEAQPQTAQPSAQPQPQTQPQSPAQPEVQTQPEVQTQTTVSSHVPSEAQPTHAQSSKPQVAAQSQPQSNVQGQSPVRVQSPSQTRIRPSTPSQLSPGQQSQVQTTTSQPIPIQPHTSLQIPSQGQPQSQPQVQSSTQTLSSGQTLNQVTVSSPSRPQLQIQQPQPQVIAVPQLQQQVQVLSQIQSQVVAQIQAQQSGVPQQIKLQLPIQIQQSSAVQTHQIQNVVTVQAASVQEQLQRVQQLRDQQQKKKQQQIEIKREHTLQASNQSEIIQKQVVMKHNAVIEHLKQKKSMTPAEREENQRMIVCNQVMKYILDKIDKEEKQAAKKRKREESVEQKRSKQNATKLSALLFKHKEQLRAEILKKRALLDKDLQIEVQEELKRDLKIKKEKDLMQLAQATAVAAPCPPVTPAPPAPPAPPPSPPPPPAVQHTGLLSTPTLPAASQKRKREEEKDSSSKSKKKKMISTTSKETKKDTKLYCICKTPYDESK

SEQ ID NO: 1030240 - protein, 1064 aa, Homo sapiens
KGNDFFIDDSKLASADDIGTLICKNKKPLIQEESDTIVSSSKSALHSSVPKSTNDRDATPLSRAMDFEGKLGCDSESNSTLENSSDTVSIQDSSEEDMIVQNSNESISEQFRTREQDVEVLEPLKCELVSGESTGNCEDRLPVKGTEANGKKPSQQKKLEERPVNKCSDQIKLKNTTDKKNNENRESEKKGQRTSTFQINGKDNKPKIYLKGECLKEISESRVVSGNVEPKVNNINKIIPENDIKSLTVKESAIRPFINGDVIMEDFNERNSSETKSHLLSSSDAEGNYRDSLETLPSTKESDSTQTTTPSASCPESNSVNQVEDMEIETSEVKKVTSSPITSEEESNLSNDFIDENGLPINKNENVNGESKRKTVITEVTTMTSTVATESKTVIKVEKGDKQTVVSSTENCAKSTVTTTTTTVTKLSTPSTGGSVDIISVKEQSKTVVTTTVTDSLTIPREATGYIYDCEQRVFHTRQSETDVNFQDQRRLVQVQLCPSYRKFVTKSSKKSIFVLPNDDLKKLARKGGIREVPYFNYNAKPALDIWPYPSPRPTFGITWRYRLQTVKSLAGVSLMLRLLWASLRWDDMAAKAPPGGGTTRTETSETEITTTEIIKRRDVGPYGIRSEYCIRKIICPIGVPETPKETPTPQRKGLRSSALRPKRPETPKQTGPVIIETWVAEEELELWEIRAFAERVEKEKAQAVEQQAKKRLEQQKPTVIATSTTSPTSSTTSTISPAQKVMVAPISGSVTTGTKMVLTTKVGSPATVTFQQNKNFHQTFATWVKQGQSNSGVVQVQQKVLGIIPSSTGTSQQTFTSFQPRTATVTIRPNTSGSGGTTSNSQVITGPQIRPGMTVIRTPLQQSTLGKAIIRTPVMVQPGAPQQVMTQIIRGQPVSTAVSAPNTVSSTPGQKSLTSATSTSNIQSSASQPPRPQQGQVKLTMAQLTQLTQGHGGNQGLTVVIQGQGQTTGQLQLIPQGVTVLPGPGQQLMQAAMPNGTVQRFLFTPLATTATTASTTTTTVSTTAAGRAVGLSEMSDVTTTRGWANRGQQENQYLPLEGYASSQ

SEQ ID NO: 1030241 - protein, 611 aa, Homo sapiens
KGNDFFIDDSKLASADDIGTLICKNKKPLIQEESDTIVSSSKSALHSSVPKSTNDRDATPLSRAMDFEGKLGCDSESNSTLENSSDTVSIQDSSEEDMIVQNSNESISEQFRTREQDVEVLEPLKCELVSGESTGNCEDRLPVKGTEANGKKPSQQKKLEERPVNKCSDQIKLKNTTDKKNNENRESEKKGQRTSTFQINGKDNKPKIYLKGECLKEISESRVVSGNVEPKVNNINKIIPENDIKSLTVKESAIRPFINGDVIMEDFNERNSSETKSHLLSSSDAEGNYRDSLETLPSTKESDSTQTTTPSASCPESNSVNQVEDMEIETSEVKKVTSSPITSEEESNLSNDFIDENGLPINKNENVNGESKRKTVITEVTTMTSTVATESKTVIKVEKGDKQTVVSSTENCAKSTVTTTTTTVTKLSTPSTGGSVDIISVKEQSKTVVTTTVTDSLTIPREATGYIYDCEQRVFHTRQSETDVNFQDQRRLVQVQLCPSYRKFVTKSSKKSIFVLPNDDLKKLARKGGIREVPYFNYNAKPALDIWPYPSPRPTFGITWRYRLQTVKSLAGVSLMLRLLWASLRWDDMAAKAPPGGGTTRTGKRGRELFV

SEQ ID NO: 1030242 - protein, 1501 aa, Homo sapiens
  misc_feature (1498)..(1498): Xaa can be any naturally occurring amino acid
KGNDFFIDDSKLASADDIGTLICKNKKPLIQEESDTIVSSSKSALHSSVPKSTNDRDATPLSRAMDFEGKLGCDSESNSTLENSSDTVSIQDSSEEDMIVQNSNESISEQFRTREQDVEVLEPLKCELVSGESTGNCEDRLPVKGTEANGKKPSQQKKLEERPVNKCSDQIKLKNTTDKKNNENRESEKKGQRTSTFQINGKDNKPKIYLKGECLKEISESRVVSGNVEPKVNNINKIIPENDIKSLTVKESAIRPFINGDVIMEDFNERNSSETKSHLLSSSDAEGNYRDSLETLPSTKESDSTQTTTPSASCPESNSVNQVEDMEIETSEVKKVTSSPITSEEESNLSNDFIDENGLPINKNENVNGESKRKTVITEVTTMTSTVATESKTVIKVEKGDKQTVVSSTENCAKSTVTTTTTTVTKLSTPSTGGSVDIISVKEQSKTVVTTTVTDSLTIPREATGYIYDCEQRVFHTRQSETDVNFQDQRRLVQVQLCPSYRKFVTKSSKKSIFVLPNDDLKKLARKGGIREVPYFNYNAKPALDIWPYPSPRPTFGITWRYRLQTVKSLAGVSLMLRLLWASLRWDDMAAKAPPGGGTTRTETSETEITTTEIIKRRDVGPYGIRSEYCIRKIICPIGVPETPKETPTPQRKGLRSSALRPKRPETPKQTGPVIIETWVAEEELELWEIRAFAERVEKEKAQAVEQQAKKRLEQQKPTVIATSTTSPTSSTTSTISPAQKVMVAPISGSVTTGTKMVLTTKVGSPATVTFQQNKNFHQTFATWVKQGQSNSGVVQVQQKVLGIIPSSTGTSQQTFTSFQPRTATVTIRPNTSGSGGTTSNSQVITGPQIRPGMTVIRTPLQQSTLGKAIIRTPVMVQPGAPQQVMTQIIRGQPVSTAVSAPNTVSSTPGQKSLTSATSTSNIQSSASQPPRPQQGQVKLTMAQLTQLTQGHGGNQGLTVVIQGQGQTTGQLQLIPQGVTVLPGPGQQLMQAAMPNGTVQRFLFTPLATTATTASTTTTTVSTTAAGTGEQRQSKLSPQMQVHQDKTLPPAQSSSVGPAEAQPQTAQPSAQPQPQTQPQSPAQPEVQTQPEVQTQTTVSSHVPSEAQPTHAQSSKPQVAAQSQPQSNVQGQSPVRVQSPSQTRIRPSTPSQLSPGQQSQVQTTTSQPIPIQPHTSLQIPSQGQPQSQPQVQSSTQTLSSGQTLNQVTVSSPSRPQLQIQQPQPQVIAVPQLQQQVQVLSQIQSQVVAQIQAQQSGVPQQIKLQLPIQIQQSSAVQTHQIQNVVTVQAASVQEQLQRVQQLRDQQQKKKQQQIEIKREHTLQASNQSEIIQKQVVMKHNAVIEHLKQKKSMTPAEREENQRMIVCNQVMKYILDKIDKEEKQAAKKRKREESVEQKRSKQNATKLSALLFKHKEQLRAEILKKRALLDKDLQIEVQVRGHILFFCVQCLTSEVLLFSLAFLIKLKISVCFLGTYICVHRVKKAVQPCVFFAKTSSGLFXNLN

SEQ ID NO: 1030243 - protein, 1202 aa, Homo sapiens
KGNDFFIDDSKLASADDIGTLICKNKKPLIQEESDTIVSSSKSALHSSVPKSTNDRDATPLSRAMDFEGKLGCDSESNSTLENSSDTVSIQDSSEEDMIVQNSNESISEQFRTREQDVEVLEPLKCELVSGESTGNCEDRLPVKGTEANGKKPSQQKKLEERPVNKCSDQIKLKNTTDKKNNENRESEKKGQRTSTFQINGKDNKPKIYLKGECLKEISESRVVSGNVEPKVNNINKIIPENDIKSLTVKESAIRPFINGDVIMEDFNERNSSETKSHLLSSSDAEGNYRDSLETLPSTKESDSTQTTTPSASCPESNSVNQVEDMEIETSEVKKVTSSPITSEEESNLSNDFIDENGLPINKNENVNGESKRKTVITEVTTMTSTVATESKTVIKVEKGDKQTVVSSTENCAKSTVTTTTTTVTKLSTPSTGGSVDIISVKEQSKTVVTTTVTDSLTIPREATGYIYDCEQRVFHTRQSETDVNFQDQRRLVQVQLCPSYRKFVTKSSKKSIFVLPNDDLKKLARKGGIREVPYFNYNAKPALDIWPYPSPRPTFGITWRYRLQTVKSLAGVSLMLRLLWASLRWDDMAAKAPPGGGTTRTETSETEITTTEIIKRRDVGPYGIRSEYCIRKIICPIGVPETPKETPTPQRKGLRSSALRPKRPETPKQTGPVIIETWVAEEELELWEIRAFAERVEKEKAQAVEQQAKKRLEQQKPTVIATSTTSPTSSTTSTISPAQKVMVAPISGSVTTGTKMVLTTKVGSPATVTFQQNKNFHQTFATWVKQGQSNSGVVQVQQKVLGIIPSSTGTSQQTFTSFQPRTATVTIRPNTSGSGGTTSNSQVITGPQIRPGMTVIRTPLQQSTLGKAIIRTPVMVQPGAPQQVMTQIIRGQPVSTAVSAPNTVSSTPGQKSLTSATSTSNIQSSASQPPRPQQGQVKLTMAQLTQLTQGHGGNQGLTVVIQGQGQTTGQLQLIPQGVTVLPGPGQQLMQAAMPNGTVQRFLFTPLATTATTASTTTTTVSTTAAGTGEQRQSKLSPQMQVHQDKTLPPAQSSSVGPAEAQPQTAQPSAQPQPQTQPQSPAQPEVQTQPEVQTQTTVSSHVPSEAQPTHAQSSKPQVAAQSQPQSNVQGQSPVRVQSPSQTRIRPSTPSQLSPLSQIPSYFISQTKFLNKGKVRWLMPVIPALWEAEAGRIMRSGDPDHPG

SEQ ID NO: 1030244 - protein, 403 aa, Homo sapiens
  misc_feature (3)..(4): Xaa can be any naturally occurring amino acid
ERXXGERTDATRRAPPRLRYENESRSGPAPAAPGPRPPEDRRQAAPPSPQLAPGRRRLAGPGRKGAGSRFAPPPRRDTRRRGPKPPGEAAGAGEALRLLRVYAVPAGLPGPLRRADRLGLGRPVSPARRSPGSAAASAPGARGSGEAVARDAALQVRLPGAPLRARRRGPPPGEDPAARYARGRRGRGRGQGGDRGRPGPHQPRPRLPAAKADKESFEKAYQVGAVLGSGGFGTVYAGSRIADGLPVAVKHVVKERVTEWGSLGGATVPLEVVLLRKVGAAGGARGVIRLLDWFERPDGFLLVLERPEPAQDLFDFITERGALDEPLARRFFAQVLAAVRHCHSCGVVHRDIKDENLLVDLRSGELKLIDFGSGALLKDTVYTDFDGERGRGAGNVPGPLPAG

SEQ ID NO: 1030245 - protein, 326 aa, Homo sapiens
MLLSKFGSLAHLCGPGGVDHLPVKILQPAKADKESFEKAYQVGAVLGSGGFGTVYAGSRIADGLPVAVKHVVKERVTEWGSLGGATVPLEVVLLRKVGAAGGARGVIRLLDWFERPDGFLLVLERPEPAQDLFDFITERGALDEPLARRFFAQVLAAVRHCHSCGVVHRDIKDENLLVDLRSGELKLIDFGSGALLKDTVYTDFDGTRVYSPPEWIRYHRYHGRSATVWSLGVLLYDMVCGDIPFEQDEEILRGRLLFRRRVSPECQQLIRWCLSLRPSERPSLDQIAAHPWMLGADGGAPESCDLRLCTLDPDDVASTTSSSESL

SEQ ID NO: 1030246 - protein, 356 aa, Homo sapiens
MPRGSRSAGSAASQPAGPCGSGAPGRPSPAMLLSKFGSLAHLCGPGGVDHLPVKILQPAKADKESFEKAYQVGAVLGSGGFGTVYAGSRIADGLPVAVKHVVKERVTEWGSLGGATVPLEVVLLRKVGAAGGARGVIRLLDWFERPDGFLLVLERPEPAQDLFDFITERGALDEPLARRFFAQVLAAVRHCHSCGVVHRDIKDENLLVDLRSGELKLIDFGSGALLKDTVYTDFDGTRVYSPPEWIRYHRYHGRSATVWSLGVLLYDMVCGDIPFEQDEEILRGRLLFRRRVSPECQQLIRWCLSLRPSERPSLDQIAAHPWMLGADGGAPESCDLRLCTLDPDDVASTTSSSESL

SEQ ID NO: 1030247 - protein, 326 aa, Homo sapiens; identical to SEQ ID NO: 1030245

SEQ ID NO: 1030248 - protein, 326 aa, Homo sapiens; identical to SEQ ID NO: 1030245

SEQ ID NO: 1030249 - protein, 155 aa, Homo sapiens
LLPVTEARELTSRDSPSVERLCLCGGRAKPCVPLGTRVYSPPEWIRYHRYHGRSATVWSLGVLLYDMVCGDIPFEQDEEILRGRLLFRRRVSPECQQLIRWCLSLRPSERPSLDQIAAHPWMLGADGGAPESCDLRLCTLDPDDVASTTSSSESL

SEQ ID NO: 1030250 - protein, 114 aa, Homo sapiens
MVCGDIPFEQDEEILRGRLLFRRRVSPGAVVARGGGGGLALPGPSLTSPLRTECQQLIRWCLSLRPSERPSLDQIAAHPWMLGADGGAPESCDLRLCTLDPDDVASTTSSSESL

SEQ ID NO: 1030251 - protein, 326 aa, Homo sapiens; identical to SEQ ID NO: 1030245

SEQ ID NO: 1030252 - protein, 326 aa, Homo sapiens; identical to SEQ ID NO: 1030245

SEQ ID NO: 1030253 - protein, 144 aa, Homo sapiens
MLLSKFGSLAHLCGPGGVDHLPVKILQPAKADKESFEKAYQVGAVLGSGGFGTVYAGSRIADGLPVAVKHVVKERVTEWGSLGGATVPLEVVLLRKVGAAGGARGVIRLLDWFERPDGFLLVLERPEPAQDLFDFITERDAPRP

SEQ ID NO: 1030254 - protein, 326 aa, Homo sapiens; identical to SEQ ID NO: 1030245

SEQ ID NO: 1030255 - protein, 279 aa, Homo sapiens
MLLSKFGSLAHLCGPGGVDHLPVKILQPAKADKESFEKAYQVGAVLGSGGFGTVYAGSRIADGLPVAVKHVVKERVTEWGSLGGATVPLEVVLLRKVGAAGGARGVIRLLDWFERPDGFLLVLERPEPAQDLFDFITERGALDEPLARRFFAQVLAAVRHCHSCGVVHRDIKDENLLVDLRSGELKLIDFGSGALLKDTVYTDFDGTRVYSPPEWIRYHRYHGRSATVWSLGVLLYDMVCGDIPFEQDEEILRGRLLFRRRVSPECQQLIRWRLPWVDT

SEQ ID NO: 1030256 - protein, 155 aa, Homo sapiens; identical to SEQ ID NO: 1030249

SEQ ID NO: 1030257 - protein, 326 aa, Homo sapiens; identical to SEQ ID NO: 1030245

SEQ ID NO: 1030258 - protein, 507 aa, Homo sapiens
  misc_feature (3)..(4): Xaa can be any naturally occurring amino acid
ERXXGERTDATRRAPPRLRYENESRSGPAPAAPGPRPPEDRRQAAPPSPQLAPGRRRLAGPGRKGAGSRFAPPPRRDTRRRGPKPPGEAAGAGEALRLLRVYAVPAGLPGPLRRADRLGLGRPVSPARRSPGSAAASAPGARGSGEAVARDAALQVRLPGAPLRARRRGPPPGEDPAARYARGRRGRGRGQGGDRGRPGPHQPRPRLPAAKADKESFEKAYQVGAVLGSGGFGTVYAGSRIADGLPVAVKHVVKERVTEWGSLGGATVPLEVVLLRKVGAAGGARGVIRLLDWFERPDGFLLVLERPEPAQDLFDFITERGALDEPLARRFFAQVLAAVRHCHSCGVVHRDIKDENLLVDLRSGELKLIDFGSGALLKDTVYTDFDGTRVYSPPEWIRYHRYHGRSATVWSLGVLLYDMVCGDIPFEQDEEILRGRLLFRRRVSPECQQLIRWCLSLRPSERPSLDQIAAHPWMLGADGGAPESCDLRLCTLDPDDVASTTSSSESL

SEQ ID NO: 1030259 - protein, 534 aa, Homo sapiens
  misc_feature (3)..(4): Xaa can be any naturally occurring amino acid
ERXXGERTDATRRAPPRLRYENESRSGPAPAAPGPRPPEDRRQAAPPSPQLAPGRRRLAGPGRKGAGSRFAPPPRRDTRRRGPKPPGEAAGAGEALRLLRVYAVPAGLPGPLRRADRLGLGRPVSPARRSPGSAAASAPGARGSGEAVARDAALQVRLPGAPLRARRRGPPPGEDPAARYARGRRGRGRGQGGDRGRPGPHQPRPRLPAAKADKESFEKAYQVGAVLGSGGFGTVYAGSRIADGLPVSRTAGRAGFLARLAPRLAGLTPASPQVAVKHVVKERVTEWGSLGGATVPLEVVLLRKVGAAGGARGVIRLLDWFERPDGFLLVLERPEPAQDLFDFITERGALDEPLARRFFAQVLAAVRHCHSCGVVHRDIKDENLLVDLRSGELKLIDFGSGALLKDTVYTDFDGTRVYSPPEWIRYHRYHGRSATVWSLGVLLYDMVCGDIPFEQDEEILRGRLLFRRRVSPECQQLIRWCLSLRPSERPSLDQIAAHPWMLGADGGAPESCDLRLCTLDPDDVASTTSSSESL

SEQ ID NO: 1030260 - protein, 326 aa, Homo sapiens; identical to SEQ ID NO: 1030245

SEQ ID NO: 1030261 - protein, 326 aa, Homo sapiens; identical to SEQ ID NO: 1030245

SEQ ID NO: 1030262 - protein, 326 aa, Homo sapiens; identical to SEQ ID NO: 1030245

SEQ ID NO: 1030263 - protein, 326 aa, Homo sapiens; identical to SEQ ID NO: 1030245

SEQ ID NO: 1030264 - protein, 351 aa, Homo sapiens
MLLSKFGSLAHLCGPGGVDHLPVKILQPAKADKESFEKAYQVGAVLGSGGFGTVYAGSRIADGLPVAVKHVVKERVTEWGSLGGATVPLEVVLLRKVGAAGGARGVIRLLDWFERPDGFLLVLERPEPAQDLFDFITERGALDEPLARRFFAQVLAAVRHCHSCGVVHRDIKDENLLVDLRSGELKLIDFGSGALLKDTVYTDFDGTRVYSPPEWIRYHRYHGRSATVWSLGVLLYDMVCGDIPFEQDEEILRGRLLFRRRVSPGAWWLEAGVGASPCLGSSLTSPLRTECQQLIRWCLSLRPSERPSLDQIAAHPWMLGADGGAPESCDLRLCTLDPDDVASTTSSSESL

SEQ ID NO: 1030265 - protein, 222 aa, Homo sapiens
MLLSKFGSLAHLCGPGGVDHLPVKILQPAKADKESFEKAYQVGAVLGSGGFGTVYAGSRIADGLPVAVKHVVKERVTEWGSLGGATVPLEVVLLRKVGAAGGARGVIRLLDWFERPDGFLLVLERPEPAQDLFDFITERGALDEPLARRFFAQVLAAVRHCHSCGVVHRDIKDENLLVDLRSGELKLIDFGSGALLKDTVYTDFDGERGRGAGNVPGPLPAG

SEQ ID NO: 1030266 - protein, 301 aa, Homo sapiens
MTTMAAATLLRATPHFSGLAAGRTFLLQGLLRLLKAPALPLLCRGLAVEAKKTYVRDKPHVNVGTIGHVDHGKTTLTAAITKILAEGGGAKFKKYEEIDNAPEERARGITINAAHVEYSTAARHYAHTDCPGHADYVKNMITGTAPLDGCILVVAANDGPMPQTREHLLLARQIGVEHVVVYVNKADAVQDSEMVELVELEIRELLTEVWYKGRRPSHRRLWSCALKVGPELGLNLEKLGCWASIQAPDENPGRGGTPGGRAGTNGKRRGGQKNGGRANDRRHRKKARPSAAPPGRTAMQG

SEQ ID NO: 1030267 - protein, 452 aa, Homo sapiens
MAAATLLRATPHFSGLAAGRTFLLQGLLRLLKAPALPLLCRGLAVEAKKTYVRDKPHVNVGTIGHVDHGKTTLTAAITKILAEGGGAKFKKYEEIDNAPEERARGITINAAHVEYSTAARHYAHTDCPGHADYVKNMITGTAPLDGCILVVAANDGPMPQTREHLLLARQIGVEHVVVYVNKADAVQDSEMVELVELEIRELLTEFGYKGEETPVIVGSALCALEGRDPELGLKSVQKLLDAVDTYIPVPARDLEKPFLLPVEAVYSVPGRGTVVTGTLERGILKKGDECELLGHSKNIRTVVTGIEMFHKSLERAEAGDNLGALVRGLKREDLRRGLVMVKPGSIKPHQKVEAQVYILSKEEGGRHKPFVSHFMPVMFSLTWDMACRIILPPEKELAMPGEDLKFNLILRQPMILEKGQRFTLRDGNRTIGTGLVTNTLAMTEEEKNIKWG

SEQ ID NO: 1030268 - protein, 452 aa, Homo sapiens; identical to SEQ ID NO: 1030267

SEQ ID NO: 1030269 - protein, 452 aa, Homo sapiens; identical to SEQ ID NO: 1030267

SEQ ID NO: 1030270 - protein, 211 aa, Homo sapiens
MTTMAAATLLRATPHFSGLAAGRTFLLQGLLRLLKAPALPLLCRGLAVEAKKTYVRDKPHVNVGTIGHVDHGKTTLTAAITKILAEGGGAKFKKYEEIDNAPEERARGITINAAHVEYSTAARHYAHTDCPGHADYVKNMITGTAPLDGCILVVAANDGPMPQTREHLLLARQIGVEHVVVYVNKADAVQDSEMVELVELEIRELLTEVWL

SEQ ID NO: 1030271 - protein, 145 aa, Homo sapiens [sequence omitted]

SEQ ID NO: 1030272 - protein, 309 aa, Homo sapiens
MTTMAAATLLRATPHFSGLAAGRTFLLQGLLRLLKAPALPLLCRGLAVEAKKTYVRDKPHVNVGTIGHVDHGKTTLTAAITKILAEGGGAKFKKYEEIDNAPEERARGITINAAHVEYSTAARHYAHTDCPGHADYVKNMITGTAPLDGCILVVAANDGPMPQTREHLLLARQIGVEHVVVYVNKADAVQDSEMVELVELEIRELLTEFGYKGEETPVIVGSALCALEGRDPELGLKSVQKLLDAVDTYIPVPARDLEKPFLLPVEAVYSVPGRGTVVTGTLERGILKKGDECELLGHSKNIRTVVTRH

SEQ ID NO: 1030273 - protein, 145 aa, Homo sapiens [sequence omitted]

SEQ ID NO: 1030274 - protein, 145 aa, Homo sapiens [sequence omitted]

SEQ ID NO: 1030275 - protein, 304 aa, Homo sapiens
  misc_feature (298)..(298): Xaa can be any naturally occurring amino acid
MTTMAAATLLRATPHFSGLAAGRTFLLQGLLRLLKAPALPLLCRGLAVEAKKTYVRDKPHVNVGTIGHVDHGKTTLTAAITKILAEGGGAKFKKYEEIDNAPEERARGITINAAHVEYSTAARHYAHTDCPGHADYVKNMITGTAPLDGCILVVAANDGPMPQTREHLLLARQIGVEHVVVYVNKADAVQDSEMVELVELEIRELLTEVWYKGRRPSHRGPSLALRSDLKLAEVGKSYGCGDLFMPRPENFGAVERYPPAGRGGTKGLNGRGPNKTLGYQRGTDTGTKAKREQASYGXLRRAAA

SEQ ID NO: 1030276 - protein, 343 aa, Homo sapiens
  misc_feature (337)..(337): Xaa can be any naturally occurring amino acid
RLGRGWGKSAEEVPSSRRRPSSSVRSGSWSRLPGYRGASMTTMAAATLLRATPHFSGLAAGRTFLLQGLLRLLKAPALPLLCRGLAVEAKKTYVRDKPHVNVGTIGHVDHGKTTLTAAITKILAEGGGAKFKKYEEIDNAPEERARGITINAAHVEYSTAARHYAHTDCPGHADYVKNMITGTAPLDGCILVVAANDGPMPQTREHLLLARQIGVEHVVVYVNKADAVQDSEMVELVELEIRELLTEVWYKGRRPSHRGPSLALRSDLKLAEVGKSYGCGDLFMPRPENFGAVERYPPAGRGGTKGLNGRGPNKTLGYQRGTDTGTKAKREQASYGXLRRAAA

SEQ ID NO: 1030277 - protein, 211 aa, Homo sapiens; identical to SEQ ID NO: 1030270

SEQ ID NO: 1030278 - protein, 211 aa, Homo sapiens; identical to SEQ ID NO: 1030270

SEQ ID NO: 1030279 - protein, 321 aa, Homo sapiens
  misc_feature (198)..(198): Xaa can be any naturally occurring amino acid
MTTMAAATLLRATPHFSGLAAGRTFLLQGLLRLLKAPALPLLCRGLAVEAKKTYVRDKPHVNVGTIGHVDHGKTTLTAAITKILAEGGGAKFKKYEEIDNAPEERARGITINAAHVEYSTAARHYAHTDCPGHADYVKNMITGTAPLDGCILVVAANDGPMPQTREHLLLARQIGVEHVVVYVNKADAVQDSENWGGXGGKKPFGGLGKTGRSREPAHRVCAIKEEETPVIVGSALCALEGRDPELGLKSVQKLLDAVDTYIPVPARDLEKPFLLPVEAVYSVPGRGTVVTGTLERGILKKGDECELLGHSKNIRTVVTRH

SEQ ID NO: 1030280 - protein, 145 aa, Homo sapiens [sequence omitted]

SEQ ID NO: 1030281 - protein, 145 aa, Homo sapiens [sequence omitted]

SEQ ID NO: 1030282 - protein, 452 aa, Homo sapiens; identical to SEQ ID NO: 1030267

SEQ ID NO: 1030283 - protein, 452 aa, Homo sapiens; identical to SEQ ID NO: 1030267

SEQ ID NO: 1030284 - protein, 452 aa, Homo sapiens; identical to SEQ ID NO: 1030267

SEQ ID NO: 1030285 - protein, 197 aa, Homo sapiens
MDVGSKEVLMESPPDYSAAPRGRFGIPCCPVHLKRLLIVVVVVVLIVVVIVGALLMGLHMSQKHTEMVLEMSIGAPEAQQRLALSEHLVTTATFSIGSTGLVVYDYQQLLIAYKPAPGTCCYIMKIAPESIPSLEALNRKVHNFQMECSLQAKPAVPTSKLGQAEGRDAGSAPSGGDPAFLGMAVNTLCGEVPLYYI

SEQ ID NO: 1030286 - protein, 102 aa, Homo sapiens
MASMCVYYNEPTRTLRSMVLEMSIGAPEAQQRLALSEHLVTTATFSIGSTGLVVYDYQQLLIAYKPAPGTCCYIMKIAPESIPSLEHPVWRGAALLHLGRLR

SEQ ID NO: 1030287 - protein, 191 aa, Homo sapiens
MDVGSKEVLMESPPDYSAAPRGRFGIPCCPVHLKRLLIVVVVVVLIVVVIVGALLMGLHMSQKHTEMVLEMSIGAPEAQQRLALSEHLVTTATFSIGSTGLVVYDYQQLLIAYKPAPGTCCYIMKIAPESIPSLEALTRKVHNFQAKPAVPTSKLGQAEGRDAGSAPSGGDPAFLGMAVSTLCGEVPLYYI

SEQ ID NO: 1030288 - protein, 143 aa, Homo sapiens
MGLHMSQKHTEMVLEMSIGAPEAQQRLALSEHLVTTATFSIGSTGLVVYDYQQLLIAYKPAPGTCCYIMKIAPESIPSLEALTRKVHNFFQMECSLQAKPAVPTSKLGQAEGRDAGSAPSGGDPAFLGMAVSTLCGEVPLYYI

SEQ ID NO: 1030289 - protein, 198 aa, Homo sapiens
MDVGSKEVLMESPPDYSAAPRGRFGIPCCPVHLKRLLIVVVVVVLIVVVIVGALLMGLHMSQKHTEMVLEMSIGAPEAQQRLALSEHLVTTATFSIGSTGLVVYDYQQLLIAYKPAPGTCCYIMKIAPESIPSLEALTRKVHNFFQMECSLQAKPAVPTSKLGQAEGRDAGSAPSGGDPAFLGMAVSTLCGEVPLYYI

SEQ ID NO: 1030290 - protein, 230 aa, Homo sapiens
KEDEEQHSSVQREMDCVACNIGFLDWRRTDETLRPVSYAGGRILAFPAARWHLEASCIYIVDEWMVGYRNRSVSRISWRDALTAVGVYSSSCQAKTLEMVLEMSIGAPEAQQRLALSEHLVTTATFSIGSTGLVVYDYQQLLIAYKPAPGTCCYIMKIAPESIPSLEALTRKVHNFFQMECSLQAKPAVPTSKLGQAEGRDAGSAPSGGDPAFLGMAVSTLCGEVPLYYI

SEQ ID NO: 1030291 - protein, 151 aa, Homo sapiens
MDVGSKEVLMESPPDYSAAPRGRFGIPCCPVHLKRLLIVVVVVVLIVVVIVGALLMGLHMSQKHTEMVLEMSIGAPEAQQRLALSEHLVTTATFSIGSTGLVVYDYQQLLIAYKPAPGTCCYIMKIAPESIPSLEALTRKVHNFFQVCVCG

SEQ ID NO: 1030292 - protein, 191 aa, Homo sapiens; identical to SEQ ID NO: 1030287

SEQ ID NO: 1030293 - protein, 108 aa, Homo sapiens
MRRGEHSTCSKMDVGSKEVLMESPPDYSAAPRGRFGIPCCPVHLKRLLIVVVVVVLIVVVIVGALLMGLHMSQKHTEMVLEMSIGAPEAQQRLASAPLASWCMTTSSC

SEQ ID NO: 1030294 - protein, 151 aa, Homo sapiens; identical to SEQ ID NO: 1030291

SEQ ID NO: 1030295 - protein, 150 aa, Homo sapiens
MDVGSKEVLMESPPDYSAAPRGRFGIPCCPVHLKRLLIVVVVVVLIVVVIVGALLMGLHMSQKHTEMVLEMSIGAPEAQQRLALSEHLVTTATFSIGSTGLVVYDYQQLLIAYKPAPGTCCYIMKIAPESIPSLEALTRKVHNFSTAPLY

SEQ ID NO: 1030296 - protein, 103 aa, Homo sapiens
MDVGSKEVLMESPPDYSAAPRGRFGIPCCPVHLKRLLIVVVVVVLIVVVIVGALLMGLHMSQKHTEMVLEMSIGAPEAQQRLALSEHLVTTATFSAIEVWEPA

SEQ ID NO: 1030297 - protein, 285 aa, Homo sapiens
MDVGSKEVLMESPPDYSAAPRGRFGIPCCPVHLKRLLIVVVVVVLIVVVIVGAPTGKETPRAKGLLQLLQTGKKLLLPTPRVLMGLHMSQKHTEMVLEMSIGAPEAQQRLALSEHLVTTATFSIGSTGLVVYDYQQLLIAYKPAPGTCCYIMKIAPESIPSLEALTRKVHNFFQMECSLQAKPAVPTSKLGQAEGRDAGSAPSGGDPAFLGMAVSPCVARGGLIIRAPVSRSVETQGFRQTDKPVKQKRKKKLARAKLTLGGPKKWSPNGKGSTSGGKKCGNPTP

SEQ ID NO: 1030298 - protein, 198 aa, Homo sapiens; identical to SEQ ID NO: 1030289

SEQ ID NO: 1030299 - protein, 191 aa, Homo sapiens; identical to SEQ ID NO: 1030287

SEQ ID NO: 1030300 - protein, 168 aa, Homo sapiens
SARYLNLEVVVVVVLIVVVIVGALLMGLHMSQKHTEMVLEMSIGAPEAQQRLALSEHLVTTATFSIGSTGLVVYDYQQLLIAYKPAPGTCCYIMKIAPESIPSLEALTRKVHNFFQMECSLQAKPAVPTSKLGQAEGRDAGSAPSGGDPAFLGMAVSTLCGEVPLYYI

SEQ ID NO: 1030301 - protein, 145 aa, Homo sapiens
MDVGSKEVLMESPPVLEMSIGAPEAQQRLALSEHLVTTATFSIGSTGLVVYDYQQLLIAYKPAPGTCCYIMKIAPESIPSLEALTRKVHNFFQMECSLQAKPAVPTSKLGQAEGRDAGSAPSGGDPAFLGMAVSTLCGEVPLYYI

SEQ ID NO: 1030302 - protein, 132 aa, Homo sapiens
MVLEMSIGAPEAQQRLALSEHLVTTATFSIGSTGLVVYDYQQLLIAYKPAPGTCCYIMKIAPESIPSLEALTRKVHNFFQMECSLQAKPAVPTSKLGQAEGRDAGSAPSGGDPAFLGMAVSTLCGEVPLYYI

SEQ ID NO: 1030303 - protein, 150 aa, Homo sapiens; identical to SEQ ID NO: 1030295

SEQ ID NO: 1030304 - protein, 123 aa, Homo sapiens
YLHDVAAGRRGWLVGASECWESYTTFSIGSTGLVVYDYQQLLIAYKPAPGTCCYIMKIAPESIPSLEALTRKVHNFQAKPAVPTSKLGQAEGRDAGSAPSGGDPAFLGMAVSTLCGEVPLYYI

SEQ ID NO: 1030305 - protein, 239 aa, Homo sapiens
MDVGSKEVLMESPPDYSAAPRGRFGIPCCPVHLKRLLIVVVVVVLIVVVIVGALLMGLHMSQKHTEMVLEMSIGAPEAQQRLALSEHLVTTATFSIGSTGLVVYDYQQLLIAYKPAPGTCCYIMKIAPESIPSLEALTRKVHNFQAKPAVPTSKPPCVARCRSTTSRTPPVSRVSGSPNGKGNAPGKGSFAAFADGQEAASAHTAGTSPGEMGAWGEDGSGQRWRPGARELLPQQNKAA

SEQ ID NO: 1030306 - protein, 82 aa, Homo sapiens
SSARLQLNTGSEAAFSPSFSAVIVQVHNFQMECSLQAKPAVPTSKLGQAEGRDAGSAPSGGDPAFLGMAVSTLCGEVPLYYI

SEQ ID NO: 1030307 - protein, 157 aa, Homo sapiens
MDVGSKEVLMESPPVLEMSIGAPEAQQRLALSEHLVTTATFSIGSTGLVVYDYQQLLIAYKPAPGTCCYIMKIAPESIPSLEALTRKVHNFVSGSPNGKGNAPGKGSFAAFADGQEAASAHTAGTSPGEMGAWGEDGSGQRWRPGARELLPQQNKAA

SEQ ID NO: 1030308 - protein, 253 aa, Homo sapiens [sequence omitted]

SEQ ID NO: 1030309 - protein, 113 aa, Homo sapiens
MLYFSLFWAARPLQRCGQLVRMAIRAQHSNAAQTQTGEANRGWTGQESLSDSDPEMWELLQRENGQAVSWPGAHCLRELLQPSCAGGPGVLSEQQVLGGLSWQEILWGSRGGG

SEQ ID NO: 1030310 - protein, 113 aa, Homo sapiens; identical to SEQ ID NO: 1030309

SEQ ID NO: 1030311 - protein, 253 aa, Homo sapiens [sequence omitted]

SEQ ID NO: 1030312 - protein, 504 aa, Homo sapiens
MLYFSLFWAARPLQRCGQLVRMAIRAQHSNAAQTQTGEANRGWTGQESLSDSDPEMWELLQREKDRQCRGLELIASENFCSRAALEALGSCLNNKYSEGYPGKRYYGGAEVVDEIELLCQRRALEAFDLDPAQWGVNVQPYSGSPANLAVYTALLQPHDRIMGLDLPDGGHLTHGYMSDVKRISATSIFFESMPYKLNPKTGLIDYNQLALTARLFRPRLIIAGTSAYARLIDYARMREVCDEVKAHLLADMAHISGLVAAKVIPSPFKHADIVTTTTHKTLRGARSGLIFYRKGVKAVDPKTGREIPYTFEDRINFAVFPSLQGGPHNHAIAAVAVALKQACTPMFREYSLQVLKNARAMADALLERGYSLVSGGTDNHLVLVDLRPKGLDGARAERVLELVSITANKNTCPGDRSAITPGGLRLGAPALTSRQFREDDFRRVVDFIDEGVNIGLEVKSKTAKLQDFKSFLLKDSETSQRLANLRQRVEQFARAFPMPGFDEH

SEQ ID NO: 1030313 - protein, 504 aa, Homo sapiens; identical to SEQ ID NO: 1030312

SEQ ID NO: 1030314 - protein, 253 aa, Homo sapiens [sequence omitted]

SEQ ID NO: 1030315 - protein, 253 aa, Homo sapiens [sequence omitted]

SEQ ID NO: 1030316 - protein, 253 aa, Homo sapiens [sequence omitted]

SEQ ID NO: 1030317 - protein, 213 aa, Homo sapiens
MAHISGLVAAKVIPSPFKHADIVTTTTHKTLRGARSGLIFYRKGVKAVDPKTGREIPYTFEDRINFAVFPSLQGGPHNHAIAAVAVALKQACTPMFREYSLQVLKNARAMADALLERGYSLVSGGTDNHLVLVDLRPKGLDGARAERVLELVSITANKNTCPGDRSAITPGGLRLGAPALTSRQFREDDFRRVVDFIDEGVNIGLEVKSKTGE

SEQ ID NO: 1030318 - protein, 219 aa, Homo sapiens
MAHISGLVAAKVIPSPFKHADIVTTTTHKTLRGARSGLIFYRKGVKAVDPKTGREIPYTFEDRINFAVFPSLQGGPHNHAIAAVAVALKQACTPMFREYSLQVLKNARAMADALLELVSITANKNTCPGDRSAITPGGLRLGAPALTSRQFREDDFRRVVDFIDEGVNIGLEVKSKTAKLQDFKSFLLKDSETSQRLANLRQRVEQFARAFPMPGFDEH

SEQ ID NO: 1030319 - protein, 254 aa, Homo sapiens
MAHISGLVAAKVIPSPFKHADIVTTTTHKTLRGARSGLIFYRKGVKAVDPKTGREIPYAQFEERIKFAVFPSLQGGPHNHAIAAVAVALKQACTPMFREYSLQVLKNARAMADALLERGYSLVSGGTDNHLVLVDLRPKGLDGARAERVLELVSITANKNTCPGDRSAITPGGLRLGAPALTSRQFREDDFRRVVDFIDEGVNIGLEVKSKTAKLQDFKSFLLKDSETSQRLANLRQRVEQFARAFPMPGFDEH

SEQ ID NO: 1030320 - protein, 259 aa, Homo sapiens
MAHISGLVAAKVIPSPFKHADIVTTTTHKTLRGARSGLIFYRKGVKAVDPKTGREIPYTFEDRINFAVFPSLQGGPHNHAIAAVAVALKQACTPMFREYSLQVLKNARAMADALLERGYSLVSGGTDNHLVLVDLRPKGLDGARAERVLELVSITANKNTCPGDRSAITPGGLRLGAPALTSRQFREDDFRRVVDFIDEGVNIGLEVKSKTAKLQDFKSFLLKDSETSQRLVLMSIEGTWEMRPTDSKLLSFPLPGPVK

SEQ ID NO: 1030321 - protein, 257 aa, Homo sapiens
MLASFDYARMREAYSWGTVGLDLRGIHSHLQPLRLLAQLSGLIFYRKGVKAVDPKTGREIPYTFEDRINFAVFPSLQGGPHNHAIAAVAVALKQACTPMFREYSLQVLKNARAMADALLERGYSLVSGGTDNHLVLVDLRPKGLDGARAERVLELVSITANKNTCPGDRSAITPGGLRLGAPALTSRQFREDDFRRVVDFIDEGVNIGLEVKSKTAKLQDFKSFLLKDSETSQRLANLRQRVEQFARAFPMPGFDEH

SEQ ID NO: 1030322 - protein, 253 aa, Homo sapiens [sequence omitted]

SEQ ID NO: 1030323 - protein, 229 aa, Homo sapiens
DASTSWVKSDEAELVAGPPATSELRCCTSLCFGRLGLCRDVGSWSGWPFGLSTATQPRLRLGKQTGAGQARRACRTVILRCGSCCRGRMDRQCRGLELIASENFCSRAALEALGSCLNNKYSEGYPGKRYYGGAEVVDDTLSCCASCLGLGKPFDHGSCTDGESNVQTLLQGPQPNLAVIHRPFLQTSRPDHGGLDLARWGAISPTAYIVLTVEADIKPRPSSSEVYAL

SEQ ID NO: 1030324 - protein, 294 aa, Homo sapiens
MPYKSSKPQNWPHLTTNQLALETDCRLFRHGHHSWHHSAYARLIDYARMREVCDEVKAHLLADMAHISGLVAAKVIPSPFKHADIVTTTTHKTLRGASYTFEDRINFAVFPSLQGGPHNHAIAAVAVALKQACTPMFREYSLQVLKNARAMADALLERGYSLVSGGTDNHLVLVDLRPKGLDGARAERVLELVSITANKNTCPGDRSAITPGGLRLGAPALTSRQFREDDFRRVVDFIDEGVNIGLEVKSKTAKLQDFKSFLLKDSETSQRLANLRQRVEQFARAFPMPGFDEH

SEQ ID NO: 1030325 - protein, 229 aa, Homo sapiens; identical to SEQ ID NO: 1030323

SEQ ID NO: 1030326 - protein, 253 aa, Homo sapiens [sequence omitted]

SEQ ID NO: 1030327 - protein, 141 aa, Homo sapiens
MDRQCRGLELIASENFCSRAALEALGSCLNNKYSEGYPGKRYYGGAEVVDDTLSCCASCLGLGKPFDHGSCTDGESNVQTLLQGPQPNLAVIHRPFLQTSRPDHGGLDLARWGAISPTAYIVLTVEADIKPRPSSSEVYAL

SEQ ID NO: 1030328 - protein, 114 aa, Homo sapiens
PTPPEITRVGGWTSCDFRVAMLYFSLFWAARPLQRCGQLVRMAIRAQHSNAAQTQTGEANRGWTGQESLSDSDPEMWELLQRENGQAVSWPGAHCLRGGTWGDGQGLGHHGYRK

SEQ ID NO: 1030329 - protein, 253 aa, Homo sapiens [sequence omitted]

SEQ ID NO: 1030330 - protein, 253 aa, Homo sapiens [sequence omitted]

SEQ ID NO: 1030331 - protein, 253 aa, Homo sapiens [sequence omitted]

SEQ ID NO: 1030332 - protein, 159 aa, Homo sapiens [sequence omitted]

SEQ ID NO: 1030333 - protein, 238 aa, Homo sapiens
MAHISGLVAAKVIPSPFKHADIVTTTTHKTLRGASKTGREIPYTFEDRINFAVFPSLQGGPHNHAIAAVAVALKQACTPMFREYSLQVLKNARAMADALLERGYSLVSGGTDNHLVLVDLRPKGLDGARAERVLELVSITANKNTCPGDRSAITPGGLRLGAPALTSRQFREDDFRRVVDFIDEGVNIGLEVKSKTAKLQDFKSFLLKDSETSQRLANLRQRVEQFARAFPMPGFDEH

SEQ ID NO: 1030334 - protein, 174 aa, Homo sapiens
MAHISGLVAAKVIPSPFKHADIVTTTTHKTLRGARSGLIFYRKGVKAVDPKTGREIPYTFEDRINFAVFPSLQGGPHNHAIAAVAVALKQACTPMFREYSLQVLKNARAMADALLERGYSLVSGGTDNHLVLVDLRPKGLDGARAERVLELVSITANEHLGDPSRSTAAASACP

SEQ ID NO: 1030335 - protein, 229 aa, Homo sapiens; identical to SEQ ID NO: 1030323

SEQ ID NO: 1030336 - protein, 253 aa, Homo sapiens [sequence omitted]

SEQ ID NO: 1030337 - protein, 144 aa, Homo sapiens [sequence omitted]

SEQ ID NO: 1030338 - protein, 229 aa, Homo sapiens; identical to SEQ ID NO: 1030323

SEQ ID NO: 1030339 - protein, 178 aa, Homo sapiens
MAPSLSPGPAALRRAPQLLLLLLAAECALAALLPAREATQFLRPRQRRAFQVFEEAKQGHLERECVEELCSREEAREVFENDPETDYFYPRYLDCINKYGSPYTKNSGFSVSVRDSREEPGGSSPRGAMLRAGLSSVTIPACNISVNSEMDLGPLTPRTQPWARARGGRRSAERARRK

SEQ ID NO: 1030340 - protein, 98 aa, Homo sapiens
QPYCPGPPVPAWEPVCALDSPACCRKIIQAVVPDPITWLYLRYKHNIHRGLVAFPEVGLDYNLHLYPHLHDLGPLTPRTQPWARARGGRRSAERARRK

SEQ ID NO: 1030341 - protein, 133 aa, Homo sapiens
ACGVGVASSCEDQLGPNSSRRGGRQALTTPGLLQLVVLAVEHTALALMEIKVCDGQEHVVTVSLRDGEATLEVDGTRGQSEVSAAQLQERLAVLERHLRSPVLTFAGGLQVGAPCFAHPGEELQGGPAWSPQI

SEQ ID NO: 1030342 - protein, 551 aa, Homo sapiens
  misc_feature (1)..(1): Xaa can be any naturally occurring amino acid
XVPPRQVALQGNFFCLCKAGWGGRLCDKDVNECSQENGGCLQICHNKPGSFHCSCHSGFELSSDGRTCQDIDECADSEACGEARCKNLPGSYSCLCDEGFAYSSQEKACRDVDECLQGRCEQVCVNSPGSYTCHCDGRGGLKLSQDMDTCEDILPCVPFSVAKSVKSLYLGRMFSGTPVIRLRFKRLQPTRLVAEFDFRTFDPEGILLFAGGHQDSTWIVLALRAGRLELQLRYNGVGRVTSSGPVINHGMWQTISVEELARNLVIKVNRDAVMKIAVAGDLFQPERGLYHLNLTVGGIPFHEKDLVQPINPRLDGCMRSWNWLNGEDTTIQETVKVNTRMQCFSVTERGSFYPGSGFAFYSLDYMRTPLDVGTESTWEVEVVAHIRPAADTGVLFALWAPDLRAVPLSVALVDYHSTKKLKKQLVVLAVEHTALALMEIKVCDGQEHVVTVSLRDGEATLEVDGTRGQSEVSAAQLQERLAVLERHLRSPVLTFAGGLPDVPVTSAPVTAFYRGCMTLEVNRRLLDLDEAAYKHSDITAHSCPPVEPAAA

SEQ ID NO: 1030343 - protein, 658 aa, Homo sapiens
MAPSLSPGPAALRRAPQLLLLLLAAECALAALLPAREATQFLRPRQRRAFQVFEEAKQGHLERECVEELCSREEAREVFENDPETDYFYPRYLDCINKYGSPYTKNSGFATCVQNLPDQCTPNPCDRKGTQACQDLMGNFFCLCKAGWGGRLCDKDVNECSQENGGCLQICHNKPGSFHCSCHSGFELSSDGRTCQDIDECADSEACGEARCKNLPGSYSCLCDEGFAYSSQEKACRDVDECLQGRCEQVCVNSPGSYTCHCDGRGGLKLSQDMDTCEDILPCVPFSVAKSVKSLYLGRMFSGTPVIRLRFKRLQPTRLVAEFDFRTFDPEGILLFAGGHQDSTWIVLALRAGRLELQLRYNGVGRVTSSGPVINHGMWQTISVEELARNLVIKVNRDAVMKIAVAGDLFQPERGLYHLNLTVGGIPFHEKDLVQPINPRLDGCMRSWNWLNGEDTTIQETVKVNTRMQCFSVTERGSFYPGSGFAFYSLDYMRTPLDVGTESTWEVEVVAHIRPAADTGVLFALWAPDLRAVPLSVALVDYHSTKKLKKQLVVLAVEHTALALMEIKVCDGQEHVVTVSLRDGEATLEVDGTRGQSEVSAAQLQETDVPVTSAPVTAFYRGCMTLEVNRRLLDLDEAAYKHSDITAHSCPPVEPAAA

SEQ ID NO: 1030344 - protein, 650 aa, Homo sapiens
MAPSLSPGPAALRRAPQLLLLLLAAECALAALLPAREATQFLRPRQRRAFQVFEEAKQGHLERECVEELCSREEAREVFENDPETDYFYPRYLDCINKYGSPYTKNSGFATCVQNLPDQCTPNPCDRKGTQACQDLMGNFFCLCKAGWGGRLCDKDVNECSQENGGCLQICHNKPGSFHCSCHSGFELSSDGRTCQDIDECADSEACGEARCKNLPGSYSCLCDEGFAYSSQEKACRDVDECLQGRCEQVCVNSPGSYTCHCDGRGGLKLSQDMDTCEDILPCVPFSVAKSVKSLYLGRMFSGTPVIRLRFKRLQPTRLVAEFDFRTFDPEGILLFAGGHQDSTWIVLALRAGRLELQLRYNGVGRVTSSGPVINHGMWQTISVEELARNLVIKVNRDAVMKIAVAGDLFQPERGLYHLNLTVGGIPFHEKDLVQPINPRLDGCMRSWNWLNGEDTTIQETVKVNTRMQCFSVTERGSFYPGSGFAFYSLDYMRTPLDVGTESTWEVEVVAHIRPAADTGVLFALWAPDLRAVPLSVALVDYHSTKKLKKQLVVLAVEHTALALMEIKVCDGQEHVVTVSLRDGEATLEVDGTRGQSEVSAAQLQERLAVLERHLRSPVLTFAGGLQVGAPCFAHPGEELQGGPAWSPQI

SEQ ID NO: 1030345 - protein, 429 aa, Homo sapiens
MAPSLSPGPAALRRAPQLLLLLLAAECALAALLPAREATQFLRPRQRRAFQVFEEAKQGHLERECVEELCSREEAREVFENDPETDYFYPRYLDCINKYGSPYTKNSGFATCVQNLPDQCTPNPCDRKGTQACQDLMGNFFCLCKAGWGGRLCDKDVNECSQENGGCLQICHNKPGSFHCSCHSGFELSSDGRTCQDIDECADSEACGEARCKNLPGSYSCLCDEGFAYSSQEKACRDVDECLQGRCEQVCVNSPGSYTCHCDGRGGLKLSQDMDTCEDILPCVPFSVAKSVKSLYLGRMFSGTPVIRLRFKRLQPTRLVAEFDFRTFDPEGILLFAGGHQDSTWIVLALRAGRLELQLRYNGVGRVTSSGPVINHGMWQTISVEELARNLVIKVNRDAVMKIAVAGDLFQPERGARGGRRSAERARRK

SEQ ID NO: 1030346 - protein, 114 aa, Homo sapiens
MAPSLSPGPAALRRAPQLLLLLLAAECALAALLPAREATQFLRPRQRRAFQVFEEAKQGHLERECVEELCSREEAREVFENDPETDYFYPRYLALFRVSGTSGECCYLQTPSLS

SEQ ID NO: 1030347 - protein, 89 aa, Homo sapiens
  misc_feature (8)..(8): Xaa can be any naturally occurring amino acid
  misc_feature (16)..(16): Xaa can be any naturally occurring amino acid
  misc_feature (22)..(22): Xaa can be any naturally occurring amino acid
DGHRGKPXLSAWPHVXEEPPGXSRLSRTETEKPAASRGAMLRAGLSSVTIPACNISVNSEMDLGPLTPRTQPWARARGGRRSAERARRK

SEQ ID NO: 1030348 - protein, 132 aa, Homo sapiens
MSLLACSLLRSQGLCTLGLPFRPVLFPDVNECSQENGGCLQICHNKPGSFHCSCHSGFELSSDGRTLRVVVSNRGVIPRRDSVEASPATAASLWLADVDECLQGRCEQVCVNSPGSYTCHCDGRGGLKLSHR

SEQ ID NO: 1030349 - protein, 337 aa, Homo sapiens
MAPSLSPGPAALRRAPQLLLLLLAAECALAALLPAREATQFLRPRQRRAFQVFEEAKQGHLERECVEELCSREEAREVFENDPETDYFYPRYLDCINKYGSPYTKNSGFATCVQNLPDQCTPNPCDRKGTQACQDLMGNFFCLCKAGWGGRLCDKDVNECSQENGGCLQICHNKPGSFHCSCHSGFELSSDGRTCQDIDECADSEACGEARCKNLPGSYSCLCDEGFAYSSQEKACRDVDECLQGRCEQVCVNSPGSYTCHCDGRGGLKLSQDMDTCEDILPCVPFSVAKSVKSLYLGRMFSGTPVIRLRFKRLQPTRSLLRSWRGIWSSRSTGMLS

SEQ ID NO: 1030350 - protein, 340 aa, Homo sapiens
ARYPVDRNALALRAARLELQLRYNGVGRVTSSGPVINHGMWQTISVEELARNLVIKVNRDAVMKIAVAGDLFQPERGLYHLNLTVGGIPFHEKDLVQPINPRLDGCMRSWNWLNGEDTTIQETVKVNTRMQCFSVTERGSFYPGSGFAFYSLDYMRTPLDVGTESTWEVEVVAHIRPAADTGVLFALWAPDLRAVPLSVALVDYHSTKKLKKQLVVLAVEHTALALMEIKVCDGQEHVVTVSLRDGEATLEVDGTRGQSEVSAAQLQERLAVLERHLRSPVLTFAGGLPDVPVTSAPVTAFYRGCMTLEVNRRLLDLDEAAYKHSDITAHSCPPVEPAAA

SEQ ID NO: 1030351 - protein, 634 aa, Homo sapiens
MAPSLSPGPAALRRAPQLLLLLLAAECALAALLPAREATQFLRPRQRRAFQVFEEAKQGHLERECVEELCSREEAREVFENDPETDYFYPRYLDCINKYGSPYTKNSGFATCVQNLPDQCTPNPCDRKGTQACQDLMGNFFCLCKAGWGGRLCDKDVNECSQENGGCLQICHNKPGSFHCSCHSGFELSSDGRTCQDIDECADSEACGEARCKNLPGSYSCLCDEGFAYSSQEKACRDVDECLQGRCEQVCVNSPGSYTCHCDGRGGLKLSQDMDTCEDILPCVPFSVAKSVKSLYLGRMFSGTPVIRLRFKRLQPTRLVAEFDFRTFDPEGILLFAGGHQDSTWIVLALRAGRLELQLRYNGVGRVTSSGPVINHGMWQTISVEELARNLVIKVNRDAVMKIAVAGDLFQPERGLYHLNLTVGGIPFHEKDLVQPINPRLDGCMRSWNWLNGEDTTIQETVKVNTRMQCFSVTERGSFYPGSGFAFYSLDYMRTPLDVGTESTWEVEVVAHIRPAADTGVLFALWAPDLRAVPLSVALVDYHSTKKLKKQLVVLAVEHTALALMEIKVCDGQEHVVTVSLRDGEATLEVDGTRGQSEVSAAQLQERLLDLDEAAYKHSDITAHSCPPVEPAAA

SEQ ID NO: 1030352 - protein, 634 aa, Homo sapiens; identical to SEQ ID NO: 1030351

SEQ ID NO: 1030353 - protein, 560 aa, Homo sapiens
MAPSLSPGPAALRRAPQLLLLLLAAECALAALLPAREATQFLRPRQRRAFQVFEEAKQGHLERECVEELCSREEAREVFENDPETDYFYPRYLDCINKYGSPYTKNSGFATCVQNLPDQCTPNPCDRKGTQACQDLMGNFFCLCKAGWGGRLCDKDVNECSQENGGCLQICHNKPGSFHCSCHSGFELSSDGRTCQDIDECADSEACGEARCKNLPGSYSCLCDEGFAYSSQEKACRDVDECLQGRCEQVCVNSPGSYTCHCDGRGGLKLSQDMDTCEDILPCVPFSVAKSVKSLYLGRMFSGTPVIRLRFKRLQPTRLVAEFDFRTFDPEGILLFAGGHQDSTWIVLALRAGRLELQLRYNGVGRVTSSGPVINHGMWQTISVEELARNLVIKVNRDAVMKIAVAGDLFQPERGLYHLNLTVGGIPFHEKDLVQPINPRLDGCMRSWNWLNGEDTTIQETVKVNTRMQCFSVTERGSFYPGSGFAFYSLDYMRTPLDVGTESTWEVEVVAHIRPAADTGVLFALWAPDLRAVPLSVALVDYHSTKKLKKQVGPPPPRAS

SEQ ID NO: 1030354 - protein, 378 aa, Homo sapiens
MAPSLSPGPAALRRAPQLLLLLLAAECALAALLPAREATQFLRPRQRRAFQVFEEAKQGHLERECVEELCSREEAREVFENDPETDYFYPRYLDCINKYGSPYTKNSGFATCVQNLPDQCTPNPCDRKGTQACQDLMGNFFCLCKAGWGGRLCDKDVNECSQENGGCLQICHNKPGSFHCSCHSGFELSSDGRTCQDIDECADSEACGEARCKNLPGSYSCLCDEGFAYSSQEKACRDVDECLQGRCEQVCVNSPGSYTCHCDGRGGLKLSQDMDTCEDILPCVPFSVAKSVKSLYLGRMFSGTPVIRLRFKRLQPTRLVAEFDFRTFDPEGILLFAGGHQDSTWIVLALRAGRLELQLRYNGVGRYHAALRYRARFD

SEQ ID NO: 1030355 - protein, 678 aa, Homo sapiens
MAPSLSPGPAALRRAPQLLLLLLAAECALAALLPAREATQFLRPRQRRAFQVFEEAKQGHLERECVEELCSREEAREVFENDPETDYFYPRYLDCINKYGSPYTKNSGFATCVQNLPDQCTPNPCDRKGTQACQDLMGNFFCLCKAGWGGRLCDKDVNECSQENGGCLQICHNKPGSFHCSCHSGFELSSDGRTCQDIDECADSEACGEARCKNLPGSYSCLCDEGFAYSSQEKACRDVDECLQGRCEQVCVNSPGSYTCHCDGRGGLKLSQDMDTCEDILPCVPFSVAKSVKSLYLGRMFSGTPVIRLRFKRLQPTRLVAEFDFRTFDPEGILLFAGGHQDSTWIVLALRAGRLELQLRYNGVGRVTSSGPVINHGMWQTISVEELARNLVIKVNRDAVMKIAVAGDLFQPERGLYHLNLTVGGIPFHEKDLVQPINPRLDGCMRSWNWLNGEDTTIQETVKVNTRMQCFSVTERGSFYPGSGFAFYSLDYMRTPLDVGTESTWEVEVVAHIRPAADTGVLFALWAPDLRAVPLSVALVDYHSTKKLKKQLVVLAVEHTALALMEIKVCDGQEHVVTVSLRDGEATLEVDGTRGQSEVSAAQLQERLAVLERHLRSPVLTFAGGLPDVPVTSAPVTAFYRGCMTLEVNRRLLDLDEAAYKHSDITAHSCPPVEPAAA

SEQ ID NO: 1030356 - protein, 678 aa, Homo sapiens; identical to SEQ ID NO: 1030355

SEQ ID NO: 1030357 - protein, 678 aa, Homo sapiens; identical to SEQ ID NO: 1030355

SEQ ID NO: 1030358 - protein, 614 aa, Homo sapiens
GRVGRHAVRLLRRASLCWAETDYFYPRYLDCINKYGSPYTKNSGFATCVQNLPDQCTPNPCDRKGTQACQDLMGNFFCLCKAGWGGRLCDKDVNECSQENGGCLQICHNKPGSFHCSCHSGFELSSDGRTCQDIDECADSEACGEARCKNLPGSYSCLCDEGFAYSSQEKACRDVDECLQGRCEQVCVNSPGSYTCHCDGRGGLKLSQDMDTCEDILPCVPFSVAKSVKSLYLGRMFSGTPVIRLRFKRLQPTRLVAEFDFRTFDPEGILLFAGGHQDSTWIVLALRAGRLELQLRYNGVGRVTSSGPVINHGMWQTISVEELARNLVIKVNRDAVMKIAVAGDLFQPERGLYHLNLTVGGIPFHEKDLVQPINPRLDGCMRSWNWLNGEDTTIQETVKVNTRMQCFSVTERGSFYPGSGFAFYSLDYMRTPLDVGTESTWEVEVVAHIRPAADTGVLFALWAPDLRAVPLSVALVDYHSTKKLKKQLVVLAVEHTALALMEIKVCDGQEHVVTVSLRDGEATLEVDGTRGQSEVSAAQLQERLAVLERHLRSPVLTFAGGLPDVPVTSAPVTAFYRGCMTLEVNRRLLDLDEAAYKHSDITAHSCPPVEPAAA

SEQ ID NO: 1030359 - protein, 678 aa, Homo sapiens; identical to SEQ ID NO: 1030355

SEQ ID NO: 1030360 - protein, 634 aa, Homo sapiens; identical to SEQ ID NO: 1030351

SEQ ID NO: 1030361 - protein, 114 aa, Homo sapiens; identical to SEQ ID NO: 1030346

SEQ ID NO: 1030362 - protein, 105 aa, Homo sapiens
RGLERRSEMTKGTSSFGKRRNKTHTLCRRCGSKAYHLQKSTCGKCGYPAKRKRKYNWSAKAKRRNTTGTGRMRHLKIVYRRFRHGFREGTTPKPKRAAVAASSSS

SEQ ID NO: 1030363 - protein, 192 aa, Homo sapiens [sequence omitted]

SEQ ID NO: 1030364 - protein, 175 aa, Homo sapiens
  misc_feature (150)..(150): Xaa can be any naturally occurring amino acid
  misc_feature (155)..(155): Xaa can be any naturally occurring amino acid
LFFFAASTARMKTILSNQTVDIPENVDITLKGRTVIVKGPRGTLRRDFNHINVELSLLGKKKKRLRVLTNVGGLHRKRTRGSPVCGTICGSSCVTEHQCTQRGVYPVGLLAVHREVKRSWCYWPHFSPKSKRVCLLPRREKWRLLCGVRXSRRKXFLCGGVTQNLTSREEGGLGM

SEQ ID NO: 1030365 - protein, 247 aa, Homo sapiens
MKTILSNQTVDIPENVDITLKGRTVIVKGPRGTLRRDFNHINVELSLLGKKKKRLRVDKWWGNRKELATVRTICSHVQNMIKGVTLGFRYKMRSVYAHFPINVVIQENGSLVDKWWGNRKELATVRTICSHVQNMIKGVTLGFRYKMRSVYAHFPINVVIQENGSLVEIRNFLGEKYIRRVRMRPGVACSVSQAQKDELILEGNDIELVSNSAALIQQATTVKNKDIRKFLDGIYVSEKGTVQQADE

SEQ ID NO: 1030366 - protein, 434 aa, Homo sapiens
CLHQSSGTLLSVPATLQPRPHFSWSPFQAPRNHHQTHQFHSVTPQSLSCLHPSLRDSPVCPSYSPTTPTFQRESVPGTQESPPNSPISLSYSPVSLMSSPPAPWDSPVCPSYSPTTPRFQRESASHTPESPTDSQTSLRSSLVSLRSLPSAHRDSCVSFSYSQNFSRFQLESVPGTHDTPPNSRISLTYSPVSLMFSPPALRDSSVSLSYSPTISRFHLESASRTQESPTNSRTLLQPSPISFTSSPPAFRDSPGSPSFSPAFPRFLPQSAPGTQDNPRHSQASRDYLPMTCTYTGIAPTHPSVTPNPSPLTLRHSQGLTATPRYCPSVRSPGQSTSPHDAVTWPFLHSSREGPTPSRTRAPPAFRPHTQACPSTCYCHTLASRRGPCNGRYHHPVYPHPTAVQREPPAGPRARHSPCWHDAPAGRRPCGPHYR

SEQ ID NO: 1030367 - protein, 484 aa, Homo sapiens
CLHQSSGTLLSVPATLQPRPHFSWSPFQAPRNHHQTHQFHSVTPQSLARLDLQPSGTRLSVLSYSPHIAQHCKRAARADTLPSRLTHRFHCVTPQSLSCLHPSLRDSPVCPSYSPTTPTFQRESVPGTQESPPNSPISLSYSPVSLMSSPPAPWDSPVCPSYSPTTPRFQRESASHTPESPTDSQTSLRSSLVSLRSLPSAHRDSCVSFSYSQNFSRFQLESVPGTHDTPPNSRISLTYSPVSLMFSPPALRDSSVSLSYSPTISRFHLESASRTQESPTNSRTLLQPSPISFTSSPPAFRDSPGSPSFSPAFPRFLPQSAPGTQDNPRHSQASRDYLPMTCTYTGIAPTHPSVTPNPSPLTLRHSQGLTATPRYCPSVRSPGQSTSPHDAVTWPFLHSSREGPTPSRTRAPPAFRPHTQACPSTCYCHTLASRRGPCNGRYHHPVYPHPTAVQREPPAGPRARHSPCWHDAPAGRRPCGPHYR

SEQ ID NO: 1030368 - protein, 235 aa, Homo sapiens
MSDWFNFHGHMCIAFELLGKNTFEFLKENNFQPYPLPHVRHMAYQLCHALRFLHENQLTHTDLKPENILFVNSEFETLYNEHKSCEEKSVKNTSIRVADFGSATFDHEHHTTIVATRHYRPPEVILELGWAQPCDVWSIGCILFEYYRGFTLFQTHENREHLVMMEKILGPIPSHMIHRTRKQKYFYKGGLVWDENSSDGRYVKENCKPLKSYMLQDSLEHVQLFDLTSAQDVRI

SEQ ID NO: 1030369 - protein, 303 aa, Homo sapiens
SVGLEVWGRTGQLLMRTSVSFPGTRGKSQVALKIIRNVGKYREAARLEINVLKKIKEKDKENKFLCVLMSDWFNFHGHMCIAFELLGKNTFEFLKENNFQPYPLPHVRHMAYQLCHALRFLHENQLTHTDLKPENILFVNSEFETLYNEHKSCEEKSVKNTSIRVADFGSATFDHEHHTTIVATRHYRPPEVILELGWAQPCDVWSIGCILFEYYRGFTLFQTHENREHLVMMEKILGPIPSHMIHRTRKQKYFYKGGLVWDENSSDGRYVKENCKPLKSYMLQDSLEHVQLFDLTSAQDVRI

SEQ ID NO: 1030370 - protein, 319 aa, Homo sapiens
MTRMVTMVCRIWDWLQERYEIVGNLGEGTFGKVVECLDHARGKSQVALKIIRNVGKYREAARLEINVLKKIKEKDKENKFLCVLMSDWFNFHGHMCIAFELLGKNTFEFLKENNFQPYPLPHVRHMAYQLCHALRFLHENQLTHTDLKPENILFVNSEFETLYNEHKSCEEKSVKNTSIRVADFGSATFDHEHHTTIVATRHYRPPEVILELGWAQPCDVWSIGCILFEYYRGFTLFQTHENREHLVMMEKILGPIPSHMIHRTRKQKYFYKGGLVWDENSSDGRYVKENCKPLKSYMLQDSLEHVQLFDLTSAQDVRI

SEQ ID NO: 1030371 - protein, 87 aa, Homo sapiens
FGSFAAAVFATMPPYTVVYFPVRGRCAALRMLLADQGQSWKEEVVTVETWQEGSLKASCLYGQLPKFQDGDLTLYQSNTIPPYYQKT

SEQ ID NO: 1030372 - protein, 234 aa, Homo sapiens
MPPYTVVYFPVRGRCAALRMLLADQGQSWKEEVVTVETWQEGSLKASCLYGQLPKFQDGDLTLYQSNTILRHLGRTLGLYGKDQQEAALVDMVNDGVEDLRCKYVSLIYTNYEAGKDDYVKALPGQLKPFETLLSQNQGGKTFIVGDQISFADYNLLDLLLIHEVLAPGCLDAFPLLSAYVGRLSARPKLKAFLASPEYVNLPINGNGETVRVGGTLSGRQSLPSFLPGSNKGF

SEQ ID NO: 1030373 - protein, 131 aa, Homo sapiens
MLSLIYTNYEAGKDDYVKALPGQLKPFETLLSQNQGGKTFIVGDQISFADYNLLDLLLIHEVLAPGCLDAFPLLSAYVGRLSARPKLKAFLASPEYVNLPINGNGKTVRVGGTLSGRQSLPSFLPGSNKGF

SEQ ID NO: 1030374 - protein, 263 aa, Homo sapiens
MPPYTVVYFPVRGRCAAFNQGAKVLRMLLADQGQSWKEEVVTVDSKGWNRKETWQEGSLKASCLYGQLPKFQDGDLTLYQSNTILRHLGRTLGLYGKDQQEAALVDMVNDGVVREKIKSEDLRCKYISLIYTNYEAGKDDYVKALPGQLKPFETLLSQNQGGKTFIVGDQISFADYNLLDLLLIHEVLAPGCLDAFPLLSAYVGRLSARPKLKAFLASPNRERKSPEYVNLPINGNGKTVRVGGTLSGRQSLPSFLPGSNKGF

SEQ ID NO: 1030375 - protein, 348 aa, Homo sapiens
QPVSLQAPGEVTRAISAPTTSTTSGPGTTPSPVPTTSTTSAPTTRTTSAPKSSTTSAATTSTTSGPETTPRPVPATTPSLFSYNQLNLCSYNQHNLCFYNQHNLWSWNYSQPCSHHQHNLCSYNQHNLCPYNQHNLCHYNQHNLCSYNYSQPCSYNQHNLCSYNQHNLWSWNYSQCCSHHQHNLCTYNQYKLCPYKQHNLCHYNQRISGPETTPSPVPTASTTSASTTSTTSGPGTTPSPVPTTSTISVPTTSSNFCFYNQHNLCFYNQHNFWSWNYPKPCSHHQHNLCSYNQHNLCRYNQHNLGPNNQHNVCSYNQHNLCLYSQQNLWSWNYSQPYSYHQHNLSSYK

SEQ ID NO: 1030376 - protein, 268 aa, Homo sapiens
QPVSLQAPGEVTRAISAPTTSTTSGPGTTPSPVPTTSTTSAPTTRTTSAPKSSTTSAATTSTTSGPETTPRPVPATTPSLFSYNQLNLCSYNQHNLCFYNQHNLWSWNYSQPCSHHQHNLCSYNQHNLCPYNQHNLCHYNQHNLCSYNYSQPCSYNQHNLCSYNQHNLYPYKQHNLHSTDQHNLCFYNQHNFWSWNYPKPCSHHQHNLCSYNQHNLCRYNQHNLGPNNQHNVCSYNQHNLCLYSQQNLWSWNYSQPYSYHQHNLSSYK

SEQ ID NO: 1030377 - protein, 123 aa, Homo sapiens
KSPRDNWLVAPKPCFPLTSTNSGPKTRKKLFGSYEDQHNLCFYNQHNFWSWNYPKPCSHHQHNLCSYNQHNLCRYNQHNLGPNNQHNVCSYNQHNLCLYSQQNLWSWNYSQPYSYHQHNLSSY

SEQ ID NO: 1030378 - protein, 196 aa, Homo sapiens
MRTLACLLLLGCGYLAHVLAEEAEIPREVIERLARSQIHSIRDLQRLLEIDSVGSEDSLDTSLRAHGVHATKHVPEKRPLPIRRKRSIEEAVPAVCKTRTVIYEIPRSQVDPTSANFLIWPPCVEVKRCTGCCNTSSVKCQPSRVHHRSVKVAKVEYVRKKPKLKEVQVRLEEHLECACATTSLNPDYREEDTDVR

SEQ ID NO: 1030379 - protein, 211 aa, Homo sapiens [sequence omitted]

SEQ ID NO: 1030380 - protein, 211 aa, Homo sapiens [sequence omitted]

SEQ ID NO: 1030381 - protein, 211 aa, Homo sapiens [sequence omitted]

SEQ ID NO: 1030382 - protein, 98 aa, Homo sapiens
LWVQASRQMHNRLRRYLSYEDTLLLEDQPTGENEMVIMRPGNKYEYKFGFELPQGPLGPSSKEIWVCSYLVKAFLTPEPANLRDKKTLSSGSGGCQYP

SEQ ID NO: 1030383 - protein, 218 aa, Homo sapiens
MSTGSVSDPEEMELRGLQREYPVPASKRPPLRGVERSYASPSDNSSAEEEDPDGEEERCALGTAGSAEGCKRKRPRVAGGGGAGGSAGGGGKKPLPAKGSAAECKQSQRNAANARERARMRVLSKAFSRLKTSLPWVPPDTKLSKLDTLRLASSYIAHLRQLLQEDRYENGYVHPVNLTWPFVVSGRPASAPKKFPQPTDYVEPPLKSDWNSLDGIIR

SEQ ID NO: 1030384 - protein, 219 aa, Homo sapiens
MSTGSVSDPEEMELRGMLILCVDVMLLWVLQREYPVPASKRPPLRGVERSYASPSDNSSAEEEDPDGEEERCALGTAGSAEGCKRKRPRVAGGGGAGGSAGGGGKKPLPAKGSAAECKQSQRNAANARERARMRVLSKAFSRLKTSLPWVPPDTKLSKLDTLRLASSYIAHLRQLLQEDRYENGYVHPVNLTWPFVVSGRPDSDTKEVSAANRLCGTTA

SEQ ID NO: 1030385 - protein, 166 aa, Homo sapiens
MSTGSVSDPEEMELRGLQREYPVPASKRPPLRGVERSYASPSDNSSAEEEDPDGEEERCALGTAGSAEGCKRKRPRVAGGGGAGGSAGGGGKKPLPAKGSAAECKQSQRNAANARERARMRVLSSDSRLSASGLPTPRSGRPNSNTTSCRAGSSPRGGARRVGGLP

SEQ ID NO: 1030386 - protein, 229 aa, Homo sapiens
GKRERLASGEERARLSGDTGFTGSVITGSVSDRGMSFVGLQREYPVPASKRPPLRGVERSYASPSDNSSAEEEDPDGEEERCALGTAGSAEGCKRKRPRVAGGGGAGGSAGGGGKKPLPAKGSAAECKQSQRNAANARERARMRVLSKAFSRLKTSLPWVPPDTKLSKLDTLRLASSYIAHLRQLLQEDRYENGYVHPVNLTWPFVVSGRPDSDTKEVSAANRLCGTTA

SEQ ID NO: 1030387 - protein, 173 aa, Homo sapiens
MSTGSVSDPEEMELRGACDDGQMITGNRRSTEERDSIGGKKQRSYASPSDNSSAEEEDPDGEEERCALGTAGSAEGCKRKRPRVAGGGGAGGSAGGGGKKPLPAKGSAAECKQSQRNAANARERARMRVLSSDSRLSASGLPTPRSGRPNSNTTSCRAGSSPRGGARRVGGLP

SEQ ID NO: 1030388 - protein, 218 aa, Homo sapiens; identical to SEQ ID NO: 1030383

SEQ ID NO: 1030389 - protein, 299 aa, Homo sapiens
GWVTVSPVGGNSWIYSGALLVTKGHIMCPKISVSLPEKLAEVNVRSRKLSTQSLPNKGSQTLCFGLVPALTGGTYLDMPDPPLDRNYVGLAAESVSRISTRKDIASFPQSLWSQICTCTLTYWHMEVCVNMPLRDFFFFFLEALEYSFIPTRLDPLPRGSGPTVLTWRSLSCAAASFVNIQQLLDERPPEGLKSYAGAGLQERTDRPVPVLEEPMIRAETGVLRRLTRSLKYNCGEPHKMDARWSAVNDQADLVCDPRRARVDQAKGTEDWDLEVGWRRLDHWRKGIALCVMSIERRYG

SEQ ID NO: 1030390 - protein, 98 aa, Homo sapiens
  misc_feature (6)..(6): Xaa can be any naturally occurring amino acid
SGSIWXVTTYAHENMPLAKDLLHPSPEEEKRKHKKKRLVQSPNSYFMDVKCPGCYKITTVFSHAQTVVLCVGCSTVLCQPTGGKARLTEGCSFRRKQH

SEQ ID NO: 1030391 - protein, 105 aa, Homo sapiens
QRISGRRYRGFPAVTTYAHENMPLAKDLLHPSPEEEKRKHKKKRLVQSPNSYFMDVKCPGCYKITTVFSHAQTVVLCVGCSTVLCQPTGGKARLTEGCSFRRKQH

SEQ ID NO: 1030392 - protein, 99 aa, Homo sapiens
DAWVDPRVRTYAHENMPLAKDLLHPSPEEEKRKHKKKRLVQSPNSYFMDVKCPGCYKITTVFSHAQTVVLCVGCSTVLCQPTGGKARLTEGCSFRRKQH

SEQ ID NO: 1030393 - protein, 98 aa, Homo sapiens
PQDLGKRQPYAHENMPLAKDLLHPSPEEEKRKHKKKRLVQSPNSYFMDVKCPGCYKITTVFSHAQTVVLCVGCSTVLCQPTGGKARLTEGCSFRRKQH

SEQ ID NO: 1030394 - protein, 105 aa, Homo sapiens; identical to SEQ ID NO: 1030391

SEQ ID NO: 1030395 - protein, 101 aa, Homo sapiens
VNLEDPPGNETTYAHENMPLAKDLLHPSPEEEKRKHKKKRLVQSPNSYFMDVKCPGCYKITTVFSHAQTVVLCVGCSTVLCQPTGGKARLTEGCSFRRKQH

SEQ ID NO: 1030396 - protein, 105 aa, Homo sapiens; identical to SEQ ID NO: 1030391

SEQ ID NO: 1030397 - protein, 105 aa, Homo sapiens; identical to SEQ ID NO: 1030391

SEQ ID NO: 1030398 - protein, 95 aa, Homo sapiens
  misc_feature (4)..(4): Xaa can be any naturally occurring amino acid
  misc_feature (17)..(19): Xaa can be any naturally occurring amino acid
  misc_feature (36)..(36): Xaa can be any naturally occurring amino acid
RPAXTTNAHLIIPRAKXXXQPPALFLKRKHTPTPLXQSPNSYFMDVKCPGCYKITTVFSHAQTVVLCVGCSTVLCQPTGGKARLTEGCSFRRKQH

SEQ ID NO: 1030399 - protein, 84 aa, Homo sapiens
MPLAKDLLHPSPEEEKRKHKKKRLVQSPNSYFMDVKCPGCYKITTVFSHAQTVVLCVGCSTVLCQPTGGKARLTEGCSFRRKQH

SEQ ID NO: 1030400 - protein, 80 aa, Homo sapiens
HSARYPLSRVEKRKHKKKRLVQSPNSYFMDVKCPGCYKITTVFSHAQTVVLCVGCSTVLCQPTGGKARLTEGCSFRRKQH

SEQ ID NO: 1030401 - protein, 84 aa, Homo sapiens; identical to SEQ ID NO: 1030399

SEQ ID NO: 1030402 - protein, 84 aa, Homo sapiens; identical to SEQ ID NO: 1030399

SEQ ID NO: 1030403 - protein, 84 aa, Homo sapiens; identical to SEQ ID NO: 1030399

SEQ ID NO: 1030404 - protein, 84 aa, Homo sapiens; identical to SEQ ID NO: 1030399

SEQ ID NO: 1030405 - protein, 84 aa, Homo sapiens; identical to SEQ ID NO: 1030399

SEQ ID NO: 1030406 - protein, 129 aa, Homo sapiens
MCRSQRMCRSQRMCRSQRMCRSQRMCRSQACAGAFPAVTTYAHENMPLAKDLLHPSPEEEKRKHKKKRLVQSPNSYFMDVKCPGCYKITTVFSHAQTVVLCVGCSTVLCQPTGGKARLTEGCSFRRKQH

SEQ ID NO: 1030407 - protein, 67 aa, Homo sapiens
IRGRVDTVREDDRRGLSGGDDLRTREHASRKGSPSSLSRRGEEETQEETPGAEPQFLLHGCEMPRML

SEQ ID NO: 1030408 - protein, 101 aa, Homo sapiens; identical to SEQ ID NO: 1030395

SEQ ID NO: 1030409 - protein, 139 aa, Homo sapiens
  misc_feature (14)..(14): Xaa can be any naturally occurring amino acid
  misc_feature (49)..(50): Xaa can be any naturally occurring amino acid
TKRLHGSRGNQMEXHLSQAGLFLAMAKFQEVPKAKYIWKVLPNWRTQCXXRAHENMPLAKDLLHPSPEEEKRKHKKKRLVQSPNSYFMDVKCPGCYKITTVFSHAQTVVLCVGCSTVLCQPTGGKARLTEGCSFRRKQH

SEQ ID NO: 1030410 - protein, 101 aa, Homo sapiens
FAAASTRCEKTTEAHENMPLAKDLLHPSPEEEKRKHKKKRLVQSPNSYFMDVKCPGCYKITTVFSHAQTVVLCVGCSTVLCQPTGGKARLTEGCSFRRKQH

SEQ ID NO: 1030411 - protein, 99 aa, Homo sapiens; identical to SEQ ID NO: 1030392

SEQ ID NO: 1030412 - protein, 98 aa, Homo sapiens; identical to SEQ ID NO: 1030393

SEQ ID NO: 1030413 - protein, 80 aa, Homo sapiens; identical to SEQ ID NO: 1030400

SEQ ID NO: 1030414 - protein, 121 aa, Homo sapiens
LEIHGDEQRRPNQEEVFVLVIVGQVFQLLLAVYAHENMPLAKDLLHPSPEEEKRKHKKKRLVQSPNSYFMDVKCPGCYKITTVFSHAQTVVLCVGCSTVLCQPTGGKARLTEGCSFRRKQH

SEQ ID NO: 1030415 - protein, 129 aa, Homo sapiens; identical to SEQ ID NO: 1030406

SEQ ID NO: 1030416 - protein, 129 aa, Homo sapiens; identical to SEQ ID NO: 1030406

SEQ ID NO: 1030417 - protein, 122 aa, Homo sapiens
  misc_feature (115)..(115): Xaa can be any naturally occurring amino acid
  misc_feature (117)..(118): Xaa can be any naturally occurring amino acid
  misc_feature (120)..(120): Xaa can be any naturally occurring amino acid
IRGRVDTVREDDEGAFPAVTTYAHENMPLAKDLLHPSPEEEKRKHKKKRLVQSPNSYFMDVKCPGCYKITTVFSHAQTVVLCVGCSTVLCQPTGGKARLTEGCSFRRERHMEFYXKXXDXLR

SEQ ID NO: 1030418 - protein, 84 aa, Homo sapiens; identical to SEQ ID NO: 1030399

SEQ ID NO: 1030419 - protein, 84 aa, Homo sapiens; identical to SEQ ID NO: 1030399

SEQ ID NO: 1030420 - protein, 84 aa, Homo sapiens; identical to SEQ ID NO: 1030399

SEQ ID NO: 1030421 - protein, 84 aa, Homo sapiens; identical to SEQ ID NO: 1030399

SEQ ID NO: 1030422 - protein, 84 aa, Homo sapiens; identical to SEQ ID NO: 1030399

SEQ ID NO: 1030423 - protein, 84 aa, Homo sapiens; identical to SEQ ID NO: 1030399

SEQ ID NO: 1030424 - protein, 84 aa, Homo sapiens; identical to SEQ ID NO: 1030399

SEQ ID NO: 1030425 - protein, 84 aa, Homo sapiens; identical to SEQ ID NO: 1030399

SEQ ID NO: 1030426 - protein, 84 aa, Homo sapiens; identical to SEQ ID NO: 1030399

SEQ ID NO: 1030427 - protein, 84 aa, Homo sapiens; identical to SEQ ID NO: 1030399

SEQ ID NO: 1030428 - protein, 84 aa, Homo sapiens; identical to SEQ ID NO: 1030399

SEQ ID NO: 1030429 - protein, 84 aa, Homo sapiens; identical to SEQ ID NO: 1030399

SEQ ID NO: 1030430 - protein, 84 aa, Homo sapiens; identical to SEQ ID NO: 1030399

SEQ ID NO: 1030431 - protein, 84 aa, Homo sapiens; identical to SEQ ID NO: 1030399

SEQ ID NO: 1030432 - protein, 84 aa, Homo sapiens; identical to SEQ ID NO: 1030399

SEQ ID NO: 1030433 - protein, 84 aa, Homo sapiens; identical to SEQ ID NO: 1030399

SEQ ID NO: 1030434 - protein, 84 aa, Homo sapiens; identical to SEQ ID NO: 1030399

SEQ ID NO: 1030435 - protein, 129 aa, Homo sapiens; identical to SEQ ID NO: 1030406

SEQ ID NO: 1030436 - protein, 120 aa, Homo sapiens
IRGRVDTVREDDEGAFPAVTTYAHENMPLAKDLLHPSPEEEKRKHKKKRLVQSPNSYFMDVKCPGCYKITTVFSHAQTVVLCVGCSTVLCQPTGGKARLTEGCSWDESPRHEGILKKRRS

SEQ ID NO: 1030437 - protein, 629 aa, Homo sapiens
MTLLTFRDVAIEFSLEEWKCLDLAQQNLYRDVMLENYRNLFSVGLTVCKPGLITCLEQRKEPWNVKRQEAADGHPEMGFHHATQACLELLGSSDLPASASQSAGITGVNHRAQPGLNVSVDKFTALCSPGVLQTVKWFLEFRCIFSLAMSSHFTQDLLPEQGIQDAFPKRILRGYGNCGLDNLYLRKDWESLDECKLQKDYNGLNQCSSTTHSKIFQYNKYVKIFDNFSNLHRRNISNTGEKPFKCQECGKSFQMLSFLTEHQKIHTGKKFQKCGECGKTFIQCSHFTEPENIDTGEKPYKCQECNNVIKTCSVLTKNRIYAGGEHYRCEEFGKVFNQCSHLTEHEHGTEEKPCKYEECSSVFISCSSLSNQQMILAGEKLSKCETWYKGFNHSPNPSKHQRNEIGGKPFKCEECDSIFKWFSDLTKHKRIHTGEKPYKCDECGKAYTQSSHLSEHRRIHTGEKPYQCEECGKVFRTCSSLSNHKRTHSEEKPYTCEECGNIFKQLSDLTKHKKTHTGEKPYKCDECGKNFTQSSNLIVHKRIHTGEKPYKCEECGRAFMWFSDITKHKQTHTGEKPYKCDECGKNFTQSSNLIVHKRIHTGEKPYKCEKCGKAFTQFSHLTVHESIHT

SEQ ID NO: 1030438 - protein, 1130 aa, Homo sapiens
MRCLAPRPAGSYLSEPQGSSQCATMELGPLEGGYLELLNSDADPLCLYHFYDQMDLAGEEEIELYSEPDTDTINCDQFSRLLCDMEGDEETREAYANIAELDQYVFQDSQLEGLSKDIFKHIGPDEVIGESMEMPAEVGQKSQKRPFPEELPADLKHWKPAEPPTVVTGSLLVGPVSDCSTLPCLPLPALFNQEPASGQMRLEKTDQIPMPFSSSSLSCLNLPEGPIQFVPTISTLPHGLWQISEAGTGVSSIFIYHGEVPQASQVPPPSGFTVHGLPTSPDRPGSTSPFAPSATDLPSMPEPALTSRANMTEHKTSPTQCPAAGEVSNKLPKWPEPVEQFYRSLQDTYGAEPAGPDGILVEVDLVQARLERSSSKSLERELATPDWAERQLAQGGLAEVLLAAKEHRRPRETRVIAVLGKAGQGKSYWAGAVSRAWACGRLPQYDFVFSVPCHCLNRPGDAYGLQDLLFSLGPQPLVAADEVFSHILKRPDRVLLILDAFEELEAQDGFLHSTCGPAPAEPCSLRGLLAGLFQKKLLRGCTLLLTARPRGRLVQSLSKADALFELSGFSMEQAQAYVMRYFESSGMTEHQDRALTLLRDRPLLLSHSHSPTLCRAVCQLSEALLELGEDAKLPSTLTGLYVGLLGRAALDSPPGALAELAKLAWELGRRHQSTLQEDQFPSADVRTWAMAKGLVQHPPRAAESELAFPSFLLQCFLGALWLALSGEIKDKELPQYLALTPRKKRPYDNWLEGVPRFLAGLIFQPPARCLGALLGPSAAASVDRKQKVLARYLKRLQPGTLRARQLLELLHCAHEAEEAGIWQHVVQELPGRLSFLGTRLTPPDAHVLGKALEAAGQDFSLDLRSTGICPSGLGSLVGLSCVTRFRAALSDTVALWESLRQHGETKLLQAAEEKFTIEPFKAKSLKDVEDLGKLVQTQRTRSSSEDTAGELPAVRDLKKLEFALGPVSGPQAFPKLVRILTAFSSLQHLDLDALSENKIGDEGVSQLSATFPQLKSLETLNLSQNNITDLGAYKLAEALPSLAASLLRLSLYNNCICDVGAESLARVLPDMVSLRVMDVQYNKFTAAGAQQLAASLRRCPHVETLAMWTPTIPFSVQEHLQQQDSRISLR

SEQ ID NO: 1030439 - protein, 932 aa, Homo sapiens [sequence omitted]

SEQ ID NO: 1030440 - protein, 884 aa, Homo sapiens [sequence omitted]

SEQ ID NO: 1030441 - protein, 527 aa, Homo sapiens
MRCLAPRPAGSYLSEPQGSSQCATMELGPLEGGYLELLNSDADPLCLYHFYDQMDLAGEEEIELYSEPDTDTINCDQFSRLLCDMEGDEETREAYANIAELDQYVFQDSQLEGLSKDIFKHIGPDEVIGESMEMPAEVGQKSQKRPFPEELPADLKHWKPAEPPTVVTGSLLVGPVSDCSTLPCLPLPALFNQEPASGQMRLEKTDQIPMPFSSSSLSCLNLPEGPIQFVPTISTLPHGLWQISEAGTGVSSIFIYHGEVPQASQVPPPSGFTVHGLPTSPDRPGSTSPFAPSATDLPSMPEPALTSRANMTEHKTSPTQCPAAGEVSNKLPKWPGREVPRKTQLGSSLLLRDLKKLEFALGPVSGPQAFPKLVRILTAFSSLQHLDLDALSENKIGDEGVSQLSATFPQLKSLETLNLSQNNITDLGAYKLAEALPSLAASLLRLSLYNNCICDVGAESLARVLPDMVSLRVMDVQYNKFTAAGAQQLAASLRRCPHVETLAMWTPTIPFSVQEHLQQQDSRISLR

SEQ ID NO: 1030442 - protein, 1130 aa, Homo sapiens; identical to SEQ ID NO: 1030438

SEQ ID NO: 1030443 - protein, 932 aa, Homo sapiens [sequence omitted]

SEQ ID NO: 1030444 - protein, 932 aa, Homo sapiens [sequence omitted]

SEQ ID NO: 1030445 - protein, 3259 aa, Homo sapiens
MLSRLSGLANVVLHELSGDDDTDQNMRAPLDPELHQESDMEFNNTTQEDVQERLAYAEQLVVELKDIIRQKDVQLQQKDEALQEERKAADNKIKKLKLHAKAKLTSLNKYIEEMKAQGGTVLPTEPQSEEQLSKHDKSSTEEEMEIEKIKHKLQEKEELISTLQAQLTQAQAEQPAQSSTEMEEFVMMKQQLQEKEEFISTLQAQLSQTQAEQAAQQVVREKDARFETQVRLHEDELLQLVTQADVETEMQQKLRVLQRKLEEHEESLVGRAQVVDLLQQELTAAEQRNQILSQQLQQMEAEHNTLRNTVETEREESKILLEKMELEVAERKLSFHNLQEEMHHLLEQFEQAGQAQAELESRYSALEQKHKAEMEEKTSHILSLQKTGQELQSACDALKDQNSKLLQDKNEQAVQSAQTIQQLEDQLQQKSKEISQFLNRLPLQQHETASQTSFPDVYNEGTQAVTEENIASLQKRVVELENEKGALLLSSIELEELKAENEKLSSQITLLEAQNRTGEADREVSEISIVDIANKRSSSAEESGQDVLENTFSQKHKELSVLLLEMKEAQEEIAFLKLQLQGKRAEEADHEVLDQKEMKQMEGEGIAPIKMKVFLEDTGQDFPLMPNEESSLPAVEKEQASTEHQSRTSEEISLNDAGVELKSTKQDGDKSLSAVPDIGQCHQDELERLKSQILELELNFHKAQEIYEKNLDEKAKEISNLNQLIEEFKKNADNNSSAFTALSEERDQLLSQVKELSMVTELRAQVKQLEMNLAEAERQRRLDYESQTAHDNLLTEQIHSLSIEAKSKDVKIEVLQNELDDVQLQFSEQSTLIRSLQSQLQNKESEVLEGAERVRHISSKVEELSQALSQKELEITKMDQLLLEKKRDVETLQQTIEEKDQQVTEISFSMTEKMVQLNEEKFSLGVEIKTLKEQLNLLSRAEEAKKEQVEEDNEVSSGLKQNYDEMSPAGQISKEELQHEFDLLKKENEQRKRKLQAALINRKELLQRVSRLEEELANLKDESKKEIPLSETERGEVEEDKENKEYSEKCVTSKCQEIEIYLKQTISEKEVELQHIRKDLEEKLAAEEQFQALVKQMNQTLQDKTNQIDLLQAEISENQAIIQKLITSNTDASDGDSVALVKETVVISPPCTGSSEHWKPELEEKILALEKEKEQLQKKLQEALTSRKAILKKAQEKERHLREELKQQKDDYNRLQEQFDEQSKENENIGDQLRQLQIQVRESIDGKLPSTDQQESCSSTPGLEEPLFKATEQHHTQPVLESNLCPDWPSHSEDASALQGGTSVAQIKAQLKEIEAEKVELELKVSSTTSELTKKSEEVFQLQEQINKQGLEIESLKTVSHEAEVHAESLQQKLESSQLQIAGLEHLRELQPKLDELQKLISKKEEDVSYLSGQLSEKEAALTKIQTEIIEQEDLIKALHTQLEMQAKEHDERIKQLQVELCEMKQKPEEIGEESRAKQQIQRKLQAALISRKEALKENKSLQEELSLARGTIERLTKSLADVESQVSAQNKEKDTVLGRLALLQEERDKLITEMDRSLLENQSLSSSCESLKLALEGLTEDKEKLVKEIESLKSSKIAESTEWQEKHKELQKEYEILLQSYENVSNEAERIQHVVEAVRQEKQELYGKLRSTEANKKETEKQLQEAEQEMEEMKEKMRKFAKSKQQKILELEEENDRLRAEVHPAGDTAKECMETLLSSNASMKEELERVKMEYETLSKKFQSLMSEKDSLSEEVQDLKHQIEDNVSKQANLEATEKHDNQTNVTEEGTQSIPGETEEQDSLSMSTRPTCSESVPSAKSANPAVSKDFSSHDEINNYLQQIDQLKERIAGLEEEKQKNKEFSQTLENEKNTLLSQISTKDGELKMLQEEVTKMNLLNQQIQEELSRVTKLKETAEEEKDDLEERLMNQLAELNGSIGNYCQDVTDAQIKNELLESEMKNLKKCVSELEEEKQQLVKEKTKVESEIRKEYLEKIQGAQKEPGNKSHAKELQELLKEKQQEVKQLQKDCIRYQEKISALERTVKALEFVQTESQKDLEITKENLAQAVEHRKKAQAELASFKVLLDDTQSEAARVLADNLKLKKELQSNKESVKSQMKQKDEDLERRLEQAEEKHLKEKKNMQEKLDALRREKVHLEETIGEIQVTLNKKDKEVQQLQENLDSTVTQLAAFTKSMSSLQDDRDRVIDEAKKWERKFSDAIQSKEEEIRLKEDNCSVLKDQLRQMSIHMEELKINISRLEHDKQIWESKAQTEVQLQQKVCDTLQGENKELLSQLEETRHLYHSSQNELAKLESELKSLKDQLTDLSNSLEKCKEQKGNLEGIIRQQEADIQNSKFSYEQLETDLQASRELTSRLHEEINMKEQKIISLLSGKEEAIQVAIAELRQQHDKEIKELENLLSQEEEENIVLEEENKKAVDKTNQLMETLKTIKKENIQQKAQLDSFVKSMSSLQNDRDRIVGDYQQLEERHLSIILEKDQLIQEAAAENNKLKEEIRGLRSHMDDLNSENAKLDAELIQYREDLNQVITIKDSQQKQLLEVQLQQNKELENKYAKLEEKLKESEEANEDLRRSFNALQEEKQDLSKEIESLKVSISQLTRQVTALQEEGTLGLYHAQLKVKEEEVHRLSALFSSSQKRIAELEEELVCVQKEAAKKVGEIEDKLKKELKHLHHDAGIMRNETETAEERVAELARDLVEMEQKLLMVTKENKGLTAQIQSFGRSMSSLQNSRDHANEELDELKRKYDASLKELAQLKEQGLLNRERDALLSETAFSMNSTEENSLSHLEKLNQQLLSKDEQLLHLSSQLEDSYNQVQSFSKAMASLQNERDHLWNELEKFRKSEEGKQRSAAQPSTSPAEVQSLKKAMSSLQNDRDRLLKELKNLQQQYLQINQEITELHPLKAQLQEYQDKTKAFQIMQEELRQENLSWQHELHQLRMEKSSWEIHERRMKEQYLMAISDKDQQLSHLQNLIRELRSSSSQTQPLKVQYQRQASPETSASPDGSQNLVYETELLRTQLNDSLKEIHQKELRIQQLNSNFSQLLEEKNTLSIQLCDTSQSLRENQQHYGDLLNHCAVLEKQVQELQAGPLNIDVAPGAPQEKNGVHRKSDPEELREPQQSFSEAQQQLCNTRQEVNELRKLLEEERDQRVAAENALSVAEEQIRRLEHSEWDSSRTPIIGSCGTQEQALLIDLTSNSCRRTRSGVGWKRVLRSLCHSRTRVPLLAAIYFLMIHVLLILCFTGHL

SEQ ID NO: 1030446 - protein, 3295 aa, Homo sapiens
SVPGVYRCHVAYGLPELTWLELGGGQLEPQAAALLEMLSRLSGLANVVLHELSGDDDTDQNMRAPLDPELHQESDMEFNNTTQEDVQERLAYAEQLVVELKDIIRQKDVQLQQKDEALQEERKAADNKIKKLKLHAKAKLTSLNKYIEEMKAQGGTVLPTEPQSEEQLSKHDKSSTEEEMEIEKIKHKLQEKEELISTLQAQLTQAQAEQPAQSSTEMEEFVMMKQQLQEKEEFISTLQAQLSQTQAEQAAQQVVREKDARFETQVRLHEDELLQLVTQADVETEMQQKLRVLQRKLEEHEESLVGRAQVVDLLQQELTAAEQRNQILSQQLQQMEAEHNTLRNTVETEREESKILLEKMELEVAERKLSFHNLQEEMHHLLEQFEQAGQAQAELESRYSALEQKHKAEMEEKTSHILSLQKTGQELQSACDALKDQNSKLLQDKNEQAVQSAQTIQQLEDQLQQKSKEISQFLNRLPLQQHETASQTSFPDVYNEGTQAVTEENIASLQKRVVELENEKGALLLSSIELEELKAENEKLSSQITLLEAQNRTGEADREVSEISIVDIANKRSSSAEESGQDVLENTFSQKHKELSVLLLEMKEAQEEIAFLKLQLQGKRAEEADHEVLDQKEMKQMEGEGIAPIKMKVFLEDTGQDFPLMPNEESSLPAVEKEQASTEHQSRTSEEISLNDAGVELKSTKQDGDKSLSAVPDIGQCHQDELERLKSQILELELNFHKAQEIYEKNLDEKAKEISNLNQLIEEFKKNADNNSSAFTALSEERDQLLSQVKELSMVTELRAQVKQLEMNLAEAERQRRLDYESQTAHDNLLTEQIHSLSIEAKSKDVKIEVLQNELDDVQLQFSEQSTLIRSLQSQLQNKESEVLEGAERVRHISSKVEELSQALSQKELEITKMDQLLLEKKRDVETLQQTIEEKDQQVTEISFSMTEKMVQLNEEKFSLGVEIKTLKEQLNLLSRAEEAKKEQVEEDNEVSSGLKQNYDEMSPAGQISKEELQHEFDLLKKENEQRKRKLQAALINRKELLQRVSRLEEELANLKDESKKEIPLSETERGEVEEDKENKEYSEKCVTSKCQEIEIYLKQTISEKEVELQHIRKDLEEKLAAEEQFQALVKQMNQTLQDKTNQIDLLQAEISENQAIIQKLITSNTDASDGDSVALVKETVVISPPCTGSSEHWKPELEEKILALEKEKEQLQKKLQEALTSRKAILKKAQEKERHLREELKQQKDDYNRLQEQFDEQSKENENIGDQLRQLQIQVRESIDGKLPSTDQQESCSSTPGLEEPLFKATEQHHTQPVLESNLCPDWPSHSEDASALQGGTSVAQIKAQLKEIEAEKVELELKVSSTTSELTKKSEEVFQLQEQINKQGLEIESLKTVSHEAEVHAESLQQKLESSQLQIAGLEHLRELQPKLDELQKLISKKEEDVSYLSGQLSEKEAALTKIQTEIIEQEDLIKALHTQLEMQAKEHDERIKQLQVELCEMKQKPEEIGEESRAKQQIQRKLQAALISRKEALKENKSLQEELSLARGTIERLTKSLADVESQVSAQNKEKDTVLGRLALLQEERDKLITEMDRSLLENQSLSSSCESLKLALEGLTEDKEKLVKEIESLKSSKIAESTEWQEKHKELQKEYEILLQSYENVSNEAERIQHVVEAVRQEKQELYGKLRSTEANKKETEKQLQEAEQEMEEMKEKMRKFAKSKQQKILELEEENDRLRAEVHPAGDTAKECMETLLSSNASMKEELERVKMEYETLSKKFQSLMSEKDSLSEEVQDLKHQIEDNVSKQANLEATEKHDNQTNVTEEGTQSIPGETEEQDSLSMSTRPTCSESVPSAKSANPAVSKDFSSHDEINNYLQQIDQLKERIAGLEEEKQKNKEFSQTLENEKNTLLSQISTKDGELKMLQEEVTKMNLLNQQIQEELSRVTKLKETAEEEKDDLEERLMNQLAELNGSIGNYCQDVTDAQIKNELLESEMKNLKKCVSELEEEKQQLVKEKTKVESEIRKEYLEKIQGAQKEPGNKSHAKELQELLKEKQQEVKQLQKDCIRYQEKISALERTVKALEFVQTESQKDLEITKENLAQAVEHRKKAQAELASFKVLLDDTQSEAARVLADNLKLKKELQSNKESVKSQMKQKDEDLERRLEQAEEKHLKEKKNMQEKLDALRREKVHLEETIGEIQVTLNKKDKEVQQLQENLDSTVTQLAAFTKSMSSLQDDRDRVIDEAKKWERKFSDAIQSKEEEIRLKEDNCSVLKDQLRQMSIHMEELKINISRLEHDKQIWESKAQTEVQLQQKVCDTLQGENKELLSQLEETRHLYHSSQNELAKLESELKSLKDQLTDLSNSLEKCKEQKGNLEGIIRQQEADIQNSKFSYEQLETDLQASRELTSRLHEEINMKEQKIISLLSGKEEAIQVAIAELRQQHDKEIKELENLLSQEEEENIVLEEENKKAVDKTNQLMETLKTIKKENIQQKAQLDSFVKSMSSLQNDRDRIVGDYQQLEERHLSIILEKDQLIQEAAAENNKLKEEIRGLRSHMDDLNSENAKLDAELIQYREDLNQVITIKDSQQKQLLEVQLQQNKELENKYAKLEEKLKESEEANEDLRRSFNALQEEKQDLSKEIESLKVSISQLTRQVTALQEEGTLGLYHAQLKVKEEEVHRLSALFSSSQKRIAELEEELVCVQKEAAKKVGEIEDKLKKELKHLHHDAGIMRNETETAEERVAELARDLVEMEQKLLMVTKENKGLTAQIQSFGRSMSSLQNSRDHANEELDELKRKYDASLKELAQLKEQGLLNRERDALLSETAFSMNSTEENSLSHLEKLNQQLLSKDEQLLHLSSQLEDSYNQVQSFSKAMASLQNERDHLWNELEKFRKSEEGKQRSAAQPSTSPAEVQSLKKAMSSLQNDRDRLLKELKNLQQQYLQINQEITELHPLKAQLQEYQDKTKAFQIMQEELRQENLSWQHELHQLRMEKSSWEIHERRMKEQYLMAISDKDQQLSHLQNLIRELRSSSSQTQPLKVQYQRQASPETSASPDGSQNLVYETELLRTQLNDSLKEIHQKELRIQQLNSNFSQLLEEKNTLSIQLCDTSQSLRENQQHYGDLLNHCAVLEKQVQELQAGPLNIDVAPGAPQEKNGVHRKSDPEELREPQQSFSEAQQQLCNTRQEVNELRKLLEEERDQRVAAENALSVAEEQIRRLEHSEWDSSRTPIIGSCGTQEQALLIDLTSNSCRRTRSGVGWKRVLRSLCHSRTRVPLLAAIYFLMIHVLLILCFTGHL

SEQ ID NO: 1030447 - protein, 3240 aa, Homo sapiens
MLSRLSGLANVVLHELSGDDDTDQNMRAPLDPELHQESDMEFNNTTQEDVQERLAYAEQLVVELKDIIRQKDVQLQQKDEALQEERKAADNKIKKLKLHAKAKLTSLNKYIEEMKAQGGTVLPTEPQSEEQLSKHDKSSTEEEMEIEKIKHKLQEKEELISTLQAQLTQAQAEQPAQSSTEMEEFVMMKQQLQEKEEFISTLQAQLSQTQAEQAAQQVVREKDARFETQVRLHEDELLQLVTQADVETEMQQKLRVLQRKLEEHEESLVGRAQVVDLLQQELTAAEQRNQILSQQLQQMEAEHNTLRNTVETEREESKILLEKMELEVAERKLSFHNLQEEMHHLLEQFEQAGQAQAELESRYSALEQKHKAEMEEKTSHILSLQKTGQELQSACDALKDQNSKLLQDKNEQAVQSAQTIQQLEDQLQQKSKEISQFLNRLPLQQHETASQTSFPDVYNEGTQAVTEENIASLQKRVVELENEKGALLLSSIELEELKAENEKLSSQITLLEAQNRTGEADREVSEISIVDIANKRSSSAEESGQDVLENTFSQKHKELSVLLLEMKEAQEEIAFLKLQLQGKRAEEADHEVLDQKEMKQMEGEGIAPIKMKVFLEDTGQDFPLMPNEESSLPAVEKEQASTEHQSRTSEEISLNDAGVELKSTKQDGDKSLSAVPDIGQCHQDELERLKSQILELELNFHKAQEIYEKNLDEKAKEISNLNQLIEEFKKNADNNSSAFTALSEERDQLLSQVKELSMVTELRAQVKQLEMNLAEAERQRRLDYESQTAHDNLLTEQIHSLSIEAKSKDVKIEVLQNELDDVQLQFSEQSTLIRSLQSQLQNKESEVLEGAERVRHISSKVEELSQALSQKELEITKMDQLLLEKKRDVETLQQTIEEKDQQVTEISFSMTEKMVQLNEEKFSLGVEIKTLKEQLNLLSRAEEAKKEQVEEDNEVSSGLKQNYDEMSPAGQISKEELQHEFDLLKKENEQRKRKLQAALINRKELLQRVSRLEEELANLKDESKKEIPLSETERGEVEEDKENKEYSEKCVTSKCQEIEIYLKQTISEKEVELQHIRKDLEEKLAAEEQFQALVKQMNQTLQDKTNQIDLLQAEISENQAIIQKLITSNTDASDGDSVALVKETVVISPPCTGSSEHWKPELEEKILALEKEKEQLQKKLQEALTSRKAILKKAQEKERHLREELKQQKDDYNRLQEQFDEQSKENENIGDQLRQLQIQVRESIDGKLPSTDQQESCSSTPGLEEPLFKATEQHHTQPVLESNLCPDWPSHSEDASALQGGTSVAQIKAQLKEIEAEKVELELKVSSTTSELTKKSEEVFQLQEQINKQGLEIESLKTVSHEAEVHAESLQQKLESSQLQIAGLEHLRELQPKLDELQKLISKKEEDVSYLSGQLSEKEAALTKIQTEIIEQEDLIKALHTQLEMQAKEHDERIKQLQVELCEMKQKPEEIGEESRAKQQIQRKLQAALISRKEALKENKSLQEELSLARGTIERLTKSLADVESQVSAQNKEKDTVLGRLALLQEERDKLITEMDRSLLENQSLSSSCESLKLALEGLTEDKEKLVKEIESLKSSKIAESTEWQEKHKELQKEYEILLQSYENVSNEAERIQHVVEAVRQEKQELYGKLRSTEANKKETEKQLQEAEQEMEEMKEKMRKFAKSKQQKILELEEENDRLRAEVHPAGDTAKECMETLLSSNASMKEELERVKMEYETLSKKFQSLMSEKDSLSEEVQDLKHQIEDNVSKQANLEATEKHDNQTNVTEEGTQSIPGETEEQDSLSMSTRPTCSESVPSAKSANPAVSKDFSSHDEINNYLQQIDQLKERIAGLEEEKQKNKEFSQTLENEKNTLLSQISTKDGELKMLQEEVTKMNLLNQQIQEELSRVTKLKETAEEEKDDLEERLMNQLAELNGSIGNYCQDVTDAQIKNELLESEMKNLKKCVSELEEEKQQLVKEKTKVESEIRKEYLEKIQGAQKEPGNKSHAKELQELLKEKQQEVKQLQKDCIRYQEKISALERTVKALEFVQTESQKDLEITKENLAQAVEHRKKAQAELASFKVLLDDTQSEAARVLADNLKLKKELQSNKESVKSQMKQKDEDLERRLEQAEEKHLKEKKNMQEKLDALRREKVHLEETIGEIQVTLNKKDKEVQQLQENLDSTVTQLAAFTKSMSSLQDDRDRVIDEAKKWERKFSDAIQSKEEEIRLKEDNCSVLKDQLRQMSIHMEELKINISRLEHDKQIWESKAQTEVQLQQKVCDTLQGENKELLSQLEETRHLYHSSQNELAKLESELKSLKDQLTDLSNSLEKCKEQKGNLEGIIRQQEADIQNSKFSYEQLETDLQASRELTSRLHEEINMKEQKIISLLSGKEEAIQVAIAELRQQHDKEIKELENLLSQEEEENIVLEEENKKAVDKTNQLMETLKTIKKENIQQKAQLDSFVKSMSSLQNDRDRIVGDYQQLEERHLSIILEKDQLIQEAAAENNKLKEEIRGLRSHMDDLNSENAKLDAELIQYREDLNQVITIKDSQQKQLLEVQLQQNKELENKYAKLEEKLKESEEANEDLRRSFNALQEEKQDLSKEIESLKVSISQLTRQVTALQEEGTLGLYHAQLKVKEEEVHRLSALFSSSQKRIAELEEELVCVQKEAAKKVGEIEDKLKKELKHLHHDAGIMRNETETAEERVAELARDLVEMEQKLLMVTKENKGLTAQIQSFGRSMSSLQNSRDHANEELDELKRKYDASLKELAQLKEQGLLNRERDALLSETAFSMNSTEENSLSHLEKLNQQLLSKDEQLLHLSSQLEDSYNQVQSFSKAMASLQNERDHLWNELEKFRKSEEGKQRSAAQPSTSPAEVQSLKKAMSSLQNDRDRLLKELKNLQQQYLQINQEITELHPLKAQLQEYQDKTKAFQIMQEELRQENLSWQHELHQLRMEKSSWEIHERRMKEQYLMAISDKDQQLSHLQNLIRELRSSSSQTQPLKVQYQRQASPETSASPDGSQNLVYETELLRTQLNDSLKEIHQKELRIQQLNSNFSQLLEEKNTLSIQLCDTSQSLRENQQHYGDLLNHCAVLEKQVQELQAGPLNIDVAPGAPQGFSEAQQQLCNTRQEVNELRKLLEEERDQRVAAENALSVAEEQIRRLEHSEWDSSRTPIIGSCGTQEQALLIDLTSNSCRRTRSGVGWKRVLRSLCHSRTRVPLLAAIYFLMIHVLLILCFTGHL

SEQ ID NO: 1030448 - protein, 3259 aa, Homo sapiens; identical to SEQ ID NO: 1030445

SEQ ID NO: 1030449 - protein, 3262 aa, Homo sapiens
MLSRLSGLANVVLHELSGDDDTDQNMRAPLDPELHQESDMEFNNTTQEDVQERLAYAEQLVVELKDIIRQKDVQLQQKDEALQEERKAADNKIKKLKLHAKAKLTSLNKYIEEMKAQGGTVLPTEPQSEEQLSKHDKSSTEEEMEIEKIKHKLQEKEELISTLQAQLTQAQAEQPAQSSTEMEEFVMMKQQLQEKEEFISTLQAQLSQTQAEQAAQQVVREKDARFETQVRLHEDELLQLVTQADVETEMQQKLRVLQRKLEEHEESLVGRAQVVDLLQQELTAAEQRNQILSQQLQQMEAEHNTLRNTVETEREESKILLEKMELEVAERKLSFHNLQEEMHHLLEQFEQAGQAQAELESRYSALEQKHKAEMEEKTSHILSLQKTGQELQSACDALKDQNSKLLQDKNEQAVQSAQTIQQLEDQLQQKSKEISQFLNRLPLQQHETASQTSFPDVYNEGTQAVTEENIASLQKRVVELENEKGALLLSSIELEELKAENEKLSSQITLLEAQNRTGEADREVSEISIVDIANKRSSSAEESGQDVLENTFSQKHKELSVLLLEMKEAQEEIAFLKLQLQGKRAEEADHEVLDQKEMKQMEGEGIAPIKMKVFLEDTGQDFPLMPNEESSLPAVEKEQASTEHQSRTSEEISLNDAGVELKSTKQDGDKSLSAVPDIGQCHQDELERLKSQILELELNFHKAQEIYEKNLDEKAKEISNLNQLIEEFKKNADNNSSAFTALSEERDQLLSQVKELSMVTELRAQVKQLEMNLAEAERQRRLDYESQTAHDNLLTEQIHSLSIEAKSKDVKIEVLQNELDDVQLQFSEQSTLIRSLQSQLQNKESEVLEGAERVRHISSKVEELSQALSQKELEITKMDQLLLEKKRDVETLQQTIEEKDQQVTEISFSMTEKMVQLNEEKFSLGVEIKTLKEQLNLLSRAEEAKKEQVEEDNEVSSGLKQNYDEMSPAGQISKEELQHEFDLLKKENEQRKRKLQAALINRKELLQRVSRLEEELANLKDESKKEIPLSETERGEVEEDKENKEYSEKCVTSKCQEIEIYLKQTISEKEVELQHIRKDLEEKLAAEEQFQALVKQMNQTLQDKTNQIDLLQAEISENQAIIQKLITSNTDASDGDSVALVKETVVISPPCTGSSEHWKPELEEKILALEKEKEQLQKKLQEALTSRKAILKKAQEKERHLREELKQQKDDYNRLQEQFDEQSKENENIGDQLRQLQIQVRESIDGKLPSTDQQESCSSTPGLEEPLFKATEQHHTQPVLESNLCPDWPSHSEDASALQGGTSVAQIKAQLKEIEAEKVELELKVSSTTSELTKKSEEVFQLQEQINKQGLEIESLKTVSHEAEVHAESLQQKLESSQLQIAGLEHLRELQPKLDELQKLISKKEEDVSYLSGQLSEKEAALTKIQTEIIEQEDLIKALHTQLEMQAKEHDERIKQLQVELCEMKQKPEEIGEESRAKQQIQRKLQAALISRKEALKENKSLQEELSLARGTIERLTKSLADVESQVSAQNKEKDTVLGRLALLQEERDKLITEMDRSLLENQSLSSSCESLKLALEGLTEDKEKLVKEIESLKSSKIAESTEWQEKHKELQKEYEILLQSYENVSNEAERIQHVVEAVRQEKQELYGKLRSTEANKKETEKQLQEAEQEMEEMKEKMRKFAKSKQQKILELEEENDRLRAEVHPAGDTAKECMETLLSSNASMKEELERVKMEYETLSKKFQSLMSEKDSLSEEVQDLKHQIEDNVSKQANLEATEKHDNQTNVTEEGTQSIPGETEEQDSLSMSTRPTCSESVPSAKSANPAVSKDFSSHDEINNYLQQIDQLKERIAGLEEEKQKNKEFSQTLENEKNTLLSQISTKDGELKMLQEEVTKMNLLNQQIQEELSRVTKLKETAEEEKDDLEERLMNQLAELNGSIGNYCQDVTDAQIKNELLESEMKNLKKCVSELEEEKQQLVKEKTKVESEIRKEYLEKIQGAQKEPGNKSHAKELQELLKEKQQEVKQLQKDCIRYQEKISALERTVKALEFVQTESQKDLEITKENLAQAVEHRKKAQAELASFKVLLDDTQSEAARVLADNLKLKKELQSNKESVKSQMKQKDEDLERRLEQAEEKHLKEKKNMQEKLDALRREKVHLEETIGEIQVTLNKKDKEVQQLQENLDSTVTQLAAFTKSMSSLQDDRDRVIDEAKKWERKFSDAIQSKEEEIRLKEDNCSVLKDQLRQMSIHMEELKINISRLEHDKQIWESKAQTEVQLQQKVCDTLQGENKELLSQLEETRHLYHSSQNELAKLESELKSLKDQLTDLSNSLEKCKEQKGNLEGIIRQQEADIQNSKFSYEQLETDLQASRELTSRLHEEINMKEQKIISLLSGKEEAIQVAIAELRQQHDKEIKELENLLSQEEEENIVLEEENKKAVDKTNQLMETLKTIKKENIQQKAQLDSFVKSMSSLQNDRDRIVGDYQQLEERHLSIILEKDQLIQEAAAENNKLKEEIRGLRSHMDDLNSENAKLDAELIQYREDLNQVITIKDSQQKQLLEVQLQQNKELENKYAKLEEKLKESEEANEDLRRSFNALQEEKQDLSKEIESLKVSISQLTRQVTALQEEGTLGLYHAQLKVKEEEVHRLSALFSSSQKRIAELEEELVCVQKEAAKKVGEIEDKLKKELKHLHHDAGIMRNETETAEERVAELARDLVEMEQKLLMVTKENKGLTAQIQSFGRSMSSLQNSRDHANEELDELKRKYDASLKELAQLKEQGLLNRERDALLSETAFSMNSTEENSLSHLEKLNQQLLSKDEQLLHLSSQLEDSYNQVQSFSKAMASLQNERDHLWNELEKFRKSEEGKQRSAAQPSTSPAEVQSLKKAMSSLQNDRDRLLKELKNLQQQYLQINQEITELHPLKAQLQEYQDKTKAFQIMQEELRQENLSWQHELHQLRMEKSSWEIHERRMKEQYLMAISDKDQQLSHLQNLIRELRSSSSQTQPLKVQYQRQASPETSASPDGSQNLVYETELLRTQLNDSLKEIHQKELRIQQLNSNFSQLLEEKNTLSIQLCDTSQSLRENQQHYGDLLNHCAVLEKQVQELQAGPLNIDVAPGAPQEKNGVHRKSDPEELREPQQSFSEAQQQLCNTRQEVNELRKLLEEERDQRVAAENALSVAEEQIRRLEHSEWDSSRTPIIGSCGTQEQALLIDLTSNSCRRTRSGVGWKRVLRSLCHSRTRVPLLAAIYFLMIHVLLILCFTATGSQY

SEQ ID NO: 1030450 - protein, 2976 aa, Homo sapiens
MLSRLSGLANVVLHELSGDDDTDQNMRAPLDPELHQESDMEFNNTTQEDVQERLAYAEQLVVELKDIIRQKDVQLQQKDEALQEERKAADNKIKKLKLHAKAKLTSLNKYIEEMKAQGGTVLPTEPQSEEQLSKHDKSSTEEEMEIEKIKHKLQEKEELISTLQAQLTQAQAEQPAQSSTEMEEFVMMKQQLQEKEEFISTLQAQLSQTQAEQAAQQVVREKDARFETQVRLHEDELLQLVTQADVETEMQQKLRVLQRKLEEHEESLVGRAQVVDLLQQELTAAEQRNQILSQQLQQMEAEHNTLRNTVETEREESKILLEKMELEVAERKLSFHNLQEEMHHLLEQFEQAGQAQAELESRYSALEQKHKAEMEEKTSHILSLQKTGQELQSACDALKDQNSKLLQDKNEQAVQSAQTIQQLEDQLQQKSKEISQFLNRLPLQQHETASQTSFPDVYNEGTQAVTEENIASLQKRVVELENEKGALLLSSIELEELKAENEKLSSQITLLEAQNRTGEADREVSEISIVDIANKRSSSAEESGQDVLENTFSQKHKELSVLLLEMKEAQEEIAFLKLQLQGKRAEEADHEVLDQKEMKQMEGEGIAPIKMKVFLEDTGQDFPLMPNEESSLPAVEKEQASTEHQSRTSEEISLNDAGVELKSTKQDGDKSLSAVPDIGQCHQDELERLKSQILELELNFHKAQEIYEKNLDEKAKEISNLNQLIEEFKKNADNNSSAFTALSEERDQLLSQVKELSMVTELRAQVKQLEMNLAEAERQRRLDYESQTAHDNLLTEQIHSLSIEAKSKDVKIEVLQNELDDVQLQFSEQSTLIRSLQSQLQNKESEVLEGAERVRHISSKVEELSQALSQKELEITKMDQLLLEKKRDVETLQQTIEEKDQQVTEISFSMTEKMVQLNEEKFSLGVEIKTLKEQLNLLSRAEEAKKEQVEEDNEVSSGLKQNYDEMSPAGQISKEELQHEFDLLKKENEQRKRKLQAALINRKELLQRVSRLEEELANLKDESKKEIPLSETERGEVEEDKENKEYSEKCVTSKCQEIEIYLKQTISEKEVELQHIRKDLEEKLAAEEQFQALVKQMNQTLQDKTNQIDLLQAEISENQAIIQKLITSNTDASDGDSVALVKETVVISPPCTGSSEHWKPELEEKILALEKEKEQLQKKLQEALTSRKAILKKAQEKERHLREELKQQKDDYNRLQEQFDEQSKENENIGDQLRQLQIQVRESIDGKLPSTDQQESCSSTPGLEEPLFKATEQHHTQPVLESNLCPDWPSHSEDASALQGGTSVAQIKAQLKEIEAEKVELELKVSSTTSELTKKSEEVFQLQEQINKQGLEIESLKTVSHEAEVHAESLQQKLESSQLQIAGLEHLRELQPKLDELQKLISKKEEDVSYLSGQLSEKEAALTKIQTEIIEQEDLIKALHTQLEMQAKEHDERIKQLQVELCEMKQKPEEIGEESRAKQQIQRKLQAALISRKEALKENKSLQEELSLARGTIERLTKSLADVESQVSAQNKEKDTVLGRLALLQEERDKLITEMDRSLLENQSLSSSCESLKLALEGLTEDKEKLVKEIESLKSSKIAESTEWQEKHKELQKEYEILLQSYENVSNEAERIQHVVEAVRQEKQELYGKLRSTEANKKETEKQLQEAEQEMEEMKEKMRKFAKSKQQKILELEEENDRLRAEVHPAGDTAKECMETLLSSNASMKEELERVKMEYETLSKKFQSLMSEKDSLSEEVQDLKHQIEDNVSKQANLEATEKHDNQTNVTEEGTQSIPGETEEQDSLSMSTRPTCSESVPSAKSANPAVSKDFSSHDEINNYLQQIDQLKERIAGLEEEKQKNKEFSQTLENEKNTLLSQISTKDGELKMLQEEVTKMNLLNQQIQEELSRVTKLKETAEEEKDDLEERLMNQLAELNGSIGNYCQDVTDAQIKNELLESEMKNLKKCVSELEEEKQQLVKEKTKVESEIRKEYLEKIQGAQKEPGNKSHAKELQELLKEKQQEVKQLQKDCIRYQEKISALERTVKALEFVQTESQKDLEITKENLAQAVEHRKKAQAELASFKVLLDDTQSEAARVLADNLKLKKELQSNKESVKSQMKQKDEDLERRLEQAEEKHLKEKKNMQEKLDALRREKVHLEETIGEIQVTLNKKDKEVQQLQENLDSTVTQLAAFTKSMSSLQDDRDRVIDEAKKWERKFSDAIQSKEEEIRLKEDNCSVLKDQLRQMSIHMEELKINISRLEHDKQIWESKAQTEVQLQQKVCDTLQGENKELLSQLEETRHLYHSSQNELAKLESELKSLKDQLTDLSNSLEKCKEQKGNLEGIIRQQEADIQNSKFSYEQLETDLQASRELTSRLHEEINMKEQKIISLLSGKEEAIQVAIAELRQQHDKEIKELENLLSQEEEENIVLEEENKKAVDKTNQLMETLKTIKKENIQQKAQLDSFVKSMSSLQNDRDRIVGDYQQLEERHLSIILEKDQLIQEAAAENNKLKEEIRGLRSHMDDLNSENAKLDAELIQYREDLNQVITIKDSQQKQLLEVQLQQNKELENKYAKLEEKLKESEEANEDLRRSFNALQEEKQDLSKEIESLKVSISQLTRQVTALQEEGTLGLYHAQLKVKEEEVHRLSALFSSSQKRIAELEEELVCVQKEAAKKVGEIEDKLKKELKHLHHDAGIMRNETETAEERVAELARDLVEMEQKLLMVTKENKGLTAQIQSFGRSMSSLQNSRDHANEELDELKRKYDASLKELAQLKEQGLLNRERDALLSETAFSMNSTEENSLSHLEKLNQQLLSKDEQLLHLSSQLEDSYNQVQSFSKAMASLQNERDHLWNELEKFRKSEEGKQRSAAQPSTSPAEVQSLKKAMSSLQNDRDRLLKELKNLQQQYLQINQEITELHPLKAQLQEYQFQWNSLPIYRSSLQLFTESACKNRGGYEDRLELQGLASLLSSTALSLNASA

SEQ ID NO: 1030451 - protein, 152 aa, Homo sapiens [sequence omitted]

SEQ ID NO: 1030452 - protein, 2737 aa, Homo sapiens
MLSRLSGLANVVLHELSGDDDTDQNMRAPLDPELHQESDMEFNNTTQEDVQERLAYAEQLVVELKDIIRQKDVQLQQKDEALQEERKAADNKIKKLKLHAKAKLTSLNKYIEEMKEQASTEHQSRTSEEISLNDAGVELKSTKQDGDKSLSAVPDIGQCHQDELERLKSQILELELNFHKAQEIYEKNLDEKAKEISNLNQLIEEFKKNADNNSSAFTALSEERDQLLSQVKELSMVTELRAQVKQLEMNLAEAERQRRLDYESQTAHDNLLTEQIHSLSIEAKSKDVKIEVLQNELDDVQLQFSEQSTLIRSLQSQLQNKESEVLEGAERVRHISSKVEELSQALSQKELEITKMDQLLLEKKRDVETLQQTIEEKDQQVTEISFSMTEKMVQLNEEKFSLGVEIKTLKEQLNLLSRAEEAKKEQVEEDNEVSSGLKQNYDEMSPAGQISKEELQHEFDLLKKENEQRKRKLQAALINRKELLQRVSRLEEELANLKDESKKEIPLSETERGEVEEDKENKEYSEKCVTSKCQEIEIYLKQTISEKEVELQHIRKDLEEKLAAEEQFQALVKQMNQTLQDKTNQIDLLQAEISENQAIIQKLITSNTDASDGDSVALVKETVVISPPCTGSSEHWKPELEEKILALEKEKEQLQKKLQEALTSRKAILKKAQEKERHLREELKQQKDDYNRLQEQFDEQSKENENIGDQLRQLQIQVRESIDGKLPSTDQQESCSSTPGLEEPLFKATEQHHTQPVLESNLCPDWPSHSEDASALQGGTSVAQIKAQLKEIEAEKVELELKVSSTTSELTKKSEEVFQLQEQINKQGLEIESLKTVSHEAEVHAESLQQKLESSQLQIAGLEHLRELQPKLDELQKLISKKEEDVSYLSGQLSEKEAALTKIQTEIIEQEDLIKALHTQLEMQAKEHDERIKQLQVELCEMKQKPEEIGEESRAKQQIQRKLQAALISRKEALKENKSLQEELSLARGTIERLTKSLADVESQVSAQNKEKDTVLGRLALLQEERDKLITEMDRSLLENQSLSSSCESLKLALEGLTEDKEKLVKEIESLKSSKIAESTEWQEKHKELQKEYEILLQSYENVSNEAERIQHVVEAVRQEKQELYGKLRSTEANKKETEKQLQEAEQEMEEMKEKMRKFAKSKQQKILELEEENDRLRAEVHPAGDTAKECMETLLSSNASMKEELERVKMEYETLSKKFQSLMSEKDSLSEEVQDLKHQIEDNVSKQANLEATEKHDNQTNVTEEGTQSIPGETEEQDSLSMSTRPTCSESVPSAKSANPAVSKDFSSHDEINNYLQQIDQLKERIAGLEEEKQKNKEFSQTLENEKNTLLSQISTKDGELKMLQEEVTKMNLLNQQIQEELSRVTKLKETAEEEKDDLEERLMNQLAELNGSIGNYCQDVTDAQIKNELLESEMKNLKKCVSELEEEKQQLVKEKTKVESEIRKEYLEKIQGAQKEPGNKSHAKELQELLKEKQQEVKQLQKDCIRYQEKISALERTVKALEFVQTESQKDLEITKENLAQAVEHRKKAQAELASFKVLLDDTQSEAARVLADNLKLKKELQSNKESVKSQMKQKDEDLERRLEQAEEKHLKEKKNMQEKLDALRREKVHLEETIGEIQVTLNKKDKEVQQLQENLDSTVTQLAAFTKSMSSLQDDRDRVIDEAKKWERKFSDAIQSKEEEIRLKEDNCSVLKDQLRQMSIHMEELKINISRLEHDKQIWESKAQTEVQLQQKVCDTLQGENKELLSQLEETRHLYHSSQNELAKLESELKSLKDQLTDLSNSLEKCKEQKGNLEGIIRQQEADIQNSKFSYEQLETDLQASRELTSRLHEEINMKEQKIISLLSGKEEAIQVAIAELRQQHDKEIKELENLLSQEEEENIVLEEENKKAVDKTNQLMETLKTIKKENIQQKAQLDSFVKSMSSLQNDRDRIVGDYQQLEERHLSIILEKDQLIQEAAAENNKLKEEIRGLRSHMDDLNSENAKLDAELIQYREDLNQVITIKDSQQKQLLEVQLQQNKELENKYAKLEEKLKESEEANEDLRRSFNALQEEKQDLSKEIESLKVSISQLTRQVTALQEEGTLGLYHAQLKVKEEEVHRLSALFSSSQKRIAELEEELVCVQKEAAKKVGEIEDKLKKELKHLHHDAGIMRNETETAEERVAELARDLVEMEQKLLMVTKENKGLTAQIQSFGRSMSSLQNSRDHANEELDELKRKYDASLKELAQLKEQGLLNRERDALLSETAFSMNSTEENSLSHLEKLNQQLLSKDEQLLHLSSQLEDSYNQVQSFSKAMASLQNERDHLWNELEKFRKSEEGKQRSAAQPSTSPAEVQSLKKAMSSLQNDRDRLLKELKNLQQQYLQINQEITELHPLKAQLQEYQDKTKAFQIMQEELRQENLSWQHELHQLRMEKSSWEIHERRMKEQYLMAISDKDQQLSHLQNLIRELRSSSSQTQPLKVQYQRQASPETSASPDGSQNLVYETELLRTQLNDSLKEIHQKELRIQQLNSNFSQLLEEKNTLSIQLCDTSQSLRENQQHYGDLLNHCAVLEKQVQELQAGPLNIDVAPGAPQEKNGVHRKSDPEELREPQQSFSEAQQQLCNTRQEVNELRKLLEEERDQRVAAENALSVAEEQIRRLEHSEWDSSRTPIIGSCGTQEQALLIDLTSNSCRRTRSGVGWKRVLRSLCHSRTRVPLLAAIYFLMIHVLLILCFTGHL

SEQ ID NO: 1030453 - protein, 3129 aa, Homo sapiens
MLSRLSGLANVVLHELSGDDDTDQNMRAPLDPELHQESDMEFNNTTQEDVQERLAYAEQLVVELKDIIRQKDVQLQQKDEALQEERKAADNKIKKLKLHAKAKLTSLNKYIEEMKAQGGTVLPTEPQSEEQLSKHDKSSTEEEMEIEKIKHKLQEKEELISTLQAQLTQAQAEQPAQSSTEMEEFVMMKQQLQEKEEFISTLQAQLSQTQAEQAAQQVVREKDARFETQVRLHEDELLQLVTQADVETEMQQKLRVLQRKLEEHEESLVGRAQVVDLLQQELTAAEQRNQILSQQLQQMEAEHNTLRNTVETEREESKILLEKMELEVAERKLSFHNLQEEMHHLLEQFEQAGQAQAELESRYSALEQKHKAEMEEKTSHILSLQKTGQELQSACDALKDQNSKLLQDKNEQAVQSAQTIQQLEDQLQQKSKEISQFLNRLPLQQHETASQTSFPDVYNEGTQAVTEENIASLQKRVVELENEKGALLLSSIELEELKAENEKLSSQITLLEAQNRTGEADREVSEISIVDIANKRSSSAEESGQDVLENTFSQKHKELSVLLLEMKEAQEEIAFLKLQLQGKRAEEADHEVLDQKEMKQMEGEGIAPIKMKVFLEDTGQDFPLMPNEESSLPAVEKEQASTEHQSRTSEEISLNDAGVELKSTKQDGDKSLSAVPDIGQCHQDELERLKSQILELELNFHKAQEIYEKNLDEKAKEISNLNQLIEEFKKNADNNSSAFTALSEERDQLLSQVKELSMVTELRAQVKQLEMNLAEAERQRRLDYESQTAHDNLLTEQIHSLSIEAKSKDVKIEVLQNELDDVQLQFSEQSTLIRSLQSQLQNKESEVLEGAERVRHISSKVEELSQALSQKELEITKMDQLLLEKKRDVETLQQTIEEKDQQVTEISFSMTEKMVQLNEEKFSLGVEIKTLKEQLNLLSRAEEAKKEQVEEDNEVSSGLKQNYDEMSPAGQISKEELQHEFDLLKKENEQRKRKLQAALINRKELLQRVSRLEEELANLKDESKKEIPLSETERGEVEEDKENKEYSEKCVTSKCQEIEIYLKQTISEKEVELQHIRKDLEEKLAAEEQFQALVKQMNQTLQDKTNQIDLLQAEISENQAIIQKLITSNTDASDGDSVALVKETVVISPPCTGSSEHWKPELEEKILALEKEKEQLQKKLQEALTSRKAILKKAQEKERHLREELKQQKDDYNRLQEQFDEQSKENENIGDQLRQLQIQVRESIDGKLPSTDQQESCSSTPGLEEPLFKATEQHHTQPVLESNLCPDWPSHSEDASALQGGTSVAQIKAQLKEIEAEKVELELKVSSTTSELTKKSEEVFQLQEQINKQGLEIESLKTVSHEAEVHAESLQQKLESSQLQIAGLEHLRELQPKLDELQKLISKKEEDVSYLSGQLSEKEAALTKIQTEIIEQEDLIKALHTQLEMQAKEHDERIKQLQVELCEMKQKPEEIGEESRAKQQIQRKLQAALISRKEALKENKSLQEELSLARGTIERLTKSLADVESQVSAQNKEKDTVLGRLALLQEERDKLITEMDRSLLENQSLSSSCESLKLALEGLTEDKEKLVKEIESLKSSKIAESTEWQEKHKELQKEYEILLQSYENVSNEAERIQHVVEAVRQEKQELYGKLRSTEANKKETEKQLQEAEQEMEEMKEKMRKFAKSKQQKILELEEENDRLRAEVHPAGDTAKECMETLLSSNASMKEELERVKMEYETLSKKFQSLMSEKDSLSEEVQDLKHQIEDNVSKQANLEATEKHDNQTNVTEEGTQSIPGETEEQDSLSMSTRPTCSESVPSAKSANPAVSKDFSSHDEINNYLQQIDQLKERIAGLEEEKQKNKEFSQTLENEKNTLLSQISTKDGELKMLQEEVTKMNLLNQQIQEELSRVTKLKETAEEEKDDLEERLMNQLAELNGSIGNYCQDVTDAQIKNELLESEMKNLKKCVSELEEEKQQLVKEKTKVESEIRKEYLEKIQGAQKEPGNKSHAKELQELLKEKQQEVKQLQKDCIRYQEKISALERTVKALEFVQTESQKDLEITKENLAQAVEHRKKAQAELASFKVLLDDTQSEAARVLADNLKLKKELQSNKESVKSQMKQKDEDLERRLEQAEEKHLKEKKNMQEKLDALRREKVHLEETIGEIQVTLNKKDKEVQQLQENLDSTVTQLAAFTKSMSSLQDDRDRVIDEAKKWERKFSDAIQSKEEEIRLKEDNCSVLKDQLRQMSIHMEELKINISRLEHDKQIWESKAQTEVQLQQKVCDTLQGENKELLSQLEETRHLYHSSQNELAKLESELKSLKDQLTDLSNSLEKCKEQKGNLEGIIRQQEADIQNSKFSYEQLETDLQASRELTSRLHEEINMKEQKIISLLSGKEEAIQVAIAELRQQHDKEIKELENLLSQEEEENIVLEEENKKAVDKTNQLMETLKTIKKENIQQKAQLDSFVKSMSSLQNDRDRIVGDYQQLEERHLSIILEKDQLIQEAAAENNKLKEEIRGLRSHMDDLNSENAKLDAELIQYREDLNQVITIKDSQQKQLLEVQLQQNKELENKYAKLEEKLKESEEANEDLRRSFNALQEEKQDLSKEIESLKVSISQLTRQVTALQEEGTLGLYHAQLKVKEEEVHRLSALFSSSQKRIAELEEELVCVQKEAAKKVGEIEDKLKKELKHLHHDAGIMRNETETAEERVAELARDLVEMEQKLLMVTKENKGLTAQIQSFGRSMSSLQNSRDHANEELDELKRKYDASLKELAQLKEQGLLNRERDALLSETAFSMNSTEENSLSHLEKLNQQLLSKDEQLLHLSSQLEDSYNQVQSFSKAMASLQNERDHLWNELEKFRKSEEGKQRSAAQPSTSPAEVQSLKKAMSSLQNDRDRLLKELKNLQQQYLQINQEITELHPLKAQLQEYQDKTKAFQIMQEELRQENLSWQHELHQLRMEKSSWEIHERRMKEQYLMAISDKDQQLSHLQNLIRELRSSSSQTQPLKVQYQRQASPETSASPDGSQNLVYETELLRTQLNDSLKEIHQKELRIQQLNSNFSQLLEEKNTLSIQLCDTSQSLRENQQHYGDLLNHCAVLEKQVQELQAGPLNIDVAPGAPQGKRMEFTERVTLRN

SEQ ID NO: 1030454 - protein, 2509 aa, Homo sapiens
SPHQGDPPPPGRNLLLLRLEMNLAEAERQRRLDYESQTAHDNLLTEQIHSLSIEAKSKDVKIEVLQNELDDVQLQFSEQSTLIRSLQSQLQNKESEVLEGAERVRHISSKVEELSQALSQKELEITKMDQLLLEKKRDVETLQQTIEEKDQQVTEISFSMTEKMVQLNEEKFSLGVEIKTLKEQLNLLSRAEEAKKEQVEEDNEVSSGLKQNYDEMSPAGQISKEELQHEFDLLKKENEQRKRKLQAALINRKELLQRVSRLEEELANLKDESKKEIPLSETERGEVEEDKENKEYSEKCVTSKCQEIEIYLKQTISEKEVELQHIRKDLEEKLAAEEQFQALVKQMNQTLQDKTNQIDLLQAEISENQAIIQKLITSNTDASDGDSVALVKETVVISPPCTGSSEHWKPELEEKILALEKEKEQLQKKLQEALTSRKAILKKAQEKERHLREELKQQKDDYNRLQEQFDEQSKENENIGDQLRQLQIQVRESIDGKLPSTDQQESCSSTPGLEEPLFKATEQHHTQPVLESNLCPDWPSHSEDASALQGGTSVAQIKAQLKEIEAEKVELELKVSSTTSELTKKSEEVFQLQEQINKQGLEIESLKTVSHEAEVHAESLQQKLESSQLQIAGLEHLRELQPKLDELQKLISKKEEDVSYLSGQLSEKEAALTKIQTEIIEQEDLIKALHTQLEMQAKEHDERIKQLQVELCEMKQKPEEIGEESRAKQQIQRKLQAALISRKEALKENKSLQEELSLARGTIERLTKSLADVESQVSAQNKEKDTVLGRLALLQEERDKLITEMDRSLLENQSLSSSCESLKLALEGLTEDKEKLVKEIESLKSSKIAESTEWQEKHKELQKEYEILLQSYENVSNEAERIQHVVEAVRQEKQELYGKLRSTEANKKETEKQLQEAEQEMEEMKEKMRKFAKSKQQKILELEEENDRLRAEVHPAGDTAKECMETLLSSNASMKEELERVKMEYETLSKKFQSLMSEKDSLSEEVQDLKHQIEDNVSKQANLEATEKHDNQTNVTEEGTQSIPGETEEQDSLSMSTRPTCSESVPSAKSANPAVSKDFSSHDEINNYLQQIDQLKERIAGLEEEKQKNKEFSQTLENEKNTLLSQISTKDGELKMLQEEVTKMNLLNQQIQEELSRVTKLKETAEEEKDDLEERLMNQLAELNGSIGNYCQDVTDAQIKNELLESEMKNLKKCVSELEEEKQQLVKEKTKVESEIRKEYLEKIQGAQKEPGNKSHAKELQELLKEKQQEVKQLQKDCIRYQEKISALERTVKALEFVQTESQKDLEITKENLAQAVEHRKKAQAELASFKVLLDDTQSEAARVLADNLKLKKELQSNKESVKSQMKQKDEDLERRLEQAEEKHLKEKKNMQEKLDALRREKVHLEETIGEIQVTLNKKDKEVQQLQENLDSTVTQLAAFTKSMSSLQDDRDRVIDEAKKWERKFSDAIQSKEEEIRLKEDNCSVLKDQLRQMSIHMEELKINISRLEHDKQIWESKAQTEVQLQQKVCDTLQGENKELLSQLEETRHLYHSSQNELAKLESELKSLKDQLTDLSNSLEKCKEQKGNLEGIIRQQEADIQNSKFSYEQLETDLQASRELTSRLHEEINMKEQKIISLLSGKEEAIQVAIAELRQQHDKEIKELENLLSQEEEENIVLEEENKKAVDKTNQLMETLKTIKKENIQQKAQLDSFVKSMSSLQNDRDRIVGDYQQLEERHLSIILEKDQLIQEAAAENNKLKEEIRGLRSHMDDLNSENAKLDAELIQYREDLNQVITIKDSQQKQLLEVQLQQNKELENKYAKLEEKLKESEEANEDLRRSFNALQEEKQDLSKEIESLKVSISQLTRQVTALQEEGTLGLYHAQLKVKEEEVHRLSALFSSSQKRIAELEEELVCVQKEAAKKVGEIEDKLKKELKHLHHDAGIMRNETETAEERVAELARDLVEMEQKLLMVTKENKGLTAQIQSFGRSMSSLQNSRDHANEELDELKRKYDASLKELAQLKEQGLLNRERDALLSETAFSMNSTEENSLSHLEKLNQQLLSKDEQLLHLSSQLEDSYNQVQSFSKAMASLQNERDHLWNELEKFRKSEEGKQRSAAQPSTSPAEVQSLKKAMSSLQNDRDRLLKELKNLQQQYLQINQEITELHPLKAQLQEYQDKTKAFQIMQEELRQENLSWQHELHQLRMEKSSWEIHERRMKEQYLMAISDKDQQLSHLQNLIRELRSSSSQTQPLKVQYQRQASPETSASPDGSQNLVYETELLRTQLNDSLKEIHQKELRIQQLNSNFSQLLEEKNTLSIQLCDTSQSLRENQQHYGDLLNHCAVLEKQVQELQAGPLNIDVAPGAPQEKNGVHRKSDPEELREPQQSFSEAQQQLCNTRQEVNELRKLLEEERDQRVAAENALSVAEEQIRRLEHSEWDSSRTPIIGSCGTQEQALLIDLTSNSCRRTRSGVGWKRVLRSLCHSRTRVPLLAAIYFLMIHVLLILCFTGHL

SEQ ID NO: 1030455 - protein, 3180 aa, Homo sapiens
MLSRLSGLANVVLHELSGDDDTDQNMRAPLDPELHQESDMEFNNTTQEDVQERLAYAEQLVVELKDIIRQKDVQLQQKDEALQEERKAADNKIKKLKLHAKAKLTSLNKYIEEMKAQGGTVLPTEPQSEEQLSKHDKSSTEEEMEIEKIKHKLQEKEELISTLQAQLTQAQAEQPAQSSTEMEEFVMMKQQLQEKEEFISTLQAQLSQTQAEQAAQQVVREKDARFETQVRLHEDELLQLVTQADVETEMQQKLRVLQRKLEEHEESLVGRAQVVDLLQQELTAAEQRNQILSQQLQQMEAEHNTLRNTVETEREESKILLEKMELEVAERKLSFHNLQEEMHHLLEQFEQAGQAQAELESRYSALEQKHKAEMEEKTSHILSLQKTGQELQSACDALKDQNSKLLQDKNEQAVQSAQTIQQLEDQLQQKSKEISQFLNRLPLQQHETASQTSFPDVYNEGTQAVTEENIASLQKRVVELENEKGALLLSSIELEELKAENEKLSSQITLLEAQNRTGEADREVSEISIVDIANKRSSSAEESGQDVLENTFSQKHKELSVLLLEMKEAQEEIAFLKLQLQGKRAEEADHEVLDQKEMKQMEGEGIAPIKMKVFLEDTGQDFPLMPNEESSLPAVEKEQASTEHQSRTSEEISLNDAGVELKSTKQDGDKSLSAVPDIGQCHQDELERLKSQILELELNFHKAQEIYEKNLDEKAKEISNLNQLIEEFKKNADNNSSAFTALSEERDQLLSQVKELSMVTELRAQVKQLEMNLAEAERQRRLDYESQTAHDNLLTEQIHSLSIEAKSKDVKIEVLQNELDDVQLQFSEQSTLIRSLQSQLQNKESEVLEGAERVRHISSKVEELSQALSQKELEITKMDQLLLEKKRDVETLQQTIEEKDQQVTEISFSMTEKMVQLNEEKFSLGVEIKTLKEQLNLLSRAEEAKKEQVEEDNEVSSGLKQNYDEMSPAGQISKEELQHEFDLLKKENEQRKRKLQAALINRKELLQRVSRLEEELANLKDESKKEIPLSETERGEVEEDKENKEYSEKCVTSKCQEIEIYLKQTISEKEVELQHIRKDLEEKLAAEEQFQALVKQMNQTLQDKTNQIDLLQAEISENQAIIQKLITSNTDASDGDSVALVKETVVISPPCTGSSEHWKPELEEKILALEKEKEQLQKKLQEALTSRKAILKKAQEKERHLREELKQQKDDYNRLQEQFDEQSKENENIGDQLRQLQIQVRESIDGKLPSTDQQESCSSTPGLEEPLFKATEQHHTQPVLESNLCPDWPSHSEDASALQGGTSVAQIKAQLKEIEAEKVELELKVSSTTSELTKKSEEVFQLQEQINKQGLEIESLKTVSHEAEVHAESLQQKLESSQLQIAGLEHLRELQPKLDELQKLISKKEEDVSYLSGQLSEKEAALTKIQTEIIEQEDLIKALHTQLEMQAKEHDERIKQLQVELCEMKQKPEEIGEESRAKQQIQRKLQAALISRKEALKENKSLQEELSLARGTIERLTKSLADVESQVSAQNKEKDTVLGRLALLQEERDKLITEMDRSLLENQSLSSSCESLKLALEGLTEDKEKLVKEIESLKSSKIAESTEWQEKHKELQKEYEILLQSYENVSNEAERIQHVVEAVRQEKQELYGKLRSTEANKKETEKQLQEAEQEMEEMKEKMRKFAKSKQQKILELEEENDRLRAEVHPAGDTAKECMETLLSSNASMKEELERVKMEYETLSKKFQSLMSEKDSLSEEVQDLKHQIEDNVSKQANLEATEKHDNQTNVTEEGTQSIPGETEEQDSLSMSTRPTCSESVPSAKSANPAVSKDFSSHDEINNYLQQIDQLKERIAGLEEEKQKNKEFSQTLENEKNTLLSQISTKDGELKMLQEEVTKMNLLNQQIQEELSRVTKLKETAEEEKDDLEERLMNQLAELNGSIGNYCQDVTDAQIKNELLESEMKNLKKCVSELEEEKQQLVKEKTKVESEIRKEYLEKIQGAQKEPGNKSHAKELQELLKEKQQEVKQLQKDCIRYQEKISALERTVKALEFVQTESQKDLEITKENLAQAVEHRKKAQAELASFKVLLDDTQSEAARVLADNLKLKKELQSNKESVKSQMKQKDEDLERRLEQAEEKHLKEKKNMQEKLDALRREKVHLEETIGEIQVTLNKKDKEVQQLQENLDSTVTQLAAFTKSMSSLQDDRDRVIDEAKKWERKFSDAIQSKEEEIRLKEDNCSVLKDQLRQMSIHMEELKINISRLEHDKQIWESKAQTEVQLQQKVCDTLQGENKELLSQLEETRHLYHSSQNELAKLESELKSLKDQLTDLSNSLEKCKEQKGNLEGIIRQQEADIQNSKFSYEQLETDLQASRELTSRLHEEINMKEQKIISLLSGKEEAIQVAIAELRQQHDKEIKELENLLSQEEEENIVLEEENKKAVDKTNQLMETLKTIKKENIQQKAQLDSFVKSMSSLQNDRDRIVGDYQQLEERHLSIILEKDQLIQEAAAENNKLKEEIRGLRSHMDDLNSENAKLDAELIQYREDLNQVITIKDSQQKQLLEVQLQQNKELENKYAKLEEKLKESEEANEDLRRSFNALQEEKQDLSKEIESLKVSISQLTRQVTALQEEGTLGLYHAQLKVKEEEVHRLSALFSSSQKRIAELEEELVCVQKEAAKKVGEIEDKLKKELKHLHHDAGIMRNETETAEERVAELARDLVEMEQKLLMVTKENKGLTAQIQSFGRSMSSLQNSRDHANEELDELKRKYDASLKELAQLKEQGLLNRERDALLSETAFSMNSTEENSLSHLEKLNQQLLSKDEQLLHLSSQLEDSYNQVQSFSKAMASLQNERDHLWNELEKFRKSEEGKQRSAAQPSTSPAEVQSLKKAMSSLQNDRDRLLKELKNLQQQYLQINQEITELHPLKAQLQEYQDKTKAFQIMQEELRQENLSWQHELHQLRMEKSSWEIHERRMKEQYLMAISDKDQQLSHLQNLIRELRSSSSQTQPLKVQYQRQASPETSASPDGSQNLVYETELLRTQLNDSLKEIHQKELRIQQLNSNFSQLLEEKNTLSIQLCDTSQSLRENQQHYGDLLNHCAVLEKQVQELQAGPLNIDVAPGAPQEKNGVHRKSDPEELREPQQSFSEAQQQLCNTRQEVNELRKLLEEERDQRVAAENALSVAEEQIRR

SEQ ID NO: 1030456 - protein, 2896 aa, Homo sapiens
MLSRLSGLANVVLHELSGDDDTDQNMRAPLDPELHQESDMEFNNTTQEDVQERLAYAEQLVVELKDIIRQKDVQLQQKDEALQEERKAADNKIKKLKLHAKAKLTSLNKYIEEMKAQGGTVLPTEPQSEEQLSKHDKSSTEEEMEIEKIKHKLQEKEELISTLQAQLTQAQAEQPAQSSTEMEEFVMMKQQLQEKEEFISTLQAQLSQTQAEQAAQQVVREKDARFETQVRLHEDELLQLVTQADVETEMQQKLRVLQRKLEEHEESLVGRAQVVDLLQQELTAAEQRNQILSQQLQQMEAEHNTLRNTVETEREESKILLEKMELEVAERKLSFHNLQEEMHHLLEQFEQAGQAQAELESRYSALEQKHKAEMEEKTSHILSLQKTGQELQSACDALKDQNSKLLQDKNEQAVQSAQTIQQLEDQLQQKSKEISQFLNRLPLQQHETASQTSFPDVYNEGTQAVTEENIASLQKRVVELENEKGALLLSSIELEELKAENEKLSSQITLLEAQNRTGEADREVSEISIVDIANKRSSSAEESGQDVLENTFSQKHKELSVLLLEMKEAQEEIAFLKLQLQGKRAEEADHEVLDQKEMKQMEGEGIAPIKMKVFLEDTGQDFPLMPNEESSLPAVEKEQASTEHQSRTSEEISLNDAGVELKSTKQDGDKSLSAVPDIGQCHQDELERLKSQILELELNFHKAQEIYEKNLDEKAKEISNLNQLIEEFKKNADNNSSAFTALSEERDQLLSQVKELSMVTELRAQVKQLEMNLAEAERQRRLDYESQTAHDNLLTEQIHSLSIEAKSKDVKIEVLQNELDDVQLQFSEQSTLIRSLQSQLQNKESEVLEGAERVRHISSKVEELSQALSQKELEITKMDQLLLEKKRDVETLQQTIEEKDQQVTEISFSMTEKMVQLNEEKFSLGVEIKTLKEQLNLLSRAEEAKKEQVEEDNEVSSGLKQNYDEMSPAGQISKEELQHEFDLLKKENEQRKRKLQAALINRKELLQRVSRLEEELANLKDESKKEIPLSETERGEVEEDKENKEYSEKCVTSKCQEIEIYLKQTISEKEVELQHIRKDLEEKLAAEEQFQALVKQMNQTLQDKTNQIDLLQAEISENQAIIQKLITSNTDASDGDSVALVKETVVISPPCTGSSEHWKPELEEKILALEKEKEQLQKKLQEALTSRKAILKKAQEKERHLREELKQQKDDYNRLQEQFDEQSKENENIGDQLRQLQIQVRESIDGKLPSTDQQESCSSTPGLEEPLFKATEQHHTQPVLESNLCPDWPSHSEDASALQGGTSVAQIKAQLKEIEAEKVELELKVSSTTSELTKKSEEVFQLQEQINKQGLEIESLKTVSHEAEVHAESLQQKLESSQLQIAGLEHLRELQPKLDELQKLISKKEEDVSYLSGQLSEKEAALTKIQTEIIEQEDLIKALHTQLEMQAKEHDERIKQLQVELCEMKQKPEEIGEESRAKQQIQRKLQAALISRKEALKENKSLQEELSLARGTIERLTKSLADVESQVSAQNKEKDTVLGRLALLQEERDKLITEMDRSLLENQSLSSSCESLKLALEGLTEDKEKLVKEIESLKSSKIAESTEWQEKHKELQKEYEILLQSYENVSNEAERIQHVVEAVRQEKQELYGKLRSTEANKKETEKQLQEAEQEMEEMKEKMRKFAKSKQQKILELEEENDRLRAEVHPAGDTAKECMETLLSSNASMKEELERVKMEYETLSKKFQSLMSEKDSLSEEVQDLKHQIEDNVSKQANLEATEKHDNQTNVTEEGTQSIPGETEEQDSLSMSTRPTCSESVPSAKSANPAVSKDFSSHDEINNYLQQIDQLKERIAGLEEEKQKNKEFSQTLENEKNTLLSQISTKDGELKMLQEEVTKMNLLNQQIQEELSRVTKLKETAEEEKDDLEERLMNQLAELNGSIGNYCQDVTDAQIKNELLESEMKNLKKCVSELEEEKQQLVKEKTKVESEIRKEYLEKIQGAQKEPGNKSHAKELQELLKEKQQEVKQLQKDCIRYQEKISALERTVKALEFVQTESQKDLEITKENLAQAVEHRKKAQAELASFKVLLDDTQSEAARVLADNLKLKKELQSNKESVKSQMKQKDEDLERRLEQAEEKHLKEKKNMQEKLDALRREKVHLEETIGEIQVTLNKKDKEVQQLQENLDSTVTQLAAFTKSMSSLQDDRDRVIDEAKKWERKFSDAIQSKEEEIRLKEDNCSVLKDQLRQMSIHMEELKINISRLEHDKQIWESKAQTEVQLQQKVCDTLQGENKELLSQLEETRHLYHSSQNELAKLESELKSLKDQLTDLSNSLEKCKEQKGNLEGIIRQQEADIQNSKFSYEQLETDLQASRELTSRLHEEINMKEQKIISLLSGKEEAIQVAIAELRQQHDKEIKELENLLSQEEEENIVLEEENKKAVDKTNQLMETLKTIKKENIQQKAQLDSFVKSMSSLQNDRDRIVGDYQQLEERHLSIILEKDQLIQEAAAENNKLKEEIRGLRSHMDDLNSENAKLDAELIQYREDLNQVITIKDSQQKQLLEVQLQQNKELENKYAKLEEKLKESEEANEDLRRSFNALQEEKQDLSKEIESLKVSISQLTRQVTALQEEGTLGLYHAQLKVKEEEVHRLSALFSSSQKRIAELEEELVCVQKEAAKKVGEIEDKLKKELKHLHHDAGIMRNETETAEERVAELARDLVEMEQKLLMVTKENKGLTAQIQSFGRSMSSLQNSRDHANEELDELKRKYDASLKELAQLKEQGLLNRERDALLSETAFSMNSTEENSLSHLEKLNQQLLSKDEQLLHLSSQLEDSYNQVQSFSKAMASLQNERDHLWNELEKFRKSEEGKQRSAAQPSTSPAEVQSLKKAMSSLQNDRDRLLSS

SEQ ID NO: 1030457 - protein, 277 aa, Homo sapiens
NQADSSHQVQTPKTGWQAHMKEDQRQASPETSASPDGSQNLVYETELLRTQLNDSLKEIHQKELRIQQLNSNFSQLLEEKNTLSIQLCDTSQSLRENQQHYGDLLNHCAVLEKQVQELQAGPLNIDVAPGAPQEKNGVHRKSDPEELREPQQSFSEAQQQLCNTRQEVNELRKLLEEERDQRVAAENALSVAEEQIRRLEHSEWDSSRTPIIGSCGTQEQALLIDLTSNSCRRTRSGVGWKRVLRSLCHSRTRVPLLAAIYFLMIHVLLILCFTGHL

SEQ ID NO: 1030458 - protein, 2309 aa, Homo sapiens
MLSRLSGLANVVLHELSGDDDTDQNMRAPLDPELHQESDMEFNNTTQEDVQERLAYAEQLVVELKDIIRQKDVQLQQKDEALQEERKAADNKIKKLKLHAKAKLTSLNKYIEEMKAQGGTVLPTEPQSEEQLSKHDKSSTEEEMEIEKIKHKLQEKEELISTLQAQLTQAQAEQPAQSSTEMEEFVMMKQQLQEKEEFISTLQAQLSQTQAEQAAQQVVREKDARFETQVRLHEDELLQLVTQADVETEMQQKLRVLQRKLEEHEESLVGRAQVVDLLQQELTAAEQRNQILSQQLQQMEAEHNTLRNTVETEREESKILLEKMELEVAERKLSFHNLQEEMHHLLEQFEQAGQAQAELESRYSALEQKHKAEMEEKTSHILSLQKTGQELQSACDALKDQNSKLLQDKNEQAVQSAQTIQQLEDQLQQKSKEISQFLNRLPLQQHETASQTSFPDVYNEGTQAVTEENIASLQKRVVELENEKGALLLSSIELEELKAENEKLSSQITLLEAQNRTGEADREVSEISIVDIANKRSSSAEESGQDVLENTFSQKHKELSVLLLEMKEAQEEIAFLKLQLQGKRAEEADHEVLDQKEMKQMEGEGIAPIKMKVFLEDTGQDFPLMPNEESSLPAVEKEQASTEHQSRTSEEISLNDAGVELKSTKQDGDKSLSAVPDIGQCHQDELERLKSQILELELNFHKAQEIYEKNLDEKAKEISNLNQLIEEFKKNADNNSSAFTALSEERDQLLSQVKELSMVTELRAQVKQLEMNLAEAERQRRLDYESQTAHDNLLTEQIHSLSIEAKSKDVKIEVLQNELDDVQLQFSEQSTLIRSLQSQLQNKESEVLEGAERVRHISSKVEELSQALSQKELEITKMDQLLLEKKRDVETLQQTIEEKDQQVTEISFSMTEKMVQLNEEKFSLGVEIKTLKEQLNLLSRAEEAKKEQVEEDNEVSSGLKQNYDEMSPAGQISKEELQHEFDLLKKENEQRKRKLQAALINRKELLQRVSRLEEELANLKDESKKEIPLSETERGEVEEDKENKEYSEKCVTSKCQEIEIYLKQTISEKEVELQHIRKDLEEKLAAEEQFQALVKQMNQTLQDKTNQIDLLQAEISENQAIIQKLITSNTDASDGDSVALVKETVVISPPCTGSSEHWKPELEEKILALEKEKEQLQKKLQEALTSRKAILKKAQEKERHLREELKQQKDDYNRLQEQFDEQSKENENIGDQLRQLQIQVRESIDGKLPSTDQQESCSSTPGLEEPLFKATEQHHTQPVLESNLCPDWPSHSEDASALQGGTSVAQIKAQLKEIEAEKVELELKVSSTTSELTKKSEEVFQLQEQINKQGLEIESLKTVSHEAEVHAESLQQKLESSQLQIAGLEHLRELQPKLDELQKLISKKEEDVSYLSGQLSEKEAALTKIQTEIIEQEDLIKALHTQLEMQAKEHDERIKQLQVELCEMKQKPEEIGEESRAKQQIQRKLQAALISRKEALKENKSLQEELSLARGTIERLTKSLADVESQVSAQNKEKDTVLGRLALLQEERDKLITEMDRSLLENQSLSSSCESLKLALEGLTEDKEKLVKEIESLKSSKIAESTEWQEKHKELQKEYEILLQSYENVSNEAERIQHVVEAVRQEKQELYGKLRSTEANKKETEKQLQEAEQEMEEMKEKMRKFAKSKQQKILELEEENDRLRAEVHPAGDTAKECMETLLSSNASMKEELERVKMEYETLSKKFQSLMSEKDSLSEEVQDLKHQIEDNVSKQANLEATEKHDNQTNVTEEGTQSIPGETEEQDSLSMSTRPTCSESVPSAKSANPAVSKDFSSHDEINNYLQQIDQLKERIAGLEEEKQKNKEFSQTLENEKNTLLSQISTKDGELKMLQEEVTKMNLLNQQIQEELSRVTKLKETAEEEKDDLEERLMNQLAELNGSIGNYCQDVTDAQIKNELLESEMKNLKKCVSELEEEKQQLVKEKTKVESEIRKEYLEKKKKKKKKKKKKKKKKKKKKKRKKKKIQTKREKHKKKKHTRTSRRHSRKAPQSRAQYKTEAPPPHKTTNPSRDVKQYPEQPRPKHHTTGRGNHTATHLNPKTTTPTRGPHNRQETPTGHTTPTRKPPKPTGPTRTPTPENTLHTQNTPNAPTRNHHHTQARNLNNTPRPTNTPAPPPHTAHTHNNPATQPPSTTRRGQPRGRGEAKEPAKTPTRKRTGTHARPASQAKRATTERNRHSTTTHTPPHDTNSGPESENAATTKRRRDPARGRPDQTANKSESKEAQSRRTREQDETNRPTERERNAKETHIDSKAEPTT

SEQ ID NO: 1030459 - protein, 116 aa, Homo sapiens [sequence omitted]

SEQ ID NO: 1030460 - protein, 3225 aa, Homo sapiens [sequence omitted]

SEQ ID NO: 1030461 - protein, 3259 aa, Homo sapiens; identical to SEQ ID NO: 1030445

SEQ ID NO: 1030462 - protein, 3117 aa, Homo sapiens
MLSRLSGLANVVLHELSGDDDTDQNMRAPLDPELHQESDMEFNNTTQEDVQERLAYAEQLVVELKDIIRQKDVQLQQKDEALQEERKAADNKIKKLKLHAKAKLTSLNKYIEEMKAQGGTVLPTEPQSEEQLSKHDKSSTEEEMEIEKIKHKLQEKEELISTLQAQLTQAQAEQPAQSSTEMEEFVMMKQQLQEKEEFISTLQAQLSQTQAEQAAQQVVREKDARFETQVRLHEDELLQLVTQADVETEMQQKLRVLQRKLEEHEESLVGRAQVVDLLQQELTAAEQRNQILSQQLQQMEAEHNTLRNTVETEREESKILLEKMELEVAERKLSFHNLQEEMHHLLEQFEQAGQAQAELESRYSALEQKHKAEMEEKTSHILSLQKTGQELQSACDALKDQNSKLLQDKNEQAVQSAQTIQQLEDQLQQKSKEISQFLNRLPLQQHETASQTSFPDVYNEGTQAVTEENIASLQKRVVELENEKGALLLSSIELEELKAENEKLSSQITLLEAQNRTGEADREVSEISIVDIANKRSSSAEESGQDVLENTFSQKHKELSVLLLEMKEAQEEIAFLKLQLQGKRAEEADHEVLDQKEMKQMEGEGIAPIKMKVFLEDTGQDFPLMPNEESSLPAVEKEQASTEHQSRTSEEISLNDAGVELKSTKQDGDKSLSAVPDIGQCHQDELERLKSQILELELNFHKAQEIYEKNLDEKAKEISNLNQLIEEFKKNADNNSSAFTALSEERDQLLSQVKELSMVTELRAQVKQLEMNLAEAERQRRLDYESQTAHDNLLTEQIHSLSIEAKSKDVKIEVLQNELDDVQLQFSEQSTLIRSLQSQLQNKESEVLEGAERVRHISSKVEELSQALSQKELEITKMDQLLLEKKRDVETLQQTIEEKDQQVTEISFSMTEKMVQLNEEKFSLGVEIKTLKEQLNLLSRAEEAKKEQVEEDNEVSSGLKQNYDEMSPAGQISKEELQHEFDLLKKENEQRKRKLQAALINRKELLQRVSRLEEELANLKDESKKEIPLSETERGEVEEDKENKEYSEKCVTSKCQEIEIYLKQTISEKEVELQHIRKDLEEKLAAEEQFQALVKQMNQTLQDKTNQIDLLQAEISENQAIIQKLITSNTDASDGDSVALVKETVVISPPCTGSSEHWKPELEEKILALEKEKEQLQKKLQEALTSRKAILKKAQEKERHLREELKQQKDDYNRLQEQFDEQSKENENIGDQLRQLQIQVRESIDGKLPSTDQQESCSSTPGLEEPLFKATEQHHTQPVLESNLCPDWPSHSEDASALQGGTSVAQIKAQLKEIEAEKVELELKVSSTTSELTKKSEEVFQLQEQINKQGLEIESLKTVSHEAEVHAESLQQKLESSQLQIAGLEHLRELQPKLDELQKLISKKEEDVSYLSGQLSEKEAALTKIQTEIIEQEDLIKALHTQLEMQAKEHDERIKQLQVELCEMKQKPEEIGEESRAKQQIQRKLQAALISRKEALKENKSLQEELSLARGTIERLTKSLADVESQVSAQNKEKDTVLGRLALLQEERDKLITEMDRSLLENQSLSSSCESLKLALEGLTEDKEKLVKEIESLKSSKIAESTEWQEKHKELQKEYEILLQSYENVSNEAERIQHVVEAVRQEKQELYGKLRSTEANKKETEKQLQEAEQEMEEMKEKMRKFAKSKQQKILELEEENDRLRAEVHPAGDTAKECMETLLSSNASMKEELERVKMEYETLSKKFQSLMSEKDSLSEEVQDLKHQIEDNVSKQANLEATEKHDNQTNVTEEGTQSIPGETEEQDSLSMSTRPTCSESVPSAKSANPAVSKDFSSHDEINNYLQQIDQLKERIAGLEEEKQKNKEFSQTLENEKNTLLSQISTKDGELKMLQEEVTKMNLLNQQIQEELSRVTKLKETAEEEKDDLEERLMNQLAELNGSIGNYCQDVTDAQIKNELLESEMKNLKKCVSELEEEKQQLVKEKTKVESEIRKEYLEKIQGAQKEPGNKSHAKELQELLKEKQQEVKQLQKDCIRYQEKISALERTVKALEFVQTESQKDLEITKENLAQAVEHRKKAQAELASFKVLLDDTQSEAARVLADNLKLKKELQSNKESVKSQMKQKDEDLERRLEQAEEKHLKEKKNMQEKLDALRREKVHLEETIGEIQVTLNKKDKEVQQLQENLDSTVTQLAAFTKSMSSLQDDRDRVIDEAKKWERKFSDAIQSKEEEIRLKEDNCSVLKDQLRQMSIHMEELKINISRLEHDKQIWESKAQTEVQLQQKVCDTLQGENKELLSQLEETRHLYHSSQNELAKLESELKSLKDQLTDLSNSLEKCKEQKGNLEGIIRQQEADIQNSKFSYEQLETDLQASRELTSRLHEEINMKEQKIISLLSGKEEAIQVAIAELRQQHDKEIKELENLLSQEEEENIVLEEENKKAVDKTNQLMETLKTIKKENIQQKAQLDSFVKSMSSLQNDRDRIVGDYQQLEERHLSIILEKDQLIQEAAAENNKLKEEIRGLRSHMDDLNSENAKLDAELIQYREDLNQVITIKDSQQKQLLEVQLQQNKELENKYAKLEEKLKESEEANEDLRRSFNALQEEKQDLSKEIESLKVSISQLTRQVTALQEEGTLGLYHAQLKVKEEEVHRLSALFSSSQKRIAELEEELVCVQKEAAKKVGEIEDKLKKELKHLHHDAGIMRNETETAEERVAELARDLVEMEQKLLMVTKENKGLTAQIQSFGRSMSSLQNSRDHANEELDELKRKYDASLKELAQLKEQGLLNRERDALLSETAFSMNSTEENSLSHLEKLNQQLLSKDEQLLHLSSQLEDSYNQVQSFSKAMASLQNERDHLWNELEKFRKSEEGKQRSAAQPSTSPAEVQSLKKAMSSLQNDRDRLLKELKNLQQQYLQINQEITELHPLKAQLQEYQDKTKAFQIMQEELRQENLSWQHELHQLRMEKSSWEIHERRMKEQYLMAISDKDQQLSHLQNLIRELRSSSSQTQPLKVQYQRQASPETSASPDGSQNLVYETELLRTQLNDSLKEIHQKELRIQQLNSNFSQLLEEKNTLSIQLCDTSQSLRENQQHYGDLLNHCAVLEKQVQELQAWRQGFTILARLVLNS

SEQ ID NO: 1030463 - protein, 3259 aa, Homo sapiens; identical to SEQ ID NO: 1030445

SEQ ID NO: 1030464 - protein, 2949 aa, Homo sapiens
MLSRLSGLANVVLHELSGDDDTDQNMRAPLDPELHQESDMEFNNTTQEDVQERLAYAEQLVVELKDIIRQKDVQLQQKDEALQEERKAADNKIKKLKLHAKAKLTSLNKYIEEMKAQGGTVLPTEPQSEEQLSKHDKSSTEEEMEIEKIKHKLQEKEELISTLQAQLTQAQAEQPAQSSTEMEEFVMMKQQLQEKEEFISTLQAQLSQTQAEQAAQQVVREKDARFETQVRLHEDELLQLVTQADVETEMQQKLRVLQRKLEEHEESLVGRAQVVDLLQQELTAAEQRNQILSQQLQQMEAEHNTLRNTVETEREESKILLEKMELEVAERKLSFHNLQEEMHHLLEQFEQAGQAQAELESRYSALEQKHKAEMEEKTSHILSLQKTGQELQSACDALKDQNSKLLQDKNEQAVQSAQTIQQLEDQLQQKSKEISQFLNRLPLQQHETASQTSFPDVYNEGTQAVTEENIASLQKRVVELENEKGALLLSSIELEELKAENEKLSSQITLLEAQNRTGEADREVSEISIVDIANKRSSSAEESGQDVLENTFSQKHKELSVLLLEMKEAQEEIAFLKLQLQGKRAEEADHEVLDQKEMKQMEGEGIAPIKMKVFLEDTGQDFPLMPNEESSLPAVEKEQASTEHQSRTSEEISLNDAGVELKSTKQDGDKSLSAVPDIGQCHQDELERLKSQILELELNFHKAQEIYEKNLDEKAKEISNLNQLIEEFKKNADNNSSAFTALSEERDQLLSQVKELSMVTELRAQVKQLEMNLAEAERQRRLDYESQTAHDNLLTEQIHSLSIEAKSKDVKIEVLQNELDDVQLQFSEQSTLIRSLQSQLQNKESEVLEGAERVRHISSKVEELSQALSQKELEITKMDQLLLEKKRDVETLQQTIEEKDQQVTEISFSMTEKMVQLNEEKFSLGVEIKTLKEQLNLLSRAEEAKKEQVEEDNEVSSGLKQNYDEMSPAGQISKEELQHEFDLLKKENEQRKRKLQAALINRKELLQRVSRLEEELANLKDESKKEIPLSETERGEVEEDKENKEYSEKCVTSKCQEIEIYLKQTISEKEVELQHIRKDLEEKLAAEEQFQALVKQMNQTLQDKTNQIDLLQAEISENQAIIQKLITSNTDASDGDSVALVKETVVISPPCTGSSEHWKPELEEKILALEKEKEQLQKKLQEALTSRKAILKKAQEKERHLREELKQQKDDYNRLQEQFDEQSKENENIGDQLRQLQIQVRESIDGKLPSTDQQESCSSTPGLEEPLFKATEQHHTQPVLESNLCPDWPSHSEDASALQGGTSVAQIKAQLKEIEAEKVELELKVSSTTSELTKKSEEVFQLQEQINKQGLEIESLKTVSHEAEVHAESLQQKLESSQLQIAGLEHLRELQPKLDELQKLISKKEEDVSYLSGQLSEKEAALTKIQTEIIEQEDLIKALHTQLEMQAKEHDERIKQLQVELCEMKQKPEEIGEESRAKQQIQRKLQAALISRKEALKENKSLQEELSLARGTIERLTKSLADVESQVSAQNKEKDTVLGRLALLQEERDKLITEMDRSLLENQSLSSSCESLKLALEGLTEDKEKLVKEIESLKSSKIAESTEWQEKHKELQKEYEILLQSYENVSNEAERIQHVVEAVRQEKQELYGKLRSTEANKKETEKQLQEAEQEMEEMKEKMRKFAKSKQQKILELEEENDRLRAEVHPAGDTAKECMETLLSSNASMKEELERVKMEYETLSKKFQSLMSEKDSLSEEVQDLKHQIEDNVSKQANLEATEKHDNQTNVTEEGTQSIPGETEEQDSLSMSTRPTCSESVPSAKSANPAVSKDFSSHDEINNYLQQIDQLKERIAGLEEEKQKNKEFSQTLENEKNTLLSQISTKDGELKMLQEEVTKMNLLNQQIQEELSRVTKLKETAEEEKDDLEERLMNQLAELNGSIGNYCQDVTDAQIKNELLESEMKNLKKCVSELEEEKQQLVKEKTKVESEIRKEYLEKIQGAQKEPGNKSHAKELQELLKEKQQEVKQLQKDCIRYQEKISALERTVKALEFVQTESQKDLEITKENLAQAVEHRKKAQAELASFKVLLDDTQSEAARVLADNLKLKKELQSNKESVKSQMKQKDEDLERRLEQAEEKHLKEKKNMQEKLDALRREKVHLEETIGEIQVTLNKKDKEVQQLQENLDSTVTQLAAFTKSMSSLQDDRDRVIDEAKKWERKFSDAIQSKEEEIRLKEDNCSVLKDQLRQMSIHMEELKINISRLEHDKQIWESKAQTEVQLQQKVCDTLQGENKELLSQLEETRHLYHSSQNELAKLESELKSLKDQLTDLSNSLEKCKEQKGNLEGIIRQQEADIQNSKFSYEQLETDLQASRELTSRLHEEINMKEQKIISLLSGKEEAIQVAIAELRQQHDKEIKELENLLSQEEEENIVLEEENKKAVDKTNQLMETLKTIKKENIQQKAQLDSFVKSMSSLQNDRDRIVGDYQQLEERHLSIILEKDQLIQEAAAENNKLKEEIRGLRSHMDDLNSENAKLDAELIQYREDLNQVITIKDSQQKQLLEVQLQQNKELENKYAKLEEKLKESEEANEDLRRSFNALQEEKQDLSKEIESLKVSISQLTRQVTALQEEGTLGLYHAQLKVKEEEVHRLSALFSSSQKRIAELEEELVCVQKEAAKKVGEIEDKLKKELKHLHHDAGIMRNETETAEERVAELARDLVEMEQKLLMVTKENKGLTAQIQSFGRSMSSLQNSRDHANEELDELKRKYDASLKELAQLKEQGLLNRERDALLSETAFSMNSTEENSLSHLEKLNQQLLSKDEQLLHLSSQLEDSYNQVQSFSKAMASLQNERDHLWNELEKFRKSEEGKQRSAAQPSTSPAEVQSLKKAMSSLQNDRDRLLKELKNLQQQYLQVFSPTLHGKCLQKQRWIRGQVGAAGTGESAFFYCPEPERFCLI

SEQ ID NO: 1030465 - protein, 264 aa, Homo sapiens
VLVGLKRPEDQRQASPETSASPDGSQNLVYETELLRTQLNDSLKEIHQKELRIQQLNSNFSQLLEEKNTLSIQLCDTSQSLRENQQHYGDLLNHCAVLEKQVQELQAGPLNIDVAPGAPQEKNGVHRKSDPEELREPQQSFSEAQQQLCNTRQEVNELRKLLEEERDQRVAAENALSVAEEQIRRLEHSEWDSSRTPIIGSCGTQEQALLIDLTSNSCRRTRSGVGWKRVLRSLCHSRTRVPLLAAIYFLMIHVLLILCFTGHL

SEQ ID NO: 1030466 - protein, 2730 aa, Homo sapiens
MLSRLSGLANVVLHELSGDDDTDQNMRAPLDPELHQESDMEFNNTTQEDVQERLAYAEQLVVELKDIIRQKDVQLQQKDEALQEERKAADNKIKKLKLHAKAKLTSLNKYIEEMKAQGGTVLPTEPQSEEQLSKHDKSSTEEEMEIEKIKHKLQEKEELISTLQAQLTQAQAEQPAQSSTEMEEFVMMKQQLQEKEEFISTLQAQLSQTQAEQAAQQVVREKDARFETQVRLHEDELLQLVTQADVETEMQQKLRVLQRKLEEHEESLVGRAQVVDLLQQELTAAEQRNQILSQQLQQMEAEHNTLRNTVETEREESKILLEKMELEVAERKLSFHNLQEEMHHLLEQFEQAGQAQAELESRYSALEQKHKAEMEEKTSHILSLQKTGQELQSACDALKDQNSKLLQDKNEQAVQSAQTIQQLEDQLQQKSKEISQFLNRLPLQQHETASQTSFPDVYNEGTQAVTEENIASLQKRVVELENEKGALLLSSIELEELKAENEKLSSQITLLEAQNRTGEADREVSEISIVDIANKRSSSAEESGQDVLENTFSQKHKELSVLLLEMKEAQEEIAFLKLQLQGKRAEEADHEVLDQKEMKQMEGEGIAPIKMKVFLEDTGQDFPLMPNEESSLPAVEKEQASTEHQSRTSEEISLNDAGVELKSTKQDGDKSLSAVPDIGQCHQDELERLKSQILELELNFHKAQEIYEKNLDEKAKEISNLNQLIEEFKKNADNNSSAFTALSEERDQLLSQVKELSMVTELRAQVKQLEMNLAEAERQRRLDYESQTAHDNLLTEQIHSLSIEAKSKDVKIEVLQNELDDVQLQFSEQSTLIRSLQSQLQNKESEVLEGAERVRHISSKVEELSQALSQKELEITKMDQLLLEKKRDVETLQQTIEEKDQQVTEISFSMTEKMVQLNEEKFSLGVEIKTLKEQLNLLSRAEEAKKEQVEEDNEVSSGLKQNYDEMSPAGQISKEELQHEFDLLKKENEQRKRKLQAALINRKELLQRVSRLEEELANLKDESKKEIPLSETERGEVEEDKENKEYSEKCVTSKCQEIEIYLKQTISEKEVELQHIRKDLEEKLAAEEQFQALVKQMNQTLQDKTNQIDLLQAEISENQAIIQKLITSNTDASDGDSVALVKETVVISPPCTGSSEHWKPELEEKILALEKEKEQLQKKLQEALTSRKAILKKAQEKERHLREELKQQKDDYNRLQEQFDEQSKENENIGDQLRQLQIQVRESIDGKLPSTDQQESCSSTPGLEEPLFKATEQHHTQPVLESNLCPDWPSHSEDASALQGGTSVAQIKAQLKEIEAEKVELELKVSSTTSELTKKSEEVFQLQEQINKQGLEIESLKTVSHEAEVHAESLQQKLESSQLQIAGLEHLRELQPKLDELQKLISKKEEDVSYLSGQLSEKEAALTKIQTEIIEQEDLIKALHTQLEMQAKEHDERIKQLQVELCEMKQKPEEIGEESRAKQQIQRKLQAALISRKEALKENKSLQEELSLARGTIERLTKSLADVESQVSAQNKEKDTVLGRLALLQEERDKLITEMDRSLLENQSLSSSCESLKLALEGLTEDKEKLVKEIESLKSSKIAESTEWQEKHKELQKEYEILLQSYENVSNEAERIQHVVEAVRQEKQELYGKLRSTEANKKETEKQLQEAEQEMEEMKEKMRKFAKSKQQKILELEEENDRLRAEVHPAGDTAKECMETLLSSNASMKEELERVKMEYETLSKKFQSLMSEKDSLSEEVQDLKHQIEDNVSKQANLEATEKHDNQTNVTEEGTQSIPGETEEQDSLSMSTRPTCSESVPSAKSANPAVSKDFSSHDEINNYLQQIDQLKERIAGLEEEKQKNKEFSQTLENEKNTLLSQISTKDGELKMLQEEVTKMNLLNQQIQEELSRVTKLKETAEEEKDDLEERLMNQLAELNGSIGNYCQDVTDAQIKNELLESEMKNLKKCVSELEEEKQQLVKEKTKVESEIRKEYLEKIQGAQKEPGNKSHAKELQELLKEKQQEVKQLQKDCIRYQEKISALERTVKALEFVQTESQKDLEITKENLAQAVEHRKKAQAELASFKVLLDDTQSEAARVLADNLKLKKELQSNKESVKSQMKQKDEDLERRLEQAEEKHLKEKKNMQEKLDALRREKVHLEETIGEIQVTLNKKDKEVQQLQENLDSTVTQLAAFTKSMSSLQDDRDRVIDEAKKWERKFSDAIQSKEEEIRLKEDNCSVLKDQLRQMSIHMEELKINISRLEHDKQIWESKAQTEVQLQQKVCDTLQGENKELLSQLEETRHLYHSSQNELAKLESELKSLKDQLTDLSNSLEKCKEQKGNLEGIIRQQEADIQNSKFSYEQLETDLQASRELTSRLHEEINMKEQKIISLLSGKEEAIQVAIAELRQQHDKEIKELENLLSQEEEENIVLEEENKKAVDKTNQLMETLKTIKKENIQQKAQLDSFVKSMSSLQNDRDRIVGDYQQLEERHLSIILEKDQLIQEAAAENNKLKEEIRGLRSHMDDLNSENAKLDAELIQYREDLNQVITIKDSQQKQLLEVQLQQNKELENKYAKLEEKLKESEEANEDLRRSFNALQEEKQDLSKEIESLKVSISQLTRQVTALQEEGTLGLYHAQLKVKELLSQLEETRHLYHSSQNELAKLESELKSLKDQLTDLSNSLEKCKEQKGNLEGIIRQQEADIQNSKFSYDTGDWSSAQELTSRLHEERVLAVR

SEQ ID NO: 1030467 - protein, 2208 aa, Homo sapiens
MLSRLSGLANVVLHELSGDDDTDQNMRAPLDPELHQESDMEFNNTTQEDVQERLAYAEQLVVELKDIIRQKDVQLQQKDEALQEERKAADNKIKKLKLHAKAKLTSLNKYIEEMKAQGGTVLPTEPQSEEQLSKHDKSSTEEEMEIEKIKHKLQEKEELISTLQAQLTQAQAEQPAQSSTEMEEFVMMKQQLQEKEEFISTLQAQLSQTQAEQAAQQVVREKDARFETQVRLHEDELLQLVTQADVETEMQQKLRVLQRKLEEHEESLVGRAQVVDLLQQELTAAEQRNQILSQQLQQMEAEHNTLRNTVETEREESKILLEKMELEVAERKLSFHNLQEEMHHLLEQFEQAGQAQAELESRYSALEQKHKAEMEEKTSHILSLQKTGQELQSACDALKDQNSKLLQDKNEQAVQSAQTIQQLEDQLQQKSKEISQFLNRLPLQQHETASQTSFPDVYNEGTQAVTEENIASLQKRVVELENEKGALLLSSIELEELKAENEKLSSQITLLEAQNRTGEADREVSEISIVDIANKRSSSAEESGQDVLENTFSQKHKELSVLLLEMKEAQEEIAFLKLQLQGKRAEEADHEVLDQKEMKQMEGEGIAPIKMKVFLEDTGQDFPLMPNEESSLPAVEKEQASTEHQSRTSEEISLNDAGVELKSTKQDGDKSLSAVPDIGQCHQDELERLKSQILELELNFHKAQEIYEKNLDEKAKEISNLNQLIEEFKKNADNNSSAFTALSEERDQLLSQVKELSMVTELRAQVKQLEMNLAEAERQRRLDYESQTAHDNLLTEQIHSLSIEAKSKDVKIEVLQNELDDVQLQFSEQSTLIRSLQSQLQNKESEVLEGAERVRHISSKVEELSQALSQKELEITKMDQLLLEKKRDVETLQQTIEEKDQQVTEISFSMTEKMVQLNEEKFSLGVEIKTLKEQLNLLSRAEEAKKEQVEEDNEVSSGLKQNYDEMSPAGQISKEELQHEFDLLKKENEQRKRKLQAALINRKELLQRVSRLEEELANLKDESKKEIPLSETERGEVEEDKENKEYSEKCVTSKCQEIEIYLKQTISEKEVELQHIRKDLEEKLAAEEQFQALVKQMNQTLQDKTNQIDLLQAEISENQAIIQKLITSNTDASDGDSVALVKETVVISPPCTGSSEHWKPELEEKILALEKEKEQLQKKLQEALTSRKAILKKAQEKERHLREELKQQKDDYNRLQEQFDEQSKENENIGDQLRQLQIQVRESIDGKLPSTDQQESCSSTPGLEEPLFKATEQHHTQPVLESNLCPDWPSHSEDASALQGGTSVAQIKAQLKEIEAEKVELELKVSSTTSELTKKSEEVFQLQEQINKQGLEIESLKTVSHEAEVHAESLQQKLESSQLQIAGLEHLRELQPKLDELQKLISKKEEDVSYLSGQLSEKEAALTKIQTEIIEQEDLIKALHTQLEMQAKEHDERIKQLQVELCEMKQKPEEIGEESRAKQQIQRKLQAALISRKEALKENKSLQEELSLARGTIERLTKSLADVESQVSAQNKEKDTVLGRLALLQEERDKLITEMDRSLLENQSLSSSCESLKLALEGLTEDKEKLVKEIESLKSSKIAESTEWQEKHKELQKEYEILLQSYENVSNEAERIQHVVEAVRQEKQELYGKLRSTEANKKETEKQLQEAEQEMEEMKEKMRKFAKSKQQKILELEEENDRLRAEVHPAGDTAKECMETLLSSNASMKEELERVKMEYETLSKKFQSLMSEKDSLSEEVQDLKHQIEDNVSKQANLEATEKHDNQTNVTEEGTQSIPGETEEQDSLSMSTRPTCSESVPSAKSANPAVSKDFSSHDEINNYLQQIDQLKERIAGLEEEKQKNKEFSQTLENEKNTLLSQISTKDGELKMLQEEVTKMNLLNQQIQEELSRVTKLKETAEEEKDDLEERLMNQLAELNGSIGNYCQDVTDAQIKNELLESEMKNLKKCVSELEEEKQQLVKEKTKVESEIRKEYLEKKKKKKKKKQKKKKKKTKNKKKGGPPFSPAGGPKTARPPRCLSMSTQRPPSQTGAKQAPQKTRRRALNTRQRRERGNTAARGPRSAHATALPRGAGATTGDDTTTSNSTHTQRLGANQKTGTTEPQPVGRSTRGHHEPAAAELKKTDAPTRRTLPRRRNQPLIPPAAPSAHTDRADSPPPTTTDRRPQLETPSTHRSARRRTAHAATPQHGVASEG

SEQ ID NO: 1030468 - protein, 483 aa, Homo sapiens
TKDPVDRPTLTRDNARGHWTTVAEFETTSERGSGAQQLQEQLPLIVGSATAGLVFVVAVVVIAIVCLRKQRHGSDSEYTEKLQQYIAPGMKVYIDPFTYEDPNEAVREFAKEIDVSCVKIEEVIGAGEFGEVCRGRLKQPGRREVFVAIKTLKVGYTERQRRDFLSEASIMGQFDHPNIIRLEGVVTKSRPVMILTEFMENCALDSFLRLNDGQFTVIQLVGMLRGIAAGMKYLSEMNYVHRDLAARNILVNSNLVCKVSDFGLSRFLEDDPSDPTYTSSLGGKIPIRWTAPEAIAYRKFTSASDVWSYGIVMWEVMSYGERPYWDMSNQDVINAVEQDYRLPPPMDCPTALHQLMLDCWVRDRNLRPKFSQIVNTLDKLIRNAASLKVIASAQSGMSQPLLDRTVPDYTTFTTVGDWLDAIKMGRYKESFVSAGFASFDLVAQMTAEDLLRIGVTLAGHQKKILSSIQDMRLQMNQTLPVQV

SEQ ID NO: 1030469 - protein, 832 aa, Homo sapiens
GSAPRAATAMARARPPPPPSPPPGLLPLLPPLLLLPLLLLPAGCRALEETLMDTKWVTSELAWTSHPESGWEEVSGYDEAMNPIRTYQVCNVRESSQNNWLRTGFIWRRDVQRVYVELKFTVRDCNSIPNIPGSCKETFNLFYYEADSDVASASSPFWMENPYVKVDTIAPDESFSRLDAGRVNTKVRSFGPLSKAGFYLAFQDQGACMSLISVRAFYKKCASTTAGFALFPETLTGAEPTSLVIAPGTCIPNAVEVSVPLKLYCNGDGEWMVPVGACTCATGHEPAAKESQCRPCPPGSYKAKQGEGPCLPCPPNSRTTSPAASICTCHNNFYRADSDSADSACTTVPSPPRGVISNVNETSLILEWSEPRDLGGRDDLLYNVICKKCHGAGGASACSRCDDNVEFVPRQLGLTERRVHISHLLAHTRYTFEVQAVNGVSGKSPLPPRYAAVNITTNQAAPSEVPTLRLHSSSGSSLTLSWAPPERPNGVILDYEMKYFEKSEGIASTVTSQMNSVQLDGLRPDARYVVQVRARTVAGYGQYSRPAEFETTSERGSGAQQLQEQLPLIVGSATAGLVFVVAVVVIAIVCLRKQRHGSDSEYTEKLQQYIAPGMKVYIDPFTYEDPNEAVREFAKEIDVSCVKIEEVIGAGEFGEVCRGRLKQPGRREVFVAIKTLKVGYTERQRRDFLSEASIMGQFDHPNIIRLEGVVTKSRPVMILTEFMENCALDSFLRLNDGQFTVIQLVGMLRGIAAGMKYLSEMNYVHRDLAARNILVNSNLVCKVSDFGLSRFLEDDPSDPTYTSSLVQEAGGRETGGGAYQPGARAWGAGRSH

SEQ ID NO: 1030470 - protein, 1002 aa, Homo sapiens
GSAPRAATAMARARPPPPPSPPPGLLPLLPPLLLLPLLLLPAGCRALEETLMDTKWVTSELAWTSHPESGWEEVSGYDEAMNPIRTYQVCNVRESSQNNWLRTGFIWRRDVQRVYVELKFTVRDCNSIPNIPGSCKETFNLFYYEADSDVASASSPFWMENPYVKVDTIAPDESFSRLDAGRVNTKVRSFGPLSKAGFYLAFQDQGACMSLISVRAFYKKCASTTAGFALFPETLTGAEPTSLVIAPGTCIPNAVEVSVPLKLYCNGDGEWMVPVGACTCATGHEPAAKESQCRPCPPGSYKAKQGEGPCLPCPPNSRTTSPAASICTCHNNFYRADSDSADSACTTVPSPPRGVISNVNETSLILEWSEPRDLGGRDDLLYNVICKKCHGAGGASACSRCDDNVEFVPRQLGLTERRVHISHLLAHTRYTFEVQAVNGVSGKSPLPPRYAAVNITTNQAAPSEVPTLRLHSSSGSSLTLSWAPPERPNGVILDYEMKYFEKSEGIASTVTSQMNSVQLDGLRPDARYVVQVRARTVAGYGQYSRPAEFETTSERGSGAQQLQEQLPLIVGSATAGLVFVVAVVVIAIVCLRKQRHGSDSEYTEKLQQYIAPGMKVYIDPFTYEDPNEAVREFAKEIDVSCVKIEEVIGAGEFGEVCRGRLKQPGRREVFVAIKTLKVGYTERQRRDFLSEASIMGQFDHPNIIRLEGVVTKSRPVMILTEFMENCALDSFLRLNDGQFTVIQLVGMLRGIAAGMKYLSEMNYVHRDLAARNILVNSNLVCKVSDFGLSRFLEDDPSDPTYTSSLGGKIPIRWTAPEAIAYRKFTSASDVWSYGIVMWEVMSYGERPYWDMSNQDVINAVEQDYRLPPPMDCPTALHQLMLDCWVRDRNLRPKFSQIVNTLDKLIRNAASLKVIASAQSGMSQPLLDRTVPDYTTFTTVGDWLDAIKMGRYKESFVSAGFASFDLVAQMTAEDLLRIGVTLAGHQKKILSSIQEWGNVTPPS

SEQ ID NO: 1030471 - protein, 998 aa, Homo sapiens [sequence omitted]

SEQ ID NO: 1030472 - protein, 115 aa, Homo sapiens
SRVSHSIAVSILSPAFKVREFSITDVVPYPISLRWNSPAEEGSSDCEVFSKNHAAPFSKVLTFYRKEPFTLEAYYSSPQDLPYPDPAIAQFSVQKVTPQSDAHRNMMVPSSITAC

SEQ ID NO: 1030473 - protein, 840 aa, Homo sapiens
MSVVGIDLGFQSCYVAVARAGGIETIANEYSDRCTPACISFGPKNRSIGAAAKSQVISNAKNTVQGFKRFHGRAFSDPFVEAEKSNLAYDIVQLPTGLTGIKVTYMEEERNFTTEQVTAMLLSKLKETAESVLKKPVVDCVVSVPCFYTDAERRSVMDATQIAGLNCLRLMNETTAVALAYGIYKQDLPALEEKPRNVVFVDMGHSAYQVSVCAFNRGKLKVLATAFDTTLGGRKFDEVLVNHFCEEFGKKYKLDIKSKIRALLRLSQECEKLKKLMSANASDLPLSIECFMNDVDVSGTMNRGKFLEMCNDLLARVEPPLRSVLEQTKLKKEDIYAVEIVGGATRIPAVKEKISKFFGKELSTTLNADEAVTRGCALQCAILSPAFKVREFSITDVVPYPISLRWNSPAEEGSSDCEVFSKNHAAPFSKVLTFYRKEPFTLEAYYSSPQDLPYPDPAIAQFSVQKVTPQSDGSSSKVKVKVRVNVHGIFSVSSASLVEVHKSEENEEPMETDQNAKEEEKMQVDQEEPHVEEQQQQTPAENKAESEEMETSQAGSKDKKMDQPPQAKKAKVKTSTVDLPIENQLLWQIDREMLNLYIENEGKMIMQDKLEKERNDAKNAVREYVYEMRDKLSGEYEKFVSEDGRNSFTLKLEDTENWLYEDGEDQPKQVYVDKLAELKNLGQPIKIRFQESEERPKLFEELGKQIQQYMKIISSFKNKEDQYDHLDAADMTKVEKSTNEAMEWMNNKLNLQNKQSLTMDPVVKSKEIEAKIKELTSTCSPIISKPKPKVEPPKEEQKNAEQNGPVDGQGDNPGPQAAEQGTDTAVPSDSDKKLPEMDID

SEQ ID NO: 1030474 - protein, 474 aa, Homo sapiens [sequence omitted]

SEQ ID NO: 1030475 - protein, 758 aa, Homo sapiens
MSVVGIDLGFQSCYVAVARAGGIETIANEYSDRCTPACISFGPKNRSIGAAAKSQVISNAKNTVQGFKRFHGRAFSDPFVEAEKSNLAYDIVQLPTGLTGIKVTYMEEERNFTTEQVTAMLLSKLKETAESVLKKPVVDCVVSVPCFYTDAERRSVMDATQIAGLNCLRLMNETTAVALAYGIYKQDLPALEEKPRNVVFVDMGHSAYQVSVCAFNRGKLKVLATAFDTTLGGRKFDEVLVNHFCEEFGKKYKLDIKSKIRALLRLSQECEKLKKLMSANASDLPLSIECFMNDVDVSGTMNRGKFLEMCNDLLARVEPPLRSVLEQTKLKKEDIYAVEIVGGATRIPAVKEKISKFFGKELSTTLNADEAVTRGCALQCAILSPAFKVREFSITDVVPYPISLRWNSPAEEGSSDCEVFSKNHAAPFSKVLTFYRKEPFTLEAYYSSPQDLPYPDPAIAQFSVQKVTPQSDGSSSKVKVKVRVNVHGIFSVSSASLVEVHKSEENEEPMETDQNAKEEEKMIMQDKLEKERNDAKNAVEEYVYEMRDKLSGEYEKFVSEDDRNSFTLKLEDTENWLYEDGEDQPKQVYVDKLAELKNLGQPIKIRFQESEERPKLFEELGKQIQQYMKIISSFKNKEDQYDHLDAADMTKVEKSTNEAMEWMNNKLNLQNKQSLTMDPVVKSKEIEAKIKELTSTCSPIISKPKPKVEPPKEEQKNAEQNGPVDGQGDNPGPQAAEQGTDTAVPSDSDKKLPEMDID

SEQ ID NO: 1030476 - protein, 620 aa, Homo sapiens
MSVVGIDLGFQSCYVAVARAGGIETIANEYSDRCTPACISFGPKNRSIGAAAKSQVISNAKNTVQGFKRFHGRAFSDPFVEAEKSNLAYDIVQLPTGLTGIKVTYMEEERNFTTEQVTAMLLSKLKETAESVLKKPVVDCVVSVPCFYTDAERRSVMDATQIAGLNCLRLMNETTAVALAYGIYKQDLPALEEKPRNVVFVDMGHSAYQVSVCAFNRGKLKVLATAFDTTLGGRKFDEVLVNHFCEEFGKKYKLDIKSKIRALLRLSQECEKLKKLMSANASDLPLSIECFMNDVDVSGTMNRGKFLEMCNDLLARVEPPLRSVLEQTKLKKEDIYAVEIVGGATRIPAVKEKISKFFGKELSTTLNADEAVTRGCALQCAILSPAFKVREFSITDAKNAVEEYVYEMRDKLSGEYEKFVSEDDRNSFTLKLEDTENWLYEDGEDQPKQVYVDKLAELKNLGQPIKIRFQESEERPKLFEELGKQIQQYMKIISSFKNKEDQYDHLDAADMTKVEKSTNEAMEWMNNKLNLQNKQSLTMDPVVKSKEIEAKIKELTSTCSPIISKPKPKVEPPKEEQKNAEQNGPVDGQGDNPGPQAAEQGTDTAVPSDSDKKLPEMDID

SEQ ID NO: 1030477 - protein, 474 aa, Homo sapiens [sequence omitted]

SEQ ID NO: 1030478 - protein, 227 aa, Homo sapiens
MMDAKNAVEEYVYEMRDKLSGEYEKFVSEDDRNSFTLKLEDTENWLYEDGEDQPKQVYVDKLAELKNLGQPIKIRFQESEERPKLFEELGKQIQQYMKIISSFKNKEDQYDHLDAADMTKVEKSTNEAMEWMNNKLNLQNKQSLTMDPVVKSKEIEAKIKELTSTCSPIISKPKPKVEPPKEEQKNAEQNGPVDGQGDNPGPQAAEQGTDTAVPSDSDKKLPEMDID

SEQ ID NO: 1030479 - protein, 225 aa, Homo sapiens
MSKNAVEEYVYEMRDKLSGEYEKFVSEDDRNSFTLKLEDTENWLYEDGEDQPKQVYVDKLAELKNLGQPIKIRFQESEERPKLFEELGKQIQQYMKIISSFKNKEDQYDHLDAADMTKVEKSTNEAMEWMNNKLNLQNKQSLTMDPVVKSKEIEAKIKELTSTCSPIISKPKPKVEPPKEEQKNAEQNGPVDGQGDNPGPQAAEQGTDTAVPSDSDKKLPEMDID

SEQ ID NO: 1030480 - protein, 148 aa, Homo sapiens
MSVVGIDLGFQSCYVAVARAGGIETIANEYSDRCTPACISFGPKNRSIGAAAKSQVISNAKNTVQGFKRFHGRAFSDPFVEAEKSNLAYDIVQLPTGLTGIKVTYMEEEQNGPVDGQGDNPGPQAAEQGTDTAVPSDSDKKLPEMDID

SEQ ID NO: 1030481 - protein, 588 aa, Homo sapiens
MSVVGIDLGFQSCYVAVARAGGIETIANEYSDRCTPACISFGPKNRSIGAAAKSQVISNAKNTVQGFKRFHGRAFSDPFVEAEKSNLAYDIVQLPTGLTGIKVTYMEEERNFTTEQVTAMLLSKLKETAESVLKKPVVDCVVSVPCFYTDAERRSVMDATQIAGLNCLRLMNETTAVALAYGIYKQDLPALEEKPRNVVFVDMGHSAYQVSVCAFNRGKLKVLATAFDTTLGGRKFDEVLVNHFCEEFGKKYKLDIKSKIRALLRLSQECEKLKKLMSANASDLPLSIECFMNDVDVSGTMNRGKFLEMCNDLLARVEPPLRSVLEQTKLKKEDIYAVEIVGGATRIPAVKEKISKFFGKELSTTLNADEAVTRGCALQCAILSPAFKVREFSITDVVPYPISLRWNSPAEEGSSDCEVFSKNHAAPFSKVLTFYRKEPFTLEAYYSSPQDLPYPDPAIAQFSVQKVTPQSDGSSSKVKVKVRVNVHGIFSVSSASLVEVHKSEEMETSQAGSKDKKMDQPPQAKKAKVKTSTVDLPIENQLLWQIDREMLNLYIENEGKMIMQDKLEKERNDAKNAVQEYVCDYLKG

SEQ ID NO: 1030482 - protein, 600 aa, Homo sapiens
MSVVGIDLGFQSCYVAVARAGGIETIANEYSDRCTPACISFGPKNRSIGAAAKSQVISNAKNTVQGFKRFHGRAFSDPFVEAEKSNLAYDIVQLPTGLTGIKVTYMEEERNFTTEQVTAMLLSKLKETAESVLKKPVVDCVVSVPCFYTDAERRSVMDATQIAGLNCLRLMNETTAVALAYGIYKQDLPALEEKPRNVVFVDMGHSAYQVSVCAFNRGKLKVLATAFDTTLGGRKFDEVLVNHFCEEFGKKYKLDIKSKIRALLRLSQECEKLKKLMSANASDLPLSIECFMNDVDVSGTMNRGKFLEMCNDLLARVEPPLRSVLEQTKLKKEDIYAVEIVGGATRIPAVKEKISKFFGKELSTTLNADEAVTRGCALQCAILSPAFKVREFSITDAKNAVEEYVYEMRDKLSGEYEKFVSEDDRNSFTLKLEDTENWLYEDGEDQPKQVYVDKLAELKNLGQPIKIRFQESEERPKLFEELGKQIQQYMKIISSFKNKEDQYDHLDAADMTKVEKSTNEAMEWIQDKKMDQPPQAKKAKVKTSTVDLPIENQLLWQIDREMLNLYIENEGKMIMQDKLEKERNDAKNAVQEYVCDYLKG

SEQ ID NO: 1030483 - protein, 360 aa, Homo sapiens
RLLRSPMLPPQSDGSSSKVKVKVRVNVHGIFRCQCIFSGGHKSEENEEPMETDQNAKEEEKMQVDQEEPHVEEQQQQTPAENKAESEEMETSQAGSKDKKMDQPPQAKKAKVKTSTVDLPIENQLLWQIDREMLNLYIENEGKMIMQDKLEKERNDAKNAVEEYVYEMRDKLSGEYEKFVSEDDRNSFTLKLEDTENWLYEDGEDQPKQVYVDKLAELKNLGQPIKIRFQESEERPKLFEELGKQIQQYMKIISSFKNKEDQYDHLDAADMTKVEKSTNEAMEWIQGKKMDQPPQAKKAKVKTSTVDLPIENQLLWQIDREMLNLYIENEGKMIMQDKLEKERNDAKNAVQEYVCDYLKG

SEQ ID NO: 1030484 - protein, 987 aa, Homo sapiens
RLLRSPMLPPQSDGSSSKVKVKVRVNVHGIFRCQCIFSGGHKSEENEEPMETDQNAKEEEKMQVDQEEPHVEEQQQQTPAENKAESEEMETSQAGSKDKKMDQPPQAKKAKVKTSTVDLPIENQLLWQIDREMLNLYIENEGKMIMQDKLEKERNDAKNAVEEYVYEMRDKLSGEYEKFVSEDDRNSFTLKLEDTENWLYEEEKTSAKNTVQGFKRFHGRAFSDPFVEAEKSNLAYDIVQLPTGLTGIKVTYMEEERNFTTEQVTAMLLSKLKETAESVLKKPVVDCVVSVPCFYTDAERRSVMDATQIAGLNCLRLMNETTAVALAYGIYKQDLPALEEKPRNVVFVDMGHSAYQVSVCAFNRGKLKVLATAFDTTLGGRKFDEVLVNHFCEEFGKKYKLDIKSKIRALLRLSQECEKLKKLMSANASDLPLSIECFMNDVDVSGTMNRGKFLEMCNDLLARVEPPLRSVLEQTKLKKEDIYAVEIVGGATRIPAVKEKISKFFGKELSTTLNADEAVTRGCALQCAILSPAFKVREFSITDVVPYPISLRWNSPAEEGSSDCEVFSKNHAAPFSKVLTFYRKEPFTLEAYYSSPQDLPYPDPAIAQFSVQKVTPQSDGSSSKVKVKVRVNVHGIFSVSSASLVEVHKSEENEEPMETDQNAKEEEKMQVDQEEPHVEEQQQQTPAENKAESEEMETSQAGSKDKKMDQPPQAKKAKVKTSTVDLPIENQLLWQIDREMLNLYIENEGKMIMQDKLEKERNDAKNAVEEYVYEMRDKLSGEYEKFVSEDDRNSFTLKLEDTENWLYEDGEDQPKQVYVDKLAELKNLGQPIKIRFQESEERPKLFEELGKQIQQYMKIISSFKNKEDQYDHLDAADMTKVEKSTNEAMEWMNNKLNLQNKQSLTMDPVVKSKEIEAKIKELTSTCSPIISKPKPKVEPPKEEQKNAEQNGPVDGQGDNPGPQAAEQGTDTAVPSDSDKKLPEMDID

SEQ ID NO: 1030485 - protein, 469 aa, Homo sapiens
SRVSHSIAVSILSPAFKVREFSITDVVPYPISLRWNSPAEEGSSDCEVFSKNHAAPFSKVLTFYRKEPFTLEAYYSSPQDLPYPDPAIAQFSVQKVTPQSDGSSSKVKVKVRVNVHGIFSVSSASLVEVHKSEENEEPMETDQNAKEEEKMQVDQEEPHVEEQQQQTPAENKAESEEMETSQAGSKDKKMDQPPQAKKAKVKTSTVDLPIENQLLWQIDREMLNLYIENEGKMIMQDKLEKERNDAKNAVEEYVYEMRDKLSGEYEKFVSEDDRNSFTLKLEDTENWLYEDGEDQPKQVYVDKLAELKNLGQPIKIRFQESEERPKLFEELGKQIQQYMKIISSFKNKEDQYDHLDAADMTKVEKSTNEAMEWMNNKLNLQNKQSLTMDPVVKSKEIEAKIKELTSTCSPIISKPKPKVEPPKEEQKNAEQNGPVDGQGDNPGPQAAEQGTDTAVPSDSDKKLPEMDID

SEQ ID NO: 1030486 - protein, 380 aa, Homo sapiens
RLLRSPMLPPQSDGSSSKVKVKVRVNVHGIFRCQCIFSGGHKSEENEEPMETDQNAKEEEKMQVDQEEPHVEEQQQQTPAENKAESEEMETSQAGSKDKKMDQPPQAKKAKVKTSTVDLPIENQLLWQIDREMLNLYIENEGKMIMQDKLEKERNDAKNAVEEYVYEMRDKLSGEYEKFVSEDDRNSFTLKLEDTENWLYEDGEDQPKQVYVDKLAELKNLGQPIKIRFQESEERPKLFEELGKQIQQYMKIISSFKNKEDQYDHLDAADMTKVEKSTNEAMEWMNNKLNLQNKQSLTMDPVVKSKEIEAKIKELTSTCSPIISKPKPKVEPPKEEQKNAEQNGPVDGQGDNPGPQAAEQGTDTAVPSDSDKKLPEMDID

SEQ ID NO: 1030487 - protein, 149 aa, Homo sapiens
EKWQKLDSIAWEGGYHTFSTCLTVSWLQEDQYDHLDAADMTKVEKSTNEAMEWMNNKLNLQNKQSLTMDPVVKSKEIEAKIKELTSTCSPIISKPKPKVEPPKEEQKNAEQNGPVDGQGDNPGPQAAEQGTDTAVPSDSDKKLPEMDID

SEQ ID NO: 1030488 - protein, 486 aa, Homo sapiens
MSVVGIDLGFQSCYVAVARAGGIETIANEYSDRCTPACISFGPKNRSIGAAAKSQVISNAKNTVQGFKRFHGRAFSDPFVEAEKSNLAYDIVQLPTGLTGIKVTYMEEERNFTTEQVTAMLLSKLKETAESVLKKPVVDCVVSVPCFYTDAERRSVMDATQIAGLNCLRLMNETTAVALAYGIYKQDLPALEEKPRNVVFVDMGHSAYQVSVCAFNRGKLKVLATAFDTTLGGRKFDEVLVNHFCEEFGKKYKLDIKSKIRALLRLSQECEKLKKLMSANASDLPLSIECFMNDVDVSGTMNRGKFLEMCNDLLARVEPPLRSVLEQTKLKKEDIYAVEIVGGATRIPAVKEKISKFFGKELSTTLNADEAVTRGCALQCAILSPAFKVREFSITDVVPYPISLRWNSPAEEGSSDCEVFSKNHAAPFSKVLTFYRKEPFTLEAYYSSPQDLPYPDPAIAQFSVQKVTPQSDAHRNMMVPSSITAC

SEQ ID NO: 1030489 - protein, 474 aa, Homo sapiens [sequence omitted]

SEQ ID NO: 1030490 - protein, 840 aa, Homo sapiens; identical to SEQ ID NO: 1030473

SEQ ID NO: 1030491 - protein, 840 aa, Homo sapiens; identical to SEQ ID NO: 1030473

SEQ ID NO: 1030492 - protein, 474 aa, Homo sapiens [sequence omitted]

SEQ ID NO: 1030493 - protein, 107 aa, Homo sapiens
MFMPLPLKELFMPLPLKELFMPLPLKELFMPLPLKELFMPLPLKELFMPLPLKELFMPLPLKELFMPLPLKELFMPLPLKERCRARLKELFMPLPKRSCSCHCHIRV

SEQ ID NO: 1030494 - protein, 94 aa, Homo sapiens
GSGMNMAQLGLEKAPGRQEQGLQEAVLKSKLSHVHATAIKGAVHATAIKGAVHATAIKGAVHATAIKGAVPSSIKGAVHATAKKELFMPLPYKS

SEQ ID NO: 1030495 - protein, 109 aa, Homo sapiens
SSFNGSGMNITAPLMAGDFLEHGSQSLVSHVHATAIKGAVHATAIKGAVHATAIKGAVHATAIKGAVHATAIKGAVHATAIKGAVPSSIKGAVHATAKKELFMPLPYKS

SEQ ID NO: 1030496 - protein, 82 aa, Homo sapiens
FFVWAANMPSRLRKTRKLRGHVSHGHGRIGKHRKHPGGRGNAGGLHHHRINFDKYHPGYLWESGMKHYHLKRNQSFCPNCQP

SEQ ID NO: 1030497 - protein, 78 aa, Homo sapiens
MPSRLRKTRKLRGHVSHVHATAIKGAVHATAIKGAVHATAIKGAVHATAIKGAVPSSIKGAVHATAKKELFMPLPYKS

SEQ ID NO: 1030498 - protein, 123 aa, Homo sapiens
SSAQLFNGRCLYSSYLGGWGRRIACTQEVEVAVSHVHATAIKGAVHATAIKGAVHATAIKGAVHATAIKGAVHATAIKGAVHATAIKGAVHATAIKGAVPSSIKGAVHATAKKELFMPLPYKS

SEQ ID NO: 1030499 - protein, 333 aa, Homo sapiens
AERHMARSEAGGESAEASVWLLALLRCAATMLSLRVPLAPITDPQQLQLSPLKGLSLVDKENTPPALSGTRVLASKTARRIFQEPTEPKTKAAAPGVEDEPLLRENPRRFVIFPIEYHDIWQMYKKAEASFWTAEEVDLSKDIQHWESLKPEERYFISHVLAFFAASDGIVNENLVERFSQEVQITEARCFYGFQIAMENIHSEMYSLLIDTYIKDPKEREFLFNAIETMPCVKKKADWALRWIGTKRLPMVTCCTLVSEDSFRSLGKSAKNEDDPGYFYDSSEMGTGIVVRYTVNTGEKRNKGEKAEEDRSAKIGEFGPKLLRKRATPLKSL

SEQ ID NO: 1030500 - protein, 389 aa, Homo sapiens
MLSLRVPLAPITDPQQLQLSPLKGLSLVDKENTPPALSGTRVLASKTARRIFQEPTEPKTKAAAPGVEDEPLLRENPRRFVIFPIEYHDIWQMYKKAEASFWTAEEVDLSKDIQHWESLKPEERYFISHVLAFFAASDGIVNENLVERFSQEVQITEARCFYGFQIAMENIHSEMYSLLIDTYIKDPKEREFLFNAIETMPCVKKKADWALRWIGDKEATYGERVVAFAAVEGIFFSGSFASIFWLKKRGLMPGLTFSNELISRDEGLHCDFACLMFKHLVHKPSEERVREIIINAVRIEQEFLTEALPVKLIGMNCTLMKQYIEFVADRLMLELGFSKVFRVENPFDFMENISLEGKTNFFEKRVGEYQRMGVMSSPTENSFTLDADF

SEQ ID NO: 1030501 - protein, 526 aa, Homo sapiens
PPRPSGAAALVPRDLWGPGRRRPRPSQRTGRGGNREVPGGVHGGVPGGLRKAPAEAPALRLSRAAAAASLGRAQAQPMGRVGGMAQPMGRAGAPKPMGRAGSARRGRFKGCWSEGSPVHPVPAVLSWLLALLRCAATMLSLRVPLAPITDPQQLQLSPLKGLSLVDKENTPPALSGTRVLASKTARRIFQEPTEPKTKAAAPGVEDEPLLRENPRRFVIFPIEYHDIWQMYKKAEASFWTAEEVDLSKDIQHWESLKPEERYFISHVLAFFAASDGIVNENLVERFSQEVQITEARCFYGFQIAMENIHSEMYSLLIDTYIKDPKEREFLFNAIETMPCVKKKADWALRWIGDKEATYGERVVAFAAVEGIFFSGSFASIFWLKKRGLMPGLTFSNELISRDEGLHCDFACLMFKHLVHKPSEERVREIIINAVRIEQEFLTEALPVKLIGMNCTLMKQYIEFVADRLMLELGFSKVFRVENPFDFMENISLEGKTNFFEKRVGEYQRMGVMSSPTENSFTLDADF

SEQ ID NO: 1030502 - protein, 398 aa, Homo sapiens
PPRPSGAAALVPRDLWGPGRRRPRPSQRTGRGGNREVPGGVHGGVPGGLRKAPAEAPALRLSRAAAAASLGRAQAQPMGRVGGMAQPMGRAGAPKPMGRAGSARRGRFKGCWSEGSPVHPVPAVLSWLLALLRCAATMLSLRVPLAPITDPQQLQLSPLKGLSLVDKENTPPALSGTRVLASKTARRIFQEPTEPKTKAAAPGVEDEPLLRENPRRFVIFPIEYHDIWQMYKKAEASFWTAEEVDLSKDIQHWESLKPEERYFISHVLAFFAASDGIVNENLVERFSQEVQITEARCFYGFQIAMENIHSEMYSLLIDTYIKDPKEREFLFNAIETMPCVKKKADWALRWIGDKEATYGERVVAFAAVEGIFFSGSFASIFWLKKRGLMPGLTFSNEL

SEQ ID NO: 1030503 - protein, 411 aa, Homo sapiens
PPRPSGAAALVPRDLWGPGRRRPRPSQRTGRGGNREVPGGVHGGVPGGLRKAPAEAPALRLSRAAAAASLGRAQAQPMGRVGGMAQPMGRAGAPKPMGRAGSARRGRFKGCWSEGSPVHPVPAVLSWLLALLRCAATMLSLRVPLAPITDPQQLQLSPLKGLSLVDKENTPPALSGTRVLASKTARRIFQEPTEPKTKAAAPGVEDEPLLRENPRRFVIFPIEYHDIWQMYKKAEASFWTAEEVDLSKDIQHWESLKPEERYFISHVLAFFAASDGIVNENLVERFSQEVQITEARCFYGFQIAMENIHSEMYSLLIDTYIKDPKEREFLFNAIETMPCVKKKADWALRWIGDKEATYGERVVAFAAVEGIFFSGSFASIFWLKKRGLMPGLTFSNELISRDEVSLSQIIG

SEQ ID NO: 1030504 - protein, 414 aa, Homo sapiens
GRVGDDAWVTNPSCWLLALLRCAATMLSLRVPLAPITDPQQLQLSPLKGLSLVDKENTPPALSGTRVLASKTARRIFQEPTEPKTKAAAPGVEDEPLLRENPRRFVIFPIEYHDIWQMYKKAEASFWTAEEVDLSKDIQHWESLKPEERYFISHVLAFFAASDGIVNENLVERFSQEVQITEARCFYGFQIAMENIHSEMYSLLIDTYIKDPKEREFLFNAIETMPCVKKKADWALRWIGDKEATYGERVVAFAAVEGIFFSGSFASIFWLKKRGLMPGLTFSNELISRDEGLHCDFACLMFKHLVHKPSEERVREIIINAVRIEQEFLTEALPVKLIGMNCTLMKQYIEFVADRLMLELGFSKVFRVENPFDFMENISLEGKTNFFEKRVGEYQRMGVMSSPTENSFTLDADF

SEQ ID NO: 1030505 - protein, 382 aa, Homo sapiens
LLCCDPRSATGQPRFHIGPREIAANGKDLVQKNVSFIWFARYLNVLFSPPKKTKAAAPGVEDEPLLRENPRRFVIFPIEYHDIWQMYKKAEASFWTAEEVDLSKDIQHWESLKPEERYFISHVLAFFAASDGIVNENLVERFSQEVQITEARCFYGFQIAMENIHSEMYSLLIDTYIKDPKEREFLFNAIETMPCVKKKADWALRWIGDKEATYGERVVAFAAVEGIFFSGSFASIFWLKKRGLMPGLTFSNELISRDEGLHCDFACLMFKHLVHKPSEERVREIIINAVRIEQEFLTEALPVKLIGMNCTLMKQYIEFVADRLMLELGFSKVFRVENPFDFMENISLEGKTNFFEKRVGEYQRMGVMSSPTENSFTLDADF

SEQ ID NO: 1030506 - protein, 222 aa, Homo sapiens [sequence omitted]

SEQ ID NO: 1030507 - protein, 429 aa, Homo sapiens
PPRPSGAAALVPRDLWGPGRRRPRPSQRTGRGGNREVPGGVHGGVPGGLRKAPAEAPALRLSRAAAAASLGRAQAQPMGRVGGMAQPMGRAGAPKPMGRAGSARRGRFKGCWSEGSPVHPVPAVLSWLLALLRCAATMLSLRVPLAPITDPQQLQLSPLKGLSLVDKENTPPALSGTRVLASKTARRIFQEPTEPKTKAAAPGVEDEPLLRENPRRFVIFPIEYHDIWQMYKKAEASFWTAEEVDLSKDIQHWESLKPEERYFISHVLAFFAASDGIVNENLVERFSQEVQITEARCFYGFQIAMENIHSEMYSLLIDTYIKDPKEREFLFNAIETMPCVKKKADWALRWIGTKRLPMVTCCTLAAVEAFFPALRADLPRTGTVLAPIYDFCRTGPGFAPRPPVQPGERKHRGKSPRARGPTHLATAPR

SEQ ID NO: 1030508 - protein, 312 aa, Homo sapiens
PPRPSGAAALVPRDLWGPGRRRPRPSQRTGRGGNREVPGGVHGGVPGGLRKAPAEAPALRLSRAAAAASLGRAQAQPMGRVGGMAQPMGRAGAPKPMGRAGSARRGRFKGCWSEGSPVHPVPAVLSWLLALLRCAATMLSLRVPLAPITDPQQLQLSPLKGLSLVDKENTPPALSGTRVLASKTARRIFQEPTEPKTKAAAPGVEDEPLLRENPRRFVIFPIEYHDIWQMYKKAEASFWTAEEVDLSKDIQHWESLKPEERYFISHVLAFFAASDGIVNENLVSFQNIFHSFDVDDLRSNKFAFLVLYVFPC

SEQ ID NO: 1030509 - protein, 330 aa, Homo sapiens
MVEAGWLNRHRGARAPVPAVLSWLLALLRCAATMLSLRVPLAPITDPQQLQLSPLKGLSLVDKENTPPALSGTRVLASKTARRIFQEPTEPKTKAAAPGVEDEPLLRENPRRFVIFPIEYHDIWQMYKKAEASFWTAEEVDLSKDIQHWESLKPEERYFISHVLAFFAASDGIVNENLVERFSQEVQITEARCFYGFQIAMENIHSEMYSLLIDTYIKDPKEREFLFNAIETMPCVKKKADWALRWIGTKRLPMVNVLYPCCRGGFLSGLARSSAQNEDCAGPHFMTFAAQVPGVRRVPRSNPGRGNTGGKAPGPGGLHTWPRRPGRLGA

SEQ ID NO: 1030510 - protein, 422 aa, Homo sapiens
MVEAGWLNRHRGARAPVPAVLSWLLALLRCAATMLSLRVPLAPITDPQQLQLSPLKGLSLVDKENTPPALSGTRVLASKTARRIFQEPTEPKTKAAAPGVEDEPLLRENPRRFVIFPIEYHDIWQMYKKAEASFWTAEEVDLSKDIQHWESLKPEERYFISHVLAFFAASDGIVNENLVERFSQEVQITEARCFYGFQIAMENIHSEMYSLLIDTYIKDPKEREFLFNAIETMPCVKKKADWALRWIGDKEATYGERVVAFAAVEGIFFSGSFASIFWLKKRGLMPGLTFSNELISRDEGLHCDFACLMFKHLVHKPSEERVREIIINAVRIEQEFLTEALPVKLIGMNCTLMKQYIEFVADRLMLELGFSKVFRVENPFDFMENISLEGKTNFFEKRVGEYQRMGVMSSPTENSFTLDADF

SEQ ID NO: 1030511 - protein, 418 aa, Homo sapiens
QDSLGQACVNQERPAVLSWLLALLRCAATMLSLRVPLAPITDPQQLQLSPLKGLSLVDKENTPPALSGTRVLASKTARRIFQEPTEPKTKAAAPGVEDEPLLRENPRRFVIFPIEYHDIWQMYKKAEASFWTAEEVDLSKDIQHWESLKPEERYFISHVLAFFAASDGIVNENLVERFSQEVQITEARCFYGFQIAMENIHSEMYSLLIDTYIKDPKEREFLFNAIETMPCVKKKADWALRWIGDKEATYGERVVAFAAVEGIFFSGSFASIFWLKKRGLMPGLTFSNELISRDEGLHCDFACLMFKHLVHKPSEERVREIIINAVRIEQEFLTEALPVKLIGMNCTLMKQYIEFVADRLMLELGFSKVFRVENPFDFMENISLEGKTNFFEKRVGEYQRMGVMSSPTENSFTLDADF

SEQ ID NO: 1030512 - protein, 419 aa, Homo sapiens
AERHMARSEAGGESAEASVWLLALLRCAATMLSLRVPLAPITDPQQLQLSPLKGLSLVDKENTPPALSGTRVLASKTARRIFQEPTEPKTKAAAPGVEDEPLLRENPRRFVIFPIEYHDIWQMYKKAEASFWTAEEVDLSKDIQHWESLKPEERYFISHVLAFFAASDGIVNENLVERFSQEVQITEARCFYGFQIAMENIHSEMYSLLIDTYIKDPKEREFLFNAIETMPCVKKKADWALRWIGDKEATYGERVVAFAAVEGIFFSGSFASIFWLKKRGLMPGLTFSNELISRDEGLHCDFACLMFKHLVHKPSEERVREIIINAVRIEQEFLTEALPVKLIGMNCTLMKQYIEFVADRLMLELGFSKVFRVENPFDFMENISLEGKTNFFEKRVGEYQRMGVMSSPTENSFTLDADF

SEQ ID NO: 1030513 - protein, 297 aa, Homo sapiens
MYKKAEASFWTAEEVDLSKDIQHWESLKPEERYFISHVLAFFAASDGIVNENLVERFSQEVQITEARCFYGFQIAMENIHSEMYSLLIDTYIKDPKEREFLFNAIETMPCVKKKADWALRWIGDKEATYGERVVAFAAVEGIFFSGSFASIFWLKKRGLMPGLTFSNELISRDEGLHCDFACLMFKHLVHKPSEERVREIIINAVRIEQEFLTEALPVKLIGMNCTLMKQYIEFVADRLMLELGFSKVFRVENPFDFMENISLEGKTNFFEKRVGEYQRMGVMSSPTENSFTLDADF

SEQ ID NO: 1030514 - protein, 74 aa, Homo sapiens
GRVGDGRVGHPPVRTRGGSYKLFILVLFGVSRLCELIHLYLLCLLNQKFFIIYVLLDFTCSSYFSHPVSYSGIV

SEQ ID NO: 1030515 - protein, 389 aa, Homo sapiens; identical to SEQ ID NO: 1030500

SEQ ID NO: 1030516 - protein, 333 aa, Homo sapiens
MAPKKAKKRAGGANSNVFSMFEQTQIQEFKEAFTIMDQNRDGFIDKNDLRDTFAALGQSESDTMHRTLDCKLITEAPGSNEPLPVILTNVREEHNLHGHAEPLSETILNAFKVSDPERQRGADRLTHAPGNADHAAPERSPRTERLTQIVRRHSPPDVTWQPCALPRTLVHIITHGEDTDYGGGFACLRPGAPSLPEWFPGLISSPPKYPLLSYLVCTPCGCPFIHSIFFAAWPPSALDGRTSKGGIPPEGMFNKRTPRNNTTNTHHPPPTHTHNNNNEHPSHTPTAPTKPSPPAVPTLLQNAAAHSPPEPTRLTRRTNQLNRHAPHTAPHHQ

SEQ ID NO: 1030517 - protein, 105 aa, Homo sapiens
  misc_feature (28)..(28): Xaa can be any naturally occurring amino acid
LLPRLECSGGISAHCNLRLPGSRPVSAXSVAGITGMHHHARLTFVFLVETGFHHDGQAGLELLTSSDPPALASQSAGITGVHPHPAPNSSCLHTDKRVHTWHKPS

SEQ ID NO: 1030518 - protein, 111 aa, Homo sapiens
LESTRIKDFDANSKIKDFPEKAKDFFIEATPFLNNSDHDRLHTLVTEHCFPDMTWDIKYKTVRWSFVESLEPSHVVQVRCSSMMNQATCTARSPYACTPGRLWPSMTGLAG

SEQ ID NO: 1030519 - protein, 111 aa, Homo sapiens; identical to SEQ ID NO: 1030518

SEQ ID NO: 1030520 - protein, 135 aa, Homo sapiens
MSETMRGESPKGRRGPEKCGAEIVACQLRDIALRPDLRLAVSRHRIKFAGLVDEIVPCQSVIAARRGHDKSGELRQLWQSVQHGTAAVIDRIRRIAVQIAQRIVGKRRQMNDGIEPGKISGFEVADVFPEGGNWN

SEQ ID NO: 1030521 - protein, 216 aa, Homo sapiens
MAAQGEPQVQFKLVLVGDGGTGKTTFVKRHLTGEFEKKYVATLGVEVHPLVFHTNRGPIKFNVWDTAGQEKFGGLRDGYYIQAQCAIIMFDVTSRVTYKNVPNWHRDLVRVCENIPIVLCGNKVDIKDRKVKAKSIVFHRKKNLQYYDISAKSNYNFEKPFLWLARKLIGDPNLEFVAMPALAPPEVVMDPALAAQYEHDLEVAQTTALPDEDDDL

SEQ ID NO: 1030522 - protein, 180 aa, Homo sapiens
  misc_feature (161)..(161): Xaa can be any naturally occurring amino acid
  misc_feature (178)..(178): Xaa can be any naturally occurring amino acid
MAAQGEPQVQFKLVLVGDGGTGKTTFVKRHLTGEFEKKYVATLGVEVHPLVFHTNRGPIKFNVWDTAGQEKFGGLRDGYYIQAQCAIIMFDVTSRVTYKNVPNWHRDLVRVCENIPIVLCGNKVDIKDRKVKAKSIVFHRKKNLQYYDISAKSNYTVSLLXCRSHETYWIVPAVRHCXPL

SEQ ID NO: 1030523 - protein, 364 aa, Homo sapiens; identical to SEQ ID NO: 917033

SEQ ID NO: 1030524 - protein, 364 aa, Homo sapiens; identical to SEQ ID NO: 917033

SEQ ID NO: 1030525 - protein, 325 aa, Homo sapiens
MPYQYPALTPEQKKELSDIAHRIVAPGKGILAADESTGSIAKRLQSIGTENTEENRRFYRQLLLTADDRVNPCIGGVILFHETLYQKADDGLSERCAQYKKDGADFAKWRCVLKIGEHTPSALAIMENANVLARYASICQQNGIVPIVEPEILPDGDHDLKRCQYVTEKVLAAVYKALSDHHIYLEGTLLKPNMVTPGHACTQKFSHEEIAMATVTALRRTVPPAVTGITFLSGGQSEEEASINLNAINKCPLLKPWALTFSYGRALQASALKAWGGKKENLKAAQEEYVKRALANSLACQGKYTPSGQAGAAASESLFVSNHAY

SEQ ID NO: 1030526 - protein, 206 aa, Homo sapiens
MPYQYPALTPEQKKELSDIAHRIVAPGKGILAADESTGSIAKRLQSIGTENTEENRRFYRQLLLTADDRVNPCIGGVILFHETLYQKADDGRPFPQVIKSKGGVVGIKVDKGVVPLAGTNGETTTQGLDGLSERCAQYKKDGADFAKWRCVLKIGEHTPSALAIMENANVLARYASICQQNGIVPIVEPEILPDGDHDLKRCQYDL

SEQ ID NO: 1030527 - protein, 364 aa, Homo sapiens; identical to SEQ ID NO: 917033

SEQ ID NO: 1030528 - protein, 303 aa, Homo sapiens
MLLTADDRVNPCIGGVILFHETLYQKADDGRPFPQVIKSKGGVVGIKVDKGVVPLAGTNGETTTQGLDGLSERCAQYKKDGADFAKWRCVLKIGEHTPSALAIMENANVLARYASICQQNGIVPIVEPEILPDGDHDLKRCQYVTEKVLAAVYKALSDHHIYLEGTLLKPNMVTPGHACTQKFSHEEIAMATVTALRRTVPPAVTGITFLSGGQSEEEASINLNAINKCPLLKPWALTFSYGRALQASALKAWGGKKENLKAAQEEYVKRALANSLACQGKYTPSGQAGAAASESLFVSNHAY

SEQ ID NO: 1030529 - protein, 201 aa, Homo sapiens
RYSTGSSRWRNGSICQQNGIVPIVEPEILPDGDHDLKRCQYVTEKVLAAVYKALSDHHIYLEGTLLKPNMVTPGHACTQKFSHEEIAMATVTALRRTVPPAVTGITFLSGGQSEEEASINLNAINKCPLLKPWALTFSYGRALQASALKAWGGKKENLKAAQEEYVKRALANSLACQGKYTPSGQAGAAASESLFVSNHAY

SEQ ID NO: 1030530 - protein, 243 aa, Homo sapiens
MVPGPAYAKYLATQKAICAHQWSPEIPSTDGGPMTLKAPAKLCDRRRVNGLPCLTKCKVGMAGEHWGYTPILSSTPLSTRAPAVTEKVLAAVYKALSDHHIYLEGTLLKPNMVTPGHACTQKFSHEEIAMATVTALRRTVPPAVTGITFLSGGQSEEEASINLNAINKCPLLKPWALTFSYGRALQASALKAWGGKKENLKAAQEEYVKRALANSLACQGKYTPSGQAGAAASESLFVSNHAY

SEQ ID NO: 1030531 - protein, 291 aa, Homo sapiens
MPYQYPALTPEQKKELSDIAHRIVAPGKGILAADESTGSIAKRLQSIGTENTEENRRFYRQLLLTADDRVNPCIGGVILFHETLYQKADDGRPFPQVIKSKGGVVGIKVDKGVVPLAGTNGETTTQGLDGLSERCAQYKKDGADFAKWRCVLKIGEHTPSALAIMENANVLARYASICQQNGIVPIVEPEILPDGDHDLKRCQYVTEKVLAAVYKALSDHHIYLEGTLLKPNMVTPGHACTQKFSHEEIAMATVTALRRTVPPAVTGITFLSGGQSEEEASINLNAIGQRG

SEQ ID NO: 1030532 - protein, 201 aa, Homo sapiens
TKSSLYPRWANGSICQQNGIVPIVEPEILPDGDHDLKRCQYVTEKVLAAVYKALSDHHIYLEGTLLKPNMVTPGHACTQKFSHEEIAMATVTALRRTVPPAVTGITFLSGGQSEEEASINLNAINKCPLLKPWALTFSYGRALQASALKAWGGKKENLKAAQEEYVKRALANSLACQGKYTPSGQAGAAASESLFVSNHAY

SEQ ID NO: 1030533 - protein, 92 aa, Homo sapiens
KLCRRRFWSVVFFLAGRENASNNNWCRIRDEKIRDEKKLRTGAGGIPHSRTRTANQGYKVPVTQTVEKDSTAEFRTHQLGNDGDKGSRKADC

SEQ ID NO: 1030534 - protein, 179 aa, Homo sapiens
  misc_feature (6)..(6): Xaa can be any naturally occurring amino acid
FGNRKXRPQKHHLNQPSVAPGKTTSFPKKEVRQIDRKNQRLLKELSRQAEKPGEKSTIPRSADHPPKLYHSALNRQKEQQRIERENLALLKRLEAVKPTVGMKRSEQLMDYHRNMGYLNSSPLSRRARSTLGQYSPLRASRTSSATSGLSCRSERSAVDPSSGHPRRRPKPPNVRTAWL

SEQ ID NO: 1030535 - protein, 179 aa, Homo sapiens; identical to SEQ ID NO: 1030534
  misc_feature (6)..(6): Xaa can be any naturally occurring amino acid

SEQ ID NO: 1030536 - protein, 179 aa, Homo sapiens; identical to SEQ ID NO: 1030534
  misc_feature (6)..(6): Xaa can be any naturally occurring amino acid

SEQ ID NO: 1030537 - protein, 179 aa, Homo sapiens; identical to SEQ ID NO: 1030534
  misc_feature (6)..(6): Xaa can be any naturally occurring amino acid

SEQ ID NO: 1030538 - protein, 179 aa, Homo sapiens; identical to SEQ ID NO: 1030534
  misc_feature (6)..(6): Xaa can be any naturally occurring amino acid

SEQ ID NO: 1030539 - protein, 267 aa, Homo sapiens
MASNVTNKTDPRSMNSRVFIGNLNTLVVKKSDVEAIFFRSMAKLVGCSVHKGFAFVQYVNERNARAAVAGEDGRMIAGQVFRLLTWLQSQQVNRGNNAGVKRSAAEMYGSSLTWTMTFNGTIMNRTVQVNPARVPPPPPIARAVVPSKRQACIRKHFHEGPKWFQYLKSGQGRSSNAWTGCHENDPFRAIYERGGQIKRTGDPLRKRPGNIWRPRDQRRRRRERPKGHNTGEQGHRQARRRRHPRDGPRHKKGAHRRTNGARPEGTV

SEQ ID NO: 1030540 - protein, 672 aa, Homo sapiens
HPRLESAHASSLSHLALAHQQQQQLLQHQSPHLLGQAHPSASYNQLGLYPIIWQYPNGTHAYSGLGLPSSKWVHPENAVNAEASLRRNSPSPWLHQPTPVTSADGIGLLSHIPVRPSSAEPHRPLKITAHSSPPLTKTLVDHHKEELERKAFMEPLLSFASTSAKNDLDLNRSQTGKDCHLHRHFVDSVLNQLQRPPQETGERLNKYKEEHRRILQESIDVAPFTTKIKGLEGERENYSRVASSSSSPKSHIIKQDMDVERSVSDLYKMKHSVPQSLPQSNYFTTLSNSVVNEPPRSYPSKEVSNIYGDKQSNALAAAAANPQTLTSFITSLSKPPPLIKHQPESEGLVGKIPEHLPHQIASHSVTTFRNDCRSPTHLTVSSTNTLRSMPALHRAPVFHPPIHHSLERKEGSYSSLSPPTLTPVMPVNAGGKVQESQKPPTLIPEPKDSQANFKSSSEQSLTEMWRPNNNLSKEKTEWHVEKSSGKLQAAMASVIVRPSSSTKTDSMPAMQLASKDRVSERSSAGAHKTDCLKLAEAGETGRIILPNVNSDSVHTKSEKNFQAVSQGSVPSSVMSAVNTMCNTKTDVITSAADTTSVSSWGGSEVISSLSNTILASTSSECVSSTKVSVSQVAQKQECKVSTTAPVTISQSVRQEVLFNPVLGSQAQLILSI

SEQ ID NO: 1030541 - protein, 672 aa, Homo sapiens; identical to SEQ ID NO: 1030540

SEQ ID NO: 1030542 - protein, 1599 aa, Homo sapiens
HPRLESAHASSLSHLALAHQQQQQLLQHQSPHLLGQAHPSASYNQLGLYPIIWQYPNGTHAYSGLGLPSSKWVHPENAVNAEASLRRNSPSPWLHQPTPVTSADGIGLLSHIPVRPSSAEPHRPLKITAHSSPPLTKTLVDHHKEELERKAFMEPLLSFASTSAKNDLDLNRSQTGKDCHLHRHFVDSVLNQLQRPPQETGERLNKYKEEHRRILQESIDVAPFTTKIKGLEGERENYSRVASSSSSPKSHIIKQDMDVERSVSDLYKMKHSVPQSLPQSNYFTTLSNSVVNEPPRSYPSKEVSNIYGDKQSNALAAAAANPQTLTSFITSLSKPPPLIKHQPESEGLVGKIPEHLPHQIASHSVTTFRNDCRSPTHLTVSSTNTLRSMPALHRAPVFHPPIHHSLERKEGSYSSLSPPTLTPVMPVNAGGKVQESQKPPTLIPEPKDSQANFKSSSEQSLTEMWRPNNNLSKEKTEWHVEKSSGKLQAAMASVIVRPSSSTKTDSMPAMQLASKDRVSERSSAGAHKTDCLKLAEAGETGRIILPNVNSDSVHTKSEKNFQAVSQGSVPSSVMSAVNTMCNTKTDVITSAADTTSVSSWGGSEVISSLSNTILASTSSECVSSTKVSVSQVAQKQECKVSTTAPVTLASSKTGSVVQPSSGFSGTTDFIHLKKHKAALAAAQYKSSNASETEPNAIKNQTLSASLPLDSTVICSTINKANSVGNGQASQTSQPNYHTKLKKAWLTRHSEEDKNTNKMENSGNSVSEIIKPCSVNLIASTSSDIQNSVDSKIIVDKYVKDDKVNRRKAKRTYESGSESGDSDESESKSEQRTKRQPKPTYKKKQNDLQKRKGEIEEDLKPNGVLSRSAKERSKLKLQSNSNTGIPRSVLKDWRKVKKLKQTGESFLQDDSCCEIGPNLQKCRECRLIRSKKGEEPAHSPVFCRFYYFRRLSFSKNGVVRIDGFSSPDQYDDEAMSLWTHENFEDDELDIETSKYILDIIGDKFCQLVTSEKTALSWVKKDAKIAWKRAVRGVREMCDACEATLFNIHWVCQKCGFVVCLDCYKAKERKSSRDKELYAWMKCVKGQPHDHKHLMPTQIIPGSVLTDLLDAMHTLREKYGIKSHCHCTNKQNLQVGNFPTMNGVSQVLQNVLNHSNKISLCMPESQQQNTPPKSEKNGGSSPESDVGTDNKLTPPESQSPLHWLADLAEQKAREEKKENKELTLENQIKEEREQDNSESPNGRTSPLVSQNNEQGSTLRDLLTTTAGKLRVGSTDAGIAFAPVYSMGAPSSKSGRTMPNILDDIIASVVENKIPPSKTSKINVKPELKEEPEESIISAVDENNKLYSDIPHSWICEKHILWLKDYKNSSNWKLFKECWKQGQPAVVSGVHKKMNISLWKAESISLDFGDHQADLLNCKDSIISNANVKEFWDGFEEVSKRQKNKSGETVVLKLKDWPSGEDFKTMMPARYEDLLKSLPLPEYCNPEGKFNLASHLPGFFVRPDLGPRLCSAYGVVAAKDHDIGTTNLHIEVSDVVNILVYVGIAKGNGILSKAGILKKFEEEDLDDILRKRLKDSSEIPGALWHIYAGKDVDKIREFLQKV

SEQ ID NO: 1030543 - protein, 1307 aa, Homo sapiens
HPRLESAHASSLSHLALAHQQQQQLLQHQSPHLLGQAHPSASYNQLGLYPIIWQYPNGTHAYSGLGLPSSKWVHPENAVNAEASLRRNSPSPWLHQPTPVTSADGIGLLSHIPVRPSSAEPHRPLKITAHSSPPLTKTLVDHHKEELERKAFMEPLLSFASTSAKNDLDLNRSQTGKDCHLHRHFVDSVLNQLQRPPQETGERLNKYKEEHRRILQESIDVAPFTTKIKGLEGERENYSRVASSSSSPKSHIIKQDMDVERSVSDLYKMKHSVPQSLPQSNYFTTLSNSVVNEPPRSYPSKEVSNIYGDKQSNALAAAAANPQTLTSFITSLSKPPPLIKHQPESEGLVGKIPEHLPHQIASHSVTTFRNDCRSPTHLTVSSTNTLRSMPALHRAPVFHPPIHHSLERKEGSYSSLSPPTLTPVMPVNAGGKVQESQKPPTLIPEPKDSQANFKSSSEQSLTEMWRPNNNLSKEKTEWHVEKSSGKLQAAMASVIVRPSSSTKTDSMPAMQLASKDRVSERSSAGAHKTDCLKLAEAGETGRIILPNVNSDSVHTKSEKNFQAVSQGSVPSSVMSAVNTMCNTKTDVITSAADTTSVSSWGGSEVISSLSNTILASTSSECVSSTKVSVSQVAQKQECKVSTTAPVTLASSKTGSVVQPSSGFSGTTDFIHLKKHKAALAAAQYKSSNASETEPNAIKNQTLSASLPLDSTVICSTINKANSVGNGQASQTSQPNYHTKLKKAWLTRHSEEDKNTNKMENSGNSVSEIIKPCSVNLIASTSSDIQNSVDSKIIVDKYVKDDKVNRRKAKRTYESGSESGDSDESESKSEQRTKRQPKPTYKKKQNDLQKRKGEIEEDLKPNGVLSRSAKERSKLKLQSNSNTGIPRSVLKDWRKVKKLKQTGESFLQDDSCCEIGPNLQKCRECRLIRSKKGEEPAHSPVFCRFYYFRRLSFSKNGVVRIDGFSSPDQYDDEAMSLWTHENFEDDELDIETSKYILDIIGDKFCQLVTSEKTALSWVKKDAKIAWKRAVRGVREMCDACEATLFNIHWVCQKCGFVVCLDCYKAKERKSSRDKELYAWMKCVKGQPHDHKHLMPTQIIPGSVLTDLLDAMHTLREKYGIKSHCHCTNKQNLQVGNFPTMNGVSQVLQNVLNHSNKISLCMPESQQQNTPPKSEKNGGSSPESDVGTDNKLTPPESQSPLHWLADLAEQKAREEKKENKELTLENQIKEEREQDNSESPNGRTSPLVSQNNEQGSTLRDLLTTTAGKLRVGSTDAGIAFAPVYSMGAPVSDARFLVLMWALNRDDLET

SEQ ID NO: 1030544 - protein, 1460 aa, Homo sapiens
HPRLESAHASSLSHLALAHQQQQQLLQHQSPHLLGQAHPSASYNQLGLYPIIWQYPNGTHAYSGLGLPSSKWVHPENAVNAEASLRRNSPSPWLHQPTPVTSADGIGLLSHIPVRPSSAEPHRPLKITAHSSPPLTKTLVDHHKEELERKAFMEPLLSFASTSAKNDLDLNRSQTGKDCHLHRHFVDSVLNQLQRPPQETGERLNKYKEEHRRILQESIDVAPFTTKIKGLEGERENYSRVASSSSSPKSHIIKQDMDVERSVSDLYKMKHSVPQSLPQSNYFTTLSNSVVNEPPRSYPSKEVSNIYGDKQSNALAAAAANPQTLTSFITSLSKPPPLIKHQPESEGLVGKIPEHLPHQIASHSVTTFRNDCRSPTHLTVSSTNTLRSMPALHRAPVFHPPIHHSLERKEGSYSSLSPPTLTPVMPVNAGGKVQESQKPPTLIPEPKDSQANFKSSSEQSLTEMWRPNNNLSKEKTEWHVEKSSGKLQAAMASVIVRPSSSTKTDSMPAMQLASKDRVSERSSAGAHKTDCLKLAEAGETGRIILPNVNSDSVHTKSEKNFQAVSQGSVPSSVMSAVNTMCNTKTDVITSAADTTSVSSWGGSEVISSLSNTILASTSSECVSSTKVSVSQVAQKQECKVSTTAPVTLASSKTGSVVQPSSGFSGTTDFIHLKKHKAALAAAQYKSSNASETEPNAIKNQTLSASLPLDSTVICSTINKANSVGNGQASQTSQPNYHTKLKKAWLTRHSEEDKNTNKMENSGNSVSEIIKPCSVNLIASTSSDIQNSVDSKIIVDKYVKDDKVNRRKAKRTYESGSESGDSDESESKSEQRTKRQPKPTYKKKQNDLQKRKGEIEEDLKPNGVLSRSAKERSKLKLQSNSNTKIAWKRAVRGVREMCDACEATLFNIHWVCQKCGFVVCLDCYKAKERKSSRDKELYAWMKCVKGQPHDHKHLMPTQIIPGSVLTDLLDAMHTLREKYGIKSHCHCTNKQNLQVGNFPTMNGVSQVLQNVLNHSNKISLCMPESQQQNTPPKSEKNGGSSPESDVGTDNKLTPPESQSPLHWLADLAEQKAREEKKENKELTLENQIKEEREQDNSESPNGRTSPLVSQNNEQGSTLRDLLTTTAGKLRVGSTDAGIAFAPVYSMGAPSSKSGRTMPNILDDIIASVVENKIPPSKTSKINVKPELKEEPEESIISAVDENNKLYSDIPHSWICEKHILWLKDYKNSSNWKLFKECWKQGQPAVVSGVHKKMNISLWKAESISLDFGDHQADLLNCKDSIISNANVKEFWDGFEEVSKRQKNKSGETVVLKLKDWPSGEDFKTMMPARYEDLLKSLPLPEYCNPEGKFNLASHLPGFFVRPDLGPRLCSAYGVVAAKDHDIGTTNLHIEVSDVVNILVYVGIAKGNGILSKAGILKKFEEEDLDDILRKRLKDSSEIPGALWHIYAGKDVDKIREFLQKV

SEQ ID NO: 1030545 - protein, 1599 aa, Homo sapiens; identical to SEQ ID NO: 1030542

SEQ ID NO: 1030546 - protein, 1677 aa, Homo sapiens
HPRLESAHASSLSHLALAHQQQQQLLQHQSPHLLGQAHPSASYNQLGLYPIIWQYPNGTHAYSGLGLPSSKWVHPENAVNAEASLRRNSPSPWLHQPTPVTSADGIGLLSHIPVRPSSAEPHRPLKITAHSSPPLTKTLVDHHKEELERKAFMEPLLSFASTSAKNDLDLNRSQTGKDCHLHRHFVDSVLNQLQRPPQETGERLNKYKEEHRRILQESIDVAPFTTKIKGLEGERENYSRVASSSSSPKSHIIKQDMDVERSVSDLYKMKHSVPQSLPQSNYFTTLSNSVVNEPPRSYPSKEVSNIYGDKQSNALAAAAANPQTLTSFITSLSKPPPLIKHQPESEGLVGKIPEHLPHQIASHSVTTFRNDCRSPTHLTVSSTNTLRSMPALHRAPVFHPPIHHSLERKEGSYSSLSPPTLTPVMPVNAGGKVQESQKPPTLIPEPKDSQANFKSSSEQSLTEMWRPNNNLSKEKTEWHVEKSSGKLQAAMASVIVRPSSSTKTDSMPAMQLASKDRVSERSSAGAHKTDCLKLAEAGETGRIILPNVNSDSVHTKSEKNFQAVSQGSVPSSVMSAVNTMCNTKTDVITSAADTTSVSSWGGSEVISSLSNTILASTSSECVSSTKVSVSQVAQKQECKVSTTAPVTLASSKTGSVVQPSSGFSGTTDFIHLKKHKAALAAAQYKSSNASETEPNAIKNQTLSASLPLDSTVICSTINKANSVGNGQASQTSQPNYHTKLKKAWLTRHSEEDKNTNKMENSGNSVSEIIKPCSVNLIASTSSDIQNSVDSKIIVDKYVKDDKVNRRKAKRTYESGSESGDSDESESKSEQRTKRQPKPTYKKKQNDLQKRKGEIEEDLKPNGVLSRSAKERSKLKLQSNSNTGIPRSVLKDWRKVKKLKQTGESFLQDDSCCEIGPNLQKCRECRLIRSKKGEEPAHSPVFCRFYYFRRLSFSKNGVVRIDGFSSPDQYDDEAMSLWTHENFEDDELDIETSKYILDIIGDKFCQLVTSEKTALSWVKKDAKIAWKRAVRGVREMCDACEATLFNIHWVCQKCGFVVCLDCYKAKERKSSRDKELYAWMKCVKGQPHDHKHLMPTQIIPGSVLTDLLDAMHTLREKYGIKSHCHCTNKQNLQVGNFPTMNGVSQVLQNVLNHSNKISLCMPESQQQNTPPKSEKNGGSSPESDVGTDNKLTPPESQSPLHWLADLAEQKAREEKKENKELTLENQIKEEREQDNSESPNGRTSPLVSQNNEQGSTLRDLLTTTAGKLRVGSTDAGIAFAPVYSMGAPSSKSGRTMPNILDDIIASVVENKIPPSKTSKINVKPELKEEPEESIISAVDENNKLYSDIPHSWICEKHILWLKDYKNSSNWKLFKECWKQGQPAVVSGVHKKMNISLWKAESISLDFGDHQADLLNCKDSIISNANVKEFWDGFEEVSKRQKNKSGETVVLKLKDWPSGEDFKTMMPARYEDLLKSLPLPEYCNPEGKFNLASHLPGFFVRPDLGPRLCSAYGVVAAKDHDIGTTNLHIEVSDVVNILVYVGIAKGNGILSKAGILKKFEEEDLDDILRKRLKDSSEIPGALWHIYAGKDVDKIREFLQKISKEQGLEVLPEHDPIRDQSWYVNKKLRQRLLEEYGVRTCTLIQFLGDAIVLPAGALHQVQNFHSCIQVTEDFVSPEHR

SEQ ID NO: 1030547 - protein, 440 aa, Homo sapiens
MPESQQQNTPPKSEKNGGSSPESDVGTDNKLTPPESQSPLHWLADLAEQKAREEKKENKELTLENQIKEEREQDNSESPNGRTSPLVSQNNEQGSTLRDLLTTTAGKLRVGSTDAGIAFAPVYSMGAPSSKSGRTMPNILDDIIASVVENKIPPSKTSKINVKPELKEEPEESIISAVDENNKLYSDIPHSWICEKHILWLKDYKNSSNWKLFKECWKQGQPAVVSGVHKKMNISLWKAESISLDFGDHQADLLNCKDSIISNANVKEFWDGFEEVSKRQKNKSGETVVLKLKDWPSGEDFKTMMPARYEDLLKSLPLPEYCNPEGKFNLASHLPGFFVRPDLGPRLCSAYGVVAAKDHDIGTTNLHIEVSDVVNILVYVGIAKGNGILSKAGILKKFEEEDLDDILRKRLKDSSEIPGALWHIYAGKDVDKIREFLQKV

SEQ ID NO: 1030548 - protein, 1219 aa, Homo sapiens
HPRLESAHASSLSHLALAHQQQQQLLQHQSPHLLGQAHPSASYNQLGLYPIIWQYPNGTHAYSGLGLPSSKWVHPENAVNAEASLRRNSPSPWLHQPTPVTSADGIGLLSHIPVRPSSAEPHRPLKITAHSSPPLTKTLVDHHKEELERKAFMEPLLSFASTSAKNDLDLNRSQTGKDCHLHRHFVDSVLNQLQRPPQETGERLNKYKEEHRRILQESIDVAPFTTKIKGLEGERENYSRVASSSSSPKSHIIKQDMDVERSVSDLYKMKHSVPQSLPQSNYFTTLSNSVVNEPPRSYPSKEVSNIYGDKQSNALAAAAANPQTLTSFITSLSKPPPLIKHQPESEGLVGKIPEHLPHQIASHSVTTFRNDCRSPTHLTVSSTNTLRSMPALHRAPVFHPPIHHSLERKEGSYSSLSPPTLTPVMPVNAGGKVQESQKPPTLIPEPKDSQANFKSSSEQSLTEMWRPNNNLSKEKTEWHVEKSSGKLQAAMASVIVRPSSSTKTDSMPAMQLASKDRVSERSSAGAHKTDCLKLAEAGETGRIILPNVNSDSVHTKSEKNFQAVSQGSVPSSVMSAVNTMCNTKTDVITSAADTTSVSSWGGSEVISSLSNTILASTSSECVSSTKVSVSQVAQKQECKVSTTAPVTLASSKTGSVVQPSSGFSGTTDFIHLKKHKAALAAAQYKSSNASETEPNAIKNQTLSASLPLDSTVICSTINKANSVGNGQASQTSQPNYHTKLKKAWLTRHSEEDKNTNKMENSGNSVSEIIKPCSVNLIASTSSDIQNSVDSKIIVDKYVKDDKVNRRKAKRTYESGSESGDSDESESKSEQRTKRQPKPTYKKKQNDLQKRKGEIEEDLKPNGVLSRSAKERSKLKLQSNSNTGIPRSVLKDWRKVKKLKQTGESFLQDDSCCEIGPNLQKCRECRLIRSKKGEEPAHSPVFCRFYYFRRLSFSKNGVVRIDGFSSPDQYDDEAMSLWTHENFEDDELDIETSKYILDIIGDKFCQLVTSEKTALSWVKKDAKIAWKRAVRGVREMCDACEATLFNIHWVCQKCGFVVCLDCYKAKERKSSRDKELYAWMKCVKGQPHDHKHLMPTQIIPGSVLTDLLDAMHTLREKYGIKSHCHCTNKQNLQVGNFPTMNGVSQVLQNVLNHSNKISLCMPESQQQNTPPKSEKNGGSSPESDVGTDNKLTPPESQSPLHWLADLAEQKAREEKKGKHN

SEQ ID NO: 1030549 - protein, 1626 aa, Homo sapiens
HPRLESAHASSLSHLALAHQQQQQLLQHQSPHLLGQAHPSASYNQLGLYPIIWQYPNGTHAYSGLGLPSSKWVHPENAVNAEASLRRNSPSPWLHQPTPVTSADGIGLLSHIPVRPSSAEPHRPLKITAHSSPPLTKTLVDHHKEELERKAFMEPLLSFASTSAKNDLDLNRSQTGKDCHLHRHFVDSVLNQLQRPPQETGERLNKYKEEHRRILQESIDVAPFTTKIKGLEGERENYSRVASSSSSPKSHIIKQDMDVERSVSDLYKMKHSVPQSLPQSNYFTTLSNSVVNEPPRSYPSKEVSNIYGDKQSNALAAAAANPQTLTSFITSLSKPPPLIKHQPESEGLVGKIPEHLPHQIASHSVTTFRNDCRSPTHLTVSSTNTLRSMPALHRAPVFHPPIHHSLERKEGSYSSLSPPTLTPVMPVNAGGKVQESQKPPTLIPEPKDSQANFKSSSEQSLTEMWRPNNNLSKEKTEWHVEKSSGKLQAAMASVIVRPSSSTKTDSMPAMQLASKDRVSERSSAGAHKTDCLKLAEAGETGRIILPNVNSDSVHTKSEKNFQAVSQGSVPSSVMSAVNTMCNTKTDVITSAADTTSVSSWGGSEVISSLSNTILASTSSECVSSTKVSVSQVAQKQECKVSTTAPVTLASSKTGSVVQPSSGFSGTTDFIHLKKHKAALAAAQYKSSNASETEPNAIKNQTLSASLPLDSTVICSTINKANSVGNGQASQTSQPNYHTKLKKAWLTRHSEEDKNTNKMENSGNSVSEIIKPCSVNLIASTSSDIQNSVDSKIIVDKYVKDDKVNRRKAKRTYESGSESGDSDESESKSEQRTKRQPKPTYKKKQNDLQKRKGEIEEDLKPNGVLSRSAKERSKLKLQSNSNTGIPRSVLKDWRKVKKLKQTGESFLQDDSCCEIGPNLQKCRECRLIRSKKGEEPAHSPVFCRFYYFRRLSFSKNGVVRIDGFSSPDQYDDEAMSLWTHENFEDDELDIETSKYILDIIGDKFCQLVTSEKTALSWVKKDAKIAWKRAVRGVREMCDACEATLFNIHWVCQKCGFVVCLDCYKAKERKSSRDKELYAWMKCVKGQPHDHKHLMPTQIIPGSVLTDLLDAMHTLREKYGIKSHCHCTNKQNLQVGNFPTMNGVSQVLQNVLNHSNKISLCMPESQQQNTPPKSEKNGGSSPESDVGTDNKLTPPESQSPLHWLADLAEQKAREEKKENKELTLENQIKEEREQDNSESPNGRTSPLVSQNNEQGSTLRDLLTTTAGKLRVGSTDAGIAFAPVYSMGAPSSKSGRTMPNILDDIIASVVENKIPPSKTSKINVKPELKEEPEESIISAVDENNKLYSDIPHSWICEKHILWLKDYKNSSNWKLFKECWKQGQPAVVSGVHKKMNISLWKAESISLDFGDHQADLLNCKDSIISNANVKEFWDGFEEVSKRQKNKSGETVVLKLKDWPSGEDFKTMMPARYEDLLKSLPLPEYCNPEGKFNLASHLPGFFVRPDLGPRLCSAYGGIYSHFSHVGIILDFFKFLLRPGIVAHACNPSTLWEAKAGESRGQEIETILVNMVKTLSLLKNTKISQVWWRAHIVPATQEAEAGELLEPRRRGGCSELRLHYCTPAWATEQDSV

SEQ ID NO: 1030550 - protein, 490 aa, Homo sapiens
MHTLREKYGIKSHCHCTNKQNLQVGNFPTMNGVSQVLQNVLNHSNKISLCMPESQQQNTPPKSEKNGGSSPESDVGTDNKLTPPESQSPLHWLADLAEQKAREEKKENKELTLENQIKEEREQDNSESPNGRTSPLVSQNNEQGSTLRDLLTTTAGKLRVGSTDAGIAFAPVYSMGAPSSKSGRTMPNILDDIIASVVENKIPPSKTSKINVKPELKEEPEESIISAVDENNKLYSDIPHSWICEKHILWLKDYKNSSNWKLFKECWKQGQPAVVSGVHKKMNISLWKAESISLDFGDHQADLLNCKDSIISNANVKEFWDGFEEVSKRQKNKSGETVVLKLKDWPSGEDFKTMMPARYEDLLKSLPLPEYCNPEGKFNLASHLPGFFVRPDLGPRLCSAYGVVAAKDHDIGTTNLHIEVSDVVNILVYVGIAKGNGILSKAGILKKFEEEDLDDILRKRLKDSSEIPGALWHIYAGKDVDKIREFLQKV

SEQ ID NO: 1030551 - protein, 75 aa, Homo sapiens
SEWRERAEWLCGRVSETGSACSMADQLTEEQIAEFKEAFSLFDKDGDGTITTTGIGNCNEISWAESHRSRVTGHD

SEQ ID NO: 1030552 - protein, 297 aa, Homo sapiens
SEWRERAEWLCGRVSETGSACSMADQLTEEQIADIPTVQLFPLICTTSMVHGNSSHHTHRHIGQLLMQHLIMGQQSPPASQQFPGTMHSMHTSALLHGHLAHNWHFPCNFLHTCTGPAHTMAHSTTATVHRTCNFSSTAHYRCRYCITAHEATSASSLPPGLPSTLISPNCWHLHPHTHMPPHRTVSPHALAHAQATRMQHVGIQGRTQHSNHYRHALHSRPQLQRPKLDHTVQCTATPRKLNHYITKTQRTPSATTTTCHIPTTHTPLFTYTQPSTHKHITATILSIYDHHPNKHK

SEQ ID NO: 1030553 - protein, 75 aa, Homo sapiens; identical to SEQ ID NO: 1030551

SEQ ID NO: 1030554 - protein, 75 aa, Homo sapiens; identical to SEQ ID NO: 1030551

SEQ ID NO: 1030555 - protein, 75 aa, Homo sapiens; identical to SEQ ID NO: 1030551

SEQ ID NO: 1030556 - protein, 119 aa, Homo sapiens
MASVSELACIYSALILHDDEVTVTEDKINALIKAAGVNVEPFWPGLFAKALANVNMWEPHLQCRGRWTCSSSWCCTSRRSLPPPLLLLQLRRRKWKQRKKNPRSLMMTWALVFLTKPLL

SEQ ID NO: 1030557 - protein, 119 aa, Homo sapiens; identical to SEQ ID NO: 1030556

SEQ ID NO: 1030558 - protein, 110 aa, Homo sapiens
NSRPRRHGCEKTTKGGVRKFKMAAAETQSLREQPEMEDANSEQSIHEDTWTKYQKTSLKISTVVTQNRSINTEVNIEKHKTASEEDKDKKDKHKQSNKKHKRKEVIDASE

SEQ ID NO: 1030559 - protein, 102 aa, Homo sapiens
SGHMRGSVFSFFLHFPYPPPSGSRRQRRRGVRKFKMAAAETQSLREQPEMEDANSEQSIHEDTWTKYQKTSLKISTVVTQNRSINTEVNIEKHKTCLRRRQG

SEQ ID NO: 1030560 - protein, 517 aa, Homo sapiens
METDLNSQDRKDLDKFIKFFALKTVQVIVQARLGEKICTRSSSSPTGSDWFNLAIKDIPEVTHEAKKALAGQLPAVGRSMCVEISLKTSEGDSMELEIWCLEMNEKCDKEIKVSYTVYNRLSLLLKSLLAITRVTPAYRLSRKQGHEYVILYRIYFGEVQLSGLGEGFQTVRVGTVGTPVGTITLSCAYRINLAFMSTRQFERTPPIMGIIIDHFVDRPYPSSSPMHPCNYRTAGEDTGVIYPSVEDSQEVCTTSFSTSPPSQLSSSRLSYQPAALGVGSADLAYPVVFAAGLNATHPHQLMVPGKEGGVPLAPNQPVHGTQADQERLATCTPSDRTHCAATPSSSEDTETVSNSSEGRASPHDVLETIFVRKVGAFVNKPINQVTLTSLDIPFAMFAPKNLELEDTDPMVNPPDSPETESPLQGSLHSDGSSGGSSGNTHDDFVMIDFKPAFSKDDILPMDLGTFYREFQNPPQLSSLSIDIGAQSMAEDLDSLPEKLAVHEKNVREFDAFVETLQ

SEQ ID NO: 1030561 - protein, 111 aa, Homo sapiens
  misc_feature (14)..(14): Xaa can be any naturally occurring amino acid
TPVQNYTDIIINRXAHTDVNKSDANTNSPISHPAGRLYNTILSLLNHCVKPCPQRVLNALTTPPWYELDENSILHKGTEASNSTTVSWPRVKTRPAFTQVDQAIHSFETTL

SEQ ID NO: 1030562 - protein, 301 aa, Homo sapiens
IGWCHPSYRLSRKQGHEYVILYRIYFGEVQLSGLGEGFQTVRVGTVGTPVGTITLSCAYRINLAFMSTRQFERTPPIMGIIIDHFVDRPYPSSSPMHPCNYRTAGEDTGVIYPSVEDSQEVCTTSFSTSPPSQLMVPGKEGGVPLAPNQPVHGTQADQERLATCTPSDRTHCAATPSSSEDTETVSNSSEGRASPHDVLETIFVRKVGAFVNKPINQVTLTSLDIPFAMFAPKNLELEDTDPMVNLQIPRNESPLTEPEFKWSRGAALIPEDLLKTSHASKELSTAGLIGVTPWTSILTLL

SEQ ID NO: 1030563 - protein, 480 aa, Homo sapiens
METDLNSQDRKDLDKFIKFFALKTVQVIVQARLGEKICTRSSSSPTGSDWFNLAIKDIPEVTHEAKKALAGQLPAVGRSMCVEISLKTSEGDSMELEIWCLEMNEKCDKEIKVSYTVYNRLSLLLKSLLAITRVTPAYRLSRKQGHEYVILYRIYFGEVQLSGLGEGFQTVRVGTVGTPVGTITLSCAYRINLAFMSTRQFERTPPIMGIIIDHFVDRPYPSSSPMHPCNYRTAGEDTGVIYPSVEDSQEVCTTSFSTSPPSQLMVPGKEGGVPLAPNQPVHGTQADQERLATCTPSDRTHCAATPSSSEDTETVSNSSEGRASPHDVLETIFVRKVGAFVNKPINQVTLTSLDIPFAMFAPKNLELEDTDPMVNPPDSPETESPLQGSLHSDGSSGGSSGNTHDDFVMIDFKPAFSKDDILPMDLGTFYREFQNPPQLSSLSIDIGAQSMAEDLDSLPEKLAVHEKNVREFDAFVETLQ

SEQ ID NO: 1030564 - protein, 480 aa, Homo sapiens; identical to SEQ ID NO: 1030563

SEQ ID NO: 1030565 - protein, 480 aa, Homo sapiens; identical to SEQ ID NO: 1030563

SEQ ID NO: 1030566 - protein, 508 aa, Homo sapiens
METDLNSQDRKDLDKFIKFFALKTVQVIVQARLGEKICTRSSSSPTGSDWFNLAIKDIPEVTHEAKKALAGQLPAVGRSMCVEISLKTSEGDSMELEIWCLEMNEKCDKEIKVSYTVYNRLSLLLKSLLAITRVTPAYRLSRKQGHEYVILYRIYFGEVQLSGLGEGFQTVRVGTVGTPVGTITLSCAYRINLAFMSTRQFERTPPIMGIIIDHFVDRPYPSSSPMHPCNYRTAGEDTGVIYPSVEDSQEVCTTSFSTSPPSSLLPWALDQLTWLIQYVFAAGLNATHPHQLMVPGKEGGVPLAPNQPVHGTQADQERLATCTPSDRTHCAATPSSSEDTETVSNSSEGRASPHDVLETIFVRKVGAFVNKPINQVTLTSLDIPFAMFAPKNLELEDTDPMVNPPDSPETESPLQGSLHSDGSSGGSSGNTHDDFVMIDFKPAFSKDDILPMDLGTFYREFQNPPQLSSLSIDIGAQSMAEDLDSLPEKLAVHEKNVREFDAFVETLQ

SEQ ID NO: 1030567 - protein, 301 aa, Homo sapiens
METDLNSQDRKDLDKFIKFFALKTVQVIVQARLGEKICTRSSSSPTGSDWFNLAIKDIPEVTHEAKKALAGQLPAVGRSMCVEISLKTSEGDSMELEIWCLEMNEKCDKEIKVSYTVYNRLSLLLKSLLAITRVTPAYRLSRKQGHEYVILYRIYFGEVQLSGLGEGFQTVRVGTVGTPVGTITLSCAYRINLAFMSTRQFERTPPIMGIIIDHFVDRPYPSSSPMHPCNYRTAGEDTGVIYPSVEDSQEVCTTSFSTSPPSVRILKPYQTAVRDGPPLTMSWRPSLSEKWGLLSTNPLTR

SEQ ID NO: 1030568 - protein, 287 aa, Homo sapiens
METDLNSQDRKDLDKFIKFFALKTVQVIVQARLGEKICTRSSSSPTGSDWFNLAIKDIPEVTHEAKKALAGQLPAVGRSMCVEISLKTSEGDSMELEIWCLEMNEKCDKEIKVSYTVYNRLSLLLKSLLAITRVTPAYRLSRKQGHEYVILYRIYFGEVQLSGLGEGFQTVRVGTVGTPVGTITLSCAYRINLAFMSTRQFERTPPIMGIIIDHFVDRPYPSSSPMHPCNYRTAGEDTGVIYPSVEDSQEVCTTSFSTSPPSDSLPEKLAVHEKNVREFDAFVETLQ

SEQ ID NO: 1030569 - protein, 480 aa, Homo sapiens; identical to SEQ ID NO: 1030563

SEQ ID NO: 1030570 - protein, 130 aa, Homo sapiens
METDLNSQDRKDLDKFIKFFALKTVQVIVQARLGEKICTRSSSSPTGSDWFNLAIKDIPEVTHEAKKALAGQLPAVGRSMCVEISLKTSEGDSMDRLVSSFSTEGSSHSESSSFLSLIPAPFLSDILIIL

SEQ ID NO: 1030571 - protein, 109 aa, Homo sapiens
  misc_feature (105)..(105): Xaa can be any naturally occurring amino acid
MRARNHSLCRSFAGTNFCGGYPRSLSAPGWEAVDLRPLGCCFVEVEGISHGSIPWAPEFSVGSGVGLGPVGPCLFGRESPPPQSFPLHFFSSLGEVVRRFGGNLXGHNP

SEQ ID NO: 1030572 - protein, 480 aa, Homo sapiens; identical to SEQ ID NO: 1030563

SEQ ID NO: 1030573 - protein, 480 aa, Homo sapiens; identical to SEQ ID NO: 1030563

SEQ ID NO: 1030574 - protein, 480 aa, Homo sapiens; identical to SEQ ID NO: 1030563

SEQ ID NO: 1030575 - protein, 463 aa, Homo sapiens
METDLNSQDRKDLDKFIKFFALKTVQVIVQARLGEKICTRSSSSPTGSDWFNLAIKDIPEVTHEAKKALAGQLPAVGRSMCVEISLKTSEGDSMELEIWCLEMNEKCDKEIKVSYTVYNRLSLLLKSLLAITRVTPAYRLSRKQGHEYVILYRIYFGEVQLSGLGEGFQTVRVGTVGTPVGTITLSCAYRINLAFMSTRQFERTPPIMGIIIDHFVDRPYPSSSPMHPCNYRTAGEDTGVIYPSVEDSQEVCTTSFSTSPPSQLMVPGKEGGVPLAPNQPVHGTQADQERLATCTPSDRTHCAATPSSSEDTETVSNSSEGRASPHDVLETIFVRKVGAFVNKPINQVTLTSLDIPFAMFAPKNLELEDTDPMDSDGSSGGSSGNTHDDFVMIDFKPAFSKDDILPMDLGTFYREFQNPPQLSSLSIDIGAQSMAEDLDSLPEKLAVHEKNVREFDAFVETLQ

SEQ ID NO: 1030576 - protein, 518 aa, Homo sapiens
METDLNSQDRKDLDKFIKFFALKTVQVIVQARLGEKICTRSSSSPTGSDWFNLAIKDIPEVTHEAKKALAGQLPAVGRSMCVEISLKTSEGDSMELEIWCLEMNEKCDKEIKVSYTVYNRLSLLLKSLLAITRVTPAYRLSRKQGHEYVILYRIYFGEVQLSGLGEGFQTVRVGTVGTPVGTITLSCAYRINLAFMSTRQFERTPPIMGIIIDHFVDRPYPSSSPMHPCNYRTAGEDTGVIYPSVEDSQEVCTTSFSTSPPSQLMVPGKEGGVPLAPNQPVHGTQADQERLATCTPSDRTHCAATPSSSEDTETVSNSSEGRASPHDVLETIFVRKVGAFVNKPINQVTLTSLDIPFAMFAPKNLELEDTDPMVSPPVDYEFPVDGALVIVLPEPESLSPTDYKPWPLGLRVNPPDSPETESPLQGSLHSDGSSGGSSGNTHDDFVMIDFKPAFSKDDILPMDLGTFYREFQNPPQLSSLSIDIGAQSMAEDLDSLPEKLAVHEKNVREFDAFVETLQ

SEQ ID NO: 1030577 - protein, 480 aa, Homo sapiens; identical to SEQ ID NO: 1030563

SEQ ID NO: 1030578 - protein, 485 aa, Homo sapiens
METDLNSQDRKDLDKFIKFFALKTVQVIVQARLGEKICTRSSSSPTGSDWFNLAIKDIPEVTHEAKKALAGQLPAVGRSMCVEISLKTSEGDSMELEIWCLEMNEKCDKEIKVSYTVYNRLSLLLKSLLAITRVTPAYRLSRKQGHEYVILYRIYFGEVQLSGLGEGFQTVRVGTVGTPVGTITLSCAYRINLAFMSTRQFERTPPIMGIIIDHFVDRPYPSSSPMHPCNYRTAGEDTGVIYPSVEDSQEVCTTSFSTSPPSQLMVPGKEGGVPLAPNQPVHGTQADQERLATCTPSDRTHCAATPSSSEDTETVSNSSEGRASPHDVLETIFVRKVGAFVNKPINQVTLTSLDIPFAMFAPKNLELEDTDPMVNPPDSPETESPLQGSLHSDGSSGGSSGNTHDDFVMIDFKPAFSKDDILPMDLGTFYREFQNPPQLSSLSIDIGAQSMAEDLDSLPEKLAVHEKNVREFDAFVETLLSPSTV

SEQ ID NO: 1030579 - protein, 156 aa, Homo sapiens
METDLNSQDRKDLDKFIKFFALKTVQVIVQARLGEKICTRSSSSPTGSDWFNLAIKDIPEVTHEAKKALAGQLPAVGRSMCVEISLKTSEGDSMELEIWCLEMNEKCDKEIKVSYTVYNRLSLLLKSLLAITRVTPAYRLSRKQGHEYVILYRRIT

SEQ ID NO: 1030580 - protein, 480 aa, Homo sapiens; identical to SEQ ID NO: 1030563

SEQ ID NO: 1030581 - protein, 405 aa, Homo sapiens
METDLNSQDRKDLDKFIKFFALKTVQVIVQARLGEKICTRSSSSPTGSDWFNLAIKDIPEVTHEAKKALAGQLPAVGRSMCVEISLKTSEGDSMELEIWCLEMNEKCDKEIKVSYTVYNRLSLLLKSLLAITRVTPAYRLSRKQGHEYVILYRIYFGEVQLSGLGEGFQTVRVGTVGTPVGTITLSCAYRINLAFMSTRQFERTPPIMGIIIDHFVDRPYPSSSPMHPCNYRTAGEDTGVIYPSVEDSQEVCTTSFSTSPPSQLMVPGKEGGVPLAPNQPVHGTQADQERLATCTPSDRTHCAATPSSSEDTETVSNSSEGRASPHDVLETIFVRKVGAFVNKPINQVTLTSLDIPFAMFAPKNLELEDTDPMVNPPDSPETESPLQGSLPCSWPLPCLLSPSTV

SEQ ID NO: 1030582 - protein, 480 aa, Homo sapiens; identical to SEQ ID NO: 1030563

SEQ ID NO: 1030583 - protein, 480 aa, Homo sapiens; identical to SEQ ID NO: 1030563

SEQ ID NO: 1030584 - protein, 480 aa, Homo sapiens; identical to SEQ ID NO: 1030563

SEQ ID NO: 1030585 - protein, 480 aa, Homo sapiens; identical to SEQ ID NO: 1030563

SEQ ID NO: 1030586 - protein, 480 aa, Homo sapiens; identical to SEQ ID NO: 1030563

SEQ ID NO: 1030587 - protein, 480 aa, Homo sapiens; identical to SEQ ID NO: 1030563

SEQ ID NO: 1030588 - protein, 494 aa, Homo sapiens
METDLNSQDRKDLDKFIKFFALKTVQVIVQARLGEKICTRSSSSPTGSDWFNLAIKDIPEVTHEAKKALAGQLPAVGRSMCVEISLKTSEGDSMELEIWCLEMNEKCDKEIKVSYTVYNRLSLLLKSLLAITRVTPAYRLSRKQGHEYVILYRIYFGEVQLSGLGEGFQTVRVGTVGTPVGTITLSCAYRINLAFMSTRQFERTPPIMGIIIDHFVDRPYPSSSPMHPCNYRTAGEDTGVIYPSVEDSQEVCTTSFSTSPPSQLMVPGKEGGVPLAPNQPVHGTPPQKGGGPLETTKRQADQERLATCTPSDRTHCAATPSSSEDTETVSNSSEGRASPHDVLETIFVRKVGAFVNKPINQVTLTSLDIPFAMFAPKNLELEDTDPMVNPPDSPETESPLQGSLHSDGSSGGSSGNTHDDFVMIDFKPAFSKDDILPMDLGTFYREFQNPPQLSSLSIDIGAQSMAEDLDSLPEKLAVHEKNVREFDAFVETLQ

SEQ ID NO: 1030589 - protein, 480 aa, Homo sapiens; identical to SEQ ID NO: 1030563

SEQ ID NO: 1030590 - protein, 480 aa, Homo sapiens; identical to SEQ ID NO: 1030563

SEQ ID NO: 1030591 - protein, 414 aa, Homo sapiens
  misc_feature (143)..(143): Xaa can be any naturally occurring amino acid
KDYDNRMVNHFIAEFKRTHKKDISEKPESCKTPPYCLCNVLKRTLSSSTQASIEIDSLYEGIDFYTSITRARFEELNADLFRGTLDPVEKALRDAKLDKSQIHDIVLVGGSTRIPKIQKLLQDFFNGKELNKSINPDEAVAYXAAVQAAILSGDKSENVQDLLLLACHSSCPLVIETAGGVMTVLIKRNTTIPTKQTQTFTTYSDNQPGVLIQVYEGERAMTKDNNLLGKFELTGIPPAPRGVPQIEVTFDIDANGILNVSAVDKSTGKENKITITNDKGRLSKEDIERMVQEAEKYKAEDEKQRDKVSSKNSLESYAFNMKATVEDEKLQGKINDEDKQKILDKCNEIINWLDKNQTAEKEEFEHQQKELEKVCNPIITKLYQSAGGMPGGMPGGFPGGGAPPSGGASSGPTH

SEQ ID NO: 1030592 - protein, 414 aa, Homo sapiens; identical to SEQ ID NO: 1030591
  misc_feature (143)..(143): Xaa can be any naturally occurring amino acid

SEQ ID NO: 1030593 - protein, 414 aa, Homo sapiens; identical to SEQ ID NO: 1030591
  misc_feature (143)..(143): Xaa can be any naturally occurring amino acid

SEQ ID NO: 1030594 - protein, 358 aa, Homo sapiens
  misc_feature (143)..(143): Xaa can be any naturally occurring amino acid
KDYDNRMVNHFIAEFKRTHKKDISEKPESCKTPPYCLCNVLKRTLSSSTQASIEIDSLYEGIDFYTSITRARFEELNADLFRGTLDPVEKALRDAKLDKSQIHDIVLVGGSTRIPKIQKLLQDFFNGKELNKSINPDEAVAYXAAVQAAILSGDKSENVQDLLLLACHSSCPLVIETAGGVMTVLIKRNTTIPTKQTQTFTTYSDNQPGVLIQVYEGERAMTKDNNLLGKFELTGIPPAPRGVPQIEVTFDIDANGILNVSAVDKSTGKENKITITNDKGRLSKEDIERMVQEAEKYKAEDEKQRDKVSSKNSLESYAFNMKATVEDENFRQITVRQQSSGQFMNYQLADKVSFRRRI

SEQ ID NO: 1030595 - protein, 160 aa, Homo sapiens
MDVTPLSLGIVETAWEVNDFSSIKAVIPTIPTKQTQTFTTYSDNQPGVLIQVYEGERAMTKDNNLLGKFELTGIPPAPRGVPQIEVTFDIDANGILNVSAVDKSTGKENKITITNDKGRLSKEDIERMVQEAEKYKAEDEKQRDRFTKIISSFPQHEHFG

SEQ ID NO: 1030596 - protein, 414 aa, Homo sapiens
  misc_feature (143)..(143): Xaa can be any naturally occurring amino acid
VISVTRDWTLSADNYCALGSVTFTREQESCKTPPYCLCNVLKRTLSSSTQASIEIDSLYEGIDFYTSITRARFEELNADLFRGTLDPVEKALRDAKLDKSQIHDIVLVGGSTRIPKIQKLLQDFFNGKELNKSINPDEAVAYXAAVQAAILSGDKSENVQDLLLLACHSSCPLVIETAGGVMTVLIKRNTTIPTKQTQTFTTYSDNQPGVLIQVYEGERAMTKDNNLLGKFELTGIPPAPRGVPQIEVTFDIDANGILNVSAVDKSTGKENKITITNDKGRLSKEDIERMVQEAEKYKAEDEKQRDKVSSKNSLESYAFNMKATVEDEKLQGKINDEDKQKILDKCNEIINWLDKNQTAEKEEFEHQQKELEKVCNPIITKLYQSAGGMPGGMPGGFPGGGAPPSGGASSGPTH

SEQ ID NO: 1030597 - protein, 186 aa, Homo sapiens
MQTEQSWSKLAPRGVPQIEVTFDIDANGILNVSAVDKSTGKENKITITNDKGRLSKEDIERMVQEAEKYKAEDEKQRDKVSSKNSLESYAFNMKATVEDEKLQGKINDEDKQKILDKCNEIINWLDKNQTAEKEEFEHQQKELEKVCNPIITKLYQSAGGMPGGMPGGFPGGGAPPSGGASSGPTH

SEQ ID NO: 1030598 - protein, 414 aa, Homo sapiens; identical to SEQ ID NO: 1030591
  misc_feature (143)..(143): Xaa can be any naturally occurring amino acid

SEQ ID NO: 1030599 - protein, 414 aa, Homo sapiens; identical to SEQ ID NO: 1030591
  misc_feature (143)..(143): Xaa can be any naturally occurring amino acid

SEQ ID NO: 1030600 - protein, 235 aa, Homo sapiens
MQIAFSQGLLSSIPTKQTQTFTTYSDNQPGVLIQVYEGERAMTKDNNLLGKFELTGIPPAPRGVPQIEVTFDIDANGILNVSAVDKSTGKENKITITNDKGRLSKEDIERMVQEAEKYKAEDEKQRDKVSSKNSLESYAFNMKATVEDEKLQGKINDEDKQKILDKCNEIINWLDKNQTAEKEEFEHQQKELEKVCNPIITKLYQSAGGMPGGMPGGFPGGGAPPSGGASSGPTH

SEQ ID NO: 1030601 - protein, 414 aa, Homo sapiens; identical to SEQ ID NO: 1030591
  misc_feature (143)..(143): Xaa can be any naturally occurring amino acid

SEQ ID NO: 1030602 - protein, 125 aa, Homo sapiens
MHKEEHEVAVLGAPPSTILPRSTVINIHSETSVPDHVVWSLFNTLFLNWCCLGFIAFAYSVKSRDRKMVGDVTGAQAYASTAKCLNIWALILGILMTIGFILLLVFGSVTVYHIMLQIIQEKRGY

SEQ ID NO: 1030603 - protein, 125 aa, Homo sapiens; identical to SEQ ID NO: 1030602

SEQ ID NO: 1030604 - protein, 86 aa, Homo sapiens
SVPLACNRAQHFLPQSQKMHKEEHEVAVLGAPPSTILPRSTVINIHSETSVPDHVVWSLFNTLFLNWCCMNPCCLGFIAFALLREV

SEQ ID NO: 1030605 - protein, 81 aa, Homo sapiens
AAAYYYYCSEFKLLTMYGDMTIWIHPVTGIRLCDSLPYYVTDNTGKTGLLVAAHSLQPLHSTVQCWPCTLGLLPLPPWSCP

SEQ ID NO: 1030606 - protein, 86 aa, Homo sapiens
EVVPDLRAGRANEETEPEHAALRWGILVPLHNPSPQSRDRKMVGDVTGAQAYASTAKCLNIWALILGILMTILLIVIPVLIFQAYG

SEQ ID NO: 1030607 - protein, 74 aa, Homo sapiens
  misc_feature (47)..(47): Xaa can be any naturally occurring amino acid
  misc_feature (67)..(67): Xaa can be any naturally occurring amino acid
MHKEEHEVAVLGAPPSTILPRSTVINIHSETSVPDHVVWSLFQHPSXFEIVVLFWGFIAIGLIPLKXLRGDGLG

SEQ ID NO: 1030608 - protein, 229 aa, Homo sapiens
  misc_feature (133)..(133): Xaa can be any naturally occurring amino acid
MNHTVQTFFSPVNSGQPPNYEMLKEEHEVAVLGAPHNPAPPTSTVIHIRSETSVPDHVVWSLLPLLALGHSLGEFAHYCRERSQGIMGMMSCAERCRVGPRVAYVLPHAKLPGTSGHLYSGASLMIHSGSVLXIHTMTRILPWRLLVLGVQDGPIIVDGQGTLMPRMEPVYSRTVTPRSSRFRRPVPPRKPSCRVSGPLLFLDSGFFYQSGHSIRVRRGFLGITYNTTK

SEQ ID NO: 1030609 - protein, 133 aa, Homo sapiens
MSHTVQTFFSPVNSGQPPNYEMLKEEHEVAVLGGPHNPAPPTSTVIHIRSETSVPDHVVWSLFNTLFMNPCCLGFIAFAYSVKSRDRKMVGDVTGAQAYASTAKCLNIWALILGILMTILLIVIPVLIFQAYG

SEQ ID NO: 1030610 - protein, 125 aa, Homo sapiens; identical to SEQ ID NO: 1030602

SEQ ID NO: 1030611 - protein, 133 aa, Homo sapiens; identical to SEQ ID NO: 1030609

SEQ ID NO: 1030612 - protein, 125 aa, Homo sapiens; identical to SEQ ID NO: 1030602

SEQ ID NO: 1030613 - protein, 133 aa, Homo sapiens; identical to SEQ ID NO: 1030609

SEQ ID NO: 1030614 - protein, 125 aa, Homo sapiens
MHKEEHEVAVLGAPPSTILPRSTVINIHSETSVPDHVVWSLFNTLFLNWCCLGFIAFAYSVKSRDRKMVGDVTGAQAYASTAKCLNIWALILGILMTIGFILSLVFGSVTVYHIMLQIIQEKRGY

SEQ ID NO: 1030615 - protein, 125 aa, Homo sapiens; identical to SEQ ID NO: 1030602

SEQ ID NO: 1030616 - protein, 125 aa, Homo sapiens; identical to SEQ ID NO: 1030602

SEQ ID NO: 1030617 - protein, 88 aa, Homo sapiens
MHKEEHEVAVLGAPPSTILPRSTVINIHSETSVPDHVVWSLLHLSDCAVWLIASLLVSLGQRWCDVTCQLCSRSADIWLICIYDIDHL

SEQ ID NO: 1030618 - protein, 261 aa, Homo sapiens
MILNKALLLGALALTTVMSPCGGEDIVADHVASCGVNLYQFYGPSGQYTHEFDGDEQFYVDLERKETAWRWPEFSKFGGFDPQGALRNMAVAKHNLNIMIKRYNSTAATNEVPEVTVFSKSPVTLGQPNTLICLVDNIFPPVVNITWLSNGQSVTEGVSETSFLSKSDHSFFKISYLTFLPSADEIYDCKVEHWGLDQPLLKHWGKDEFHHFWILSCLSSSELPAFYSYIQKLCFPHFMGFFSVSLFFGRISKKSRRFIEK

SEQ ID NO: 1030619 - protein, 217 aa, Homo sapiens
MILNKALLLGALALTTVMSPCGGEDIVADHVASCGVNLYQFYGPSGQYTHEFDGDEQFYVDLERKETAWRWPEFSKFGGFDPQGALRNMAVAKHNLNIMIKRYNSTAATNEVPEVTVFSKSPVTLGQPNTLICLVDNIFPPVVNITWLSNGQSVTEGVSETSFLSKSDHSFFKISYLTFLPSADEIYDCKVEHWGLDQPLLKHWGASPSTGAEEWTC

SEQ ID NO: 1030620 - protein, 166 aa, Homo sapiens
FDPQSALRNMAVAKHNLNIMIKRYNSTAATNEVPEVTVFSKSPVTLGQPNTLIVSCGGEDIVADHVASCGVNLYQFYGPSGQYTHEFDGDEQFYVDLERKETAWRWPEFSKSGVVCGPRGHCGGHCLHHPRPAFSWCFQTPRAIVNPILEGKVHRHLQEQKNGLAK

SEQ ID NO: 1030621 - protein, 237 aa, Homo sapiens
MILNKALLLGALALTTVMSPCGGEDIVADHVASCGVNLYQFYGPSGQYTHEFDGDEQFYVDLERKETAWRWPEFSKFGGFDPQGALRNMAVAEVPEVTVFSKSPVTLGQPNTLICLVDNIFPPVVNITWLSNGQSVTEGVSETSFLSKSDHSFFKISYLTFLPSADEIYDCKVEHWGLDQPLLKHWEPEIPAPMSELTETVVCALGLSVGLVGIVVGTVFIIQGLRSVGASRHQGPL

SEQ ID NO: 1030622 - protein, 170 aa, Homo sapiens
MILNKALLLGALALTTVMSPCGGEDIVADHVASCGVNLYQFYGPSGQYTHEFDGDEQFYVDLERKETAWRWPEFSKFGGFDPQGALRNMAVAEVPEVTVFSKSPVTLGQPNTLICPGVVCGPRGHCGGHCLHHPRPAFSWCFQTPRAIVNPILEGKVHRHLQEQKNGLAK

SEQ ID NO: 1030623 - protein, 255 aa, Homo sapiens [sequence omitted]

SEQ ID NO: 1030624 - protein, 255 aa, Homo sapiens [sequence omitted]

SEQ ID NO: 1030625 - protein, 202 aa, Homo sapiens
MCYGKCARCIGHSLVGLALLCIAANILLYFPNGETKYASENHLSRFVWFFSGIVGGGLLMLLPAFVFIGLEQDDCCGCCGHENCGKRCAMLSSVLAALIGIAGSGYCVIVAALGLAEGPLCLDSLGQWNYTFASTEGQYLLDTSTWSECTEPKHIVEWNVSLFSILLALGGIEFILCLIQVINGVLGGICGFCCSHQQQYDC

SEQ ID NO: 1030626 - protein, 202 aa, Homo sapiens; identical to SEQ ID NO: 1030625

SEQ ID NO: 1030627 - protein, 202 aa, Homo sapiens; identical to SEQ ID NO: 1030625

SEQ ID NO: 1030628 - protein, 202 aa, Homo sapiens; identical to SEQ ID NO: 1030625

SEQ ID NO: 1030629 - protein, 202 aa, Homo sapiens; identical to SEQ ID NO: 1030625

SEQ ID NO: 1030630 - protein, 202 aa, Homo sapiens; identical to SEQ ID NO: 1030625

SEQ ID NO: 1030631 - protein, 202 aa, Homo sapiens; identical to SEQ ID NO: 1030625

SEQ ID NO: 1030632 - protein, 214 aa, Homo sapiens
LQMGCCSLRMRHPPAVCQQISDAAGLVGLALLCIAANILLYFPNGETKYASENHLSRFVWFFSGIVGGGLLMLLPAFVFIGLEQDDCCGCCGHENCGKRCAMLSSVLAALIGIAGSGYCVIVAALGLAEGPLCLDSLGQWNYTFASTEGQYLLDTSTWSECTEPKHIVEWNVSLFSILLALGGIEFILCLIQVINGVLGGICGFCCSHQQQYDC

SEQ ID NO: 1030633 - protein, 184 aa, Homo sapiens
MCYGKCARCIGHSLVGLALLCIAANILLYFPNGETKYASENHLSRFVWFFSGIVGGGLLMLLPAFVFIGLEQDDCCGCCGHGIAGSGYCVIVAALGLAEGPLCLDSLGQWNYTFASTEGQYLLDTSTWSECTEPKHIVEWNVSLFSILLALGGIEFILCLIQVINGVLGGICGFCCSHQQQYDC

SEQ ID NO: 1030634 - protein, 113 aa, Homo sapiens
RLTGSQEESNGIAGSGYCVIVAALGLAEGPLCLDSLGQWNYTFASTEGQYLLDTSTWSECTEPKHIVEWNVSLFSILLALGGIEFILCLIQVINGVLGGICGFCCSHQQQYDC

SEQ ID NO: 1030635 - protein, 202 aa, Homo sapiens; identical to SEQ ID NO: 1030625

SEQ ID NO: 1030636 - protein, 201 aa, Homo sapiens
MCYGKCARCIGHSLVGLALLCIAANILLYFPNGETKYASENHLSRFVWFFSGIVGGGLLMLLPAFVFIGLEQDDCCGCCGHENCGKRCAMLSSVLAALIGIAGSGYCVIVAALGLAEGPLCLDSLGQWNYTFASTEGQYLLDTSTWSECTEPKHIVEWNVSLFSILLALGGIEFILCLIQVINGVLGGICGFCCSHQRIEC

SEQ ID NO: 1030637 - protein, 228 aa, Homo sapiens
  misc_feature (200)..(200): Xaa can be any naturally occurring amino acid
  misc_feature (214)..(214): Xaa can be any naturally occurring amino acid
  misc_feature (221)..(221): Xaa can be any naturally occurring amino acid
  misc_feature (228)..(228): Xaa can be any naturally occurring amino acid
MCYGKCARCIGHSLVGLALLCIAANILLYFPNGETKYASENHLSRFVWFFSGIVGGGLLMLLPAFVFIGLEQDDCCGCCGHENCGKRCAMLSSVLAALIGIAGSGYCVIVAALGLAEGPLCLDSLGQWNYTFASTEGQYLLDTSTWSECTEPKHIVEWNVSLFSILLALGGIEFILCLIQVINGVLGGICGFCCSHQTSXYDWLKRNQTQGTGXHKSFPPXFQLVNFX

SEQ ID NO: 1030638 - protein, 202 aa, Homo sapiens; identical to SEQ ID NO: 1030625

SEQ ID NO: 1030639 - protein, 202 aa, Homo sapiens; identical to SEQ ID NO: 1030625

SEQ ID NO: 1030640 - protein, 198 aa, Homo sapiens
DVHSRRSPVLVGLALLCIAANILLYFPNGETKYASENHLSRFVWFFSGIVGGGLLMLLPAFVFIGLEQDDCCGCCGHENCGKRCAMLSSVLAALIGIAGSGYCVIVAALGLAEGPLCLDSLGQWNYTFASTEGQYLLDTSTWSECTEPKHIVEWNVSLFSILLALGGIEFILCLIQVINGVLGGICGFCCSHQQQYDC

SEQ ID NO: 1030641 - protein, 143 aa, Homo sapiens [sequence omitted]

SEQ ID NO: 1030642 - protein, 128 aa, Homo sapiens
MCYGKCARCIGHSLVGLALLCIAANILLYFPNGETKYASENHLSRFVWFFSGIVGGGLLMLLPAFVFIGLEQDDCCGCCGHENCGKRCAMLSSVLAALIASTLWNGMYLCFLSSWLLVELNSSCVLFK

SEQ ID NO: 1030643 - protein, 183 aa, Homo sapiens
MCYGKCARCIGHSLVGLALLCIAANILLYFPNGETKYASENHLSRFVWFFSGIVGGGLLMLLPAFVFIGLEQDDCCGCCGHGIAGSGYCVIVAALGLAEGPLCLDSLGQWNYTFASTEGQYLLDTSTWSECTEPKHIVEWNVSLFSILLALGGIEFILCLIQVINGVLGGICGFCCSHQRIEC

SEQ ID NO: 1030644 - protein, 202 aa, Homo sapiens; identical to SEQ ID NO: 1030625

SEQ ID NO: 1030645 - protein, 202 aa, Homo sapiens; identical to SEQ ID NO: 1030625

SEQ ID NO: 1030646 - protein, 202 aa, Homo sapiens; identical to SEQ ID NO: 1030625

SEQ ID NO: 1030647 - protein, 187 aa, Homo sapiens
DKGRRVHLATVSASAAWDALGLPVRSHMQGSTRRMGVMTDVHRRFLQLLMTHGVLEEWDVKRLQTHCYKVHDRNATVDKLEDFINNINSVLESLYIEIKRGVTEDDGRPIYALVNLATTSISKMATDFAENELDLFRKALELIIDSETGFASSTNILNLVDQLKGKKMRKKEAEQVLQKFVQNKWLI

SEQ ID NO: 1030648 - protein, 293 aa, Homo sapiens
DKGRRVHLATVSASAAWDALGLPVRSHMQGSTRRMGVMTDVHRRFLQLLMTHGVLEEWDVKRLQTHCYKVHDRNATVDKLEDFINNINSVLESLYIEIKRGVTEDDGRPIYALVNLATTSISKMATDFAENELDLFRKALELIIDSETGFASSTNILNLVDQLKGKKMRKKEAEQVLQKFVQNKWLIEKEGEFTLHGRAILEMEQYIRETYPDAVKICNICHSLLIQGQSCETCGIRMHLPCVAKYFQSNAEPRCPHCNDYWPHEIPKVFDPEKERESGVLKSNKKSLRSRQH

SEQ ID NO: 1030649 - protein, 330 aa, Homo sapiens
VCGTRGLGSWGFPLLDGETEAQTGAAENSGLGCPPATHTQTSKNLTILVKNIFNRNYDLTVRSHMQGSTRRMGVMTDVHRRFLQLLMTHGVLEEWDVKRLQTHCYKVHDRNATVDKLEDFINNINSVLESLYIEIKRGVTEDDGRPIYALVNLATTSISKMATDFAENELDLFRKALELIIDSETGFASSTNILNLVDQLKGKKMRKKEAEQVLQKFVQNKWLIEKEGEFTLHGRAILEMEQYIRETYPDAVKICNICHSLLIQGQSCETCGIRMHLPCVAKYFQSNAEPRCPHCNDYWPHEIPKVFDPEKERESGVLKSNKKSLRSRQH

SEQ ID NO: 1030650 - protein, 137 aa, Homo sapiens
EGWEDHQPGSGPVASRCTQEAKARPSEHKDCEKEGEFTLHGRAILEMEQYIRETYPDAVKICNICHSLLIQGQSCETCGIRMHLPCVAKYFQSNAEPRCPHCNDYWPHEIPKVFDPEKERESGVLKSNKKSLRSRQH

SEQ ID NO: 1030651 - protein, 93 aa, Homo sapiens
  misc_feature (72)..(72): Xaa can be any naturally occurring amino acid
  misc_feature (90)..(90): Xaa can be any naturally occurring amino acid
MCWAALALKKFFNPLRWARGPRWLVDCGQERVPGEIRANRRRCLDFFPRLYKSRGGQRMCFLNNLQSEVGRXKREPHYQGCPQKLEKILXVCG

SEQ ID NO: 1030652 - protein, 137 aa, Homo sapiens; identical to SEQ ID NO: 1030650

SEQ ID NO: 1030653 - protein, 293 aa, Homo sapiens; identical to SEQ ID NO: 1030648

SEQ ID NO: 1030654 - protein, 293 aa, Homo sapiens; identical to SEQ ID NO: 1030648

SEQ ID NO: 1030655 - protein, 241 aa, Homo sapiens
MGVMTDVHRRFLQLLMTHGVLEEWDVKRLQTHCYKVHDRNATVDKLEDFINNINSVLESLYIEIKRGVTEDDGRPIYALVNLATTSISELIIDSETGFASSTNILNLVDQLKGKKMRKKEAEQVLQKFVQNKWLIEKEGEFTLHGRAILEMEQYIRETYPDAVKICNICHSLLIQGQSCETCGIRMHLPCVAKYFQSNAEPRCPHCNDYWPHEIPKVFDPEKERESGVLKSNKKSLRSRQH

SEQ ID NO: 1030656 - protein, 240 aa, Homo sapiens
DKGRRVHLATVSASAAWDALGLPVRSHMQGSTRRMGVMTDVHRRFLQLLMTHGVLEEWDVKRLQTHCYKVHDRNATVDKLEDFINNINSVLESLYIEIKRGVTEDDGRPIYALVNLATTSISKMATDFAENELDLFRKALELIIDSETGFASSTNILNLVDQLKGKKMRKKEAEQVLQKFVQNKWLIEKEGEFTLHGRAILEMEQYIRETYPDAVKICNICHSLLIQKSSTLRRRGSLVS

SEQ ID NO: 1030657 - protein, 93 aa, Homo sapiens; identical to SEQ ID NO: 1030651
  misc_feature (72)..(72): Xaa can be any naturally occurring amino acid
  misc_feature (90)..(90): Xaa can be any naturally occurring amino acid

SEQ ID NO: 1030658 - protein, 321 aa, Homo sapiens
DKGRRVHLATVSASAAWDALGLPVRSHMQGSTRRMGVMTDVHRRFLQLLMTHGVLEEWDVKRLQTHCYKVHDRNATVDKLEDFINNINSVLESLYIEIKRGVTEDDGRPIYALVNLATTSISKMATDFAENELDLFRKALELIIDSETGFASSTNILNLVDQLKGKKMRKKEAEQVLQKFVQNKWLIEKEGEFTLHGRAILEMEQYIRETYPDAVKICNICHSLLIQGQSCETCGIRMHLPCVAKYFQSNAERAAPLQDYWPTRSKSFDPERRGSRGWIRQKSVARTDNTAGEAGPDGERHLWRRRGRTEDTGMDGSWDTR

SEQ ID NO: 1030659 - protein, 293 aa, Homo sapiens; identical to SEQ ID NO: 1030648

SEQ ID NO: 1030660 - protein, 333 aa, Homo sapiens
MGVMTDVHRRFLQLLMTHGVLEEWDVKRLQTHCYKVHDRMSFISLTSEKEKQDPFWLASALVAEGLLRAQGLLSWASSTPAPPSHPGPALPCPQCCASRTARPPCLSGGLSEGNATVDKLEDFINNINSVLESLYIEIKRGVTEDDGRPIYALVNLATTSISKMATDFAENELDLFRKALELIIDSETGFASSTNILNLVDQLKGKKMRKKEAEQVLQKFVQNKWLIEKEGEFTLHGRAILEMEQYIRETYPDAVKICNICHSLLIQGQSCETCGIRMHLPCVAKYFQSNAEPRCPHCNDYWPHEIPKVFDPEKERESGVLKSNKKSLRSRQH

SEQ ID NO: 1030661 - protein, 176 aa, Homo sapiens
FLHVFRVFASGVPCQRLCQGDVADARWLGLEKSCVDPCVFLSTGLWDHRGKRGGEWGEGLAEGGHLLCVPEKEGEFTLHGRAILEMEQYIRETYPDAVKICNICHSLLIQGQSCETCGIRMHLPCVAKYFQSNAEPRCPHCNDYWPHEIPKVFDPEKERESGVLKSNKKSLRSRQH

SEQ ID NO: 1030662 - protein, 71 aa, Homo sapiens
  misc_feature (40)..(40): Xaa can be any naturally occurring amino acid
MGVMTDVHRRFLQLLMTHGVLEEWDVKRLQTHCYKVHDRXVPFPCSQGRSGCCVDQGPVTEVQYHVNLFNR

SEQ ID NO: 1030663 - protein, 79 aa, Homo sapiens
MIGAGSGCEVFKTRAVGQFAYSFHVFVVVGRILLFFLPRGGSSSNAPIILWVYGLQGIAETYDLMLFSKADPYFLGLVC

SEQ ID NO: 1030664 - protein, 68 aa, Homo sapiens
  misc_feature (32)..(32): Xaa can be any naturally occurring amino acid
AQIFPWVILLDGSLMYKYIFFGVISIYKSISXSDAEPFDSAKDFGGENFFLRVFAAGGGGKVSIDRSV

SEQ ID NO: 1030665 - protein, 369 aa, Homo sapiens
MHHNKQATENAKEEVRRILGLLDAYLKTRTFLVGERVTLADITVVCTLLWLYKQVLEPSFRQAFPNYQPVAAEPKAKDPFSSSPCINQPQFRAVLGEVKLCEKMASLVLKSVAETQPKKDNPGKSKGSTAKRSRRPQAERKEDEQGGAPAPEEEMDECEQALVLEPKAKDPVPHRAQEYLLLFAMRFKAASYSQLRTHSHVGTVQYSLAQTQLCITDRTWYPGEYYRRIDFLLKGISTQEPSMTLHIFIDVDIFQQTGTRLRTEVPYVQMSSYLRKPTNSSVHFWQSGIFRGQGACLSDESRLARWTTSHNNIGENWILASEEDPERWFESTYPWERGPFQHVGKSIQVQGKDLQVNILFAITLTALNF

SEQ ID NO: 1030666 - protein, 361 aa, Homo sapiens
MAAGTLYTYPENWRAFKALIAAQYSGAQVRVLSAPPHFHFGQTNRTPEFLRKFPAGKVPAFEGDDGFCVFESNAIAYYVSNEELRGSTPEAAAQVVQWVSFADSDIVPPASTWVFPTLGHHAPQAEDPRLSGRRTNKAAAPAPEEEMDECEQALVLEPKAKDPVPHRAQEYLLLFAMRFKAASYSQLRTHSHVGTVQYSLAQTQLCITDRTWYPGEYYRRIDFLLKGISTQEPSMTLHIFIDVDIFQQTGTRLRTEVPYVQMSSYLRKPTNSSVHFWQSGIFRGQGACLSDESRLARWTTSHNNIGENWILASEEDPERWFESTYPWERGPFQHVGKSIQVQGKDLQVNILFAITLTALNF

SEQ ID NO: 1030667 - protein, 266 aa, Homo sapiens
MASLVLKSVAETQPKKDNPGKSKGSTAKRSRRPQAERKEDEQGGAPAPEEEMDECEQALVLEPKAKDPFAHRAQEYLLLFAMRFKAASYSQLRTHSHVGTVQYSLAQTQLCITDRTWYPGEYYRRIDFLLKGISTQEPSMTLHIFIDVDIFQQTGTRLRTEVPYVQMSSYLRKPTNSSVHFWQSGIFRGQGACLSDESRLARWTTSHNNIGENWILASEEDPERWFESTYPWERGPFQHVGKSIQVQGKDLQVNILFAITLTALNF

SEQ ID NO: 1030668 - protein, 190 aa, Homo sapiens
MTEWETAAPAVAETPDIKLFGKWSTDDVQINDISHVSVLAFARDMDDSSAEVDRCCCDELARAGELPALDTSVFASNMLQVVIHVWQATSSSTSHDSGWHGPFKQTRLSKASMGLMAGNSDQKQLTPCGRNTIATLAFSSVAGIRYVPMGCHVGAKRQSTRQPAAITARDGTCSNSGEFAGSRAGDWVKD

SEQ ID NO: 1030669 - protein, 204 aa, Homo sapiens [sequence omitted]

SEQ ID NO: 1030670 - protein, 231 aa, Homo sapiens
GSPYLIDTLRLCSLGFSYGSTAGLREVGFRRQDFSVSFGNVEQPYDVPYRSPLLCLLAVTVVSDEKISCQGAVLRVQGGMPMTSVREVQLSLLCARLNNVSCMIHRAPQRALTFMTVRIVKHAFEIIHLLTGENPLQVLVNAIINSGPREDSTRIGRAGTVRRQAVDVSPLRRVNQAIWLLCTGAREAAFRNIKTIAECLADELINAAKGSSNSYAIKKKDELERVAKSNR

SEQ ID NO: 1030671 - protein, 204 aa, Homo sapiens [sequence omitted]

SEQ ID NO: 1030672 - protein, 201 aa, Homo sapiens
YKSHLSRCEWNAPAWRTRIQFWSEPYCDHDFLQDYIAVKEKYAKYLPHSAGRYAAKRFRKAQCPIVERLTNSMMMHGRNNGKKLMTVRIVKHAFEIIHLLTGENPLQVLVNAIINSGPREDSTRIGRAGTVRRQAVDVSPLRRVNQAIWLLCTGAREAAFRNIKTIAECLADELINAAKGSSNSYAIKKKDELERVAKSNR

SEQ ID NO: 1030673 - protein, 360 aa, Homo sapiens
MEELSQALASSFSVSQDLNSTAAPHPRLSQYKSKYSSLEQSERRRRLLELQKSKRLDYVNHARRLAEDDWTGMESEEENKKDDEEMDIDTVKKLPKHYANQLMLSEWLIDVPSDLGQEWIVVVCPVGKRALIVASRGSTSAYTKSGYCVNRFSSLLPGGNRRNSTAKDYTILDCIYNEVNQTYYVLDVMCWRGHPFYDCQTDFRFYWMHSKLPEEEGLGEKTKLNPFKFVGLKNFPCTPESLCDVLSMDFPFEVDGLLFYHKQTHYSPGSTPLVGWLRPYMVSDVLGVAVPAGPLTTKPDYAGHQLQQIMEHKKSQKEGMKEKLTHKASENGHYELEHLSTPKLKGSSHSPDHPGCLMEN

SEQ ID NO: 1030674 - protein, 469 aa, Homo sapiens
RKAREDLREAAGPRALNARPQDQPPPIGERSPEELVFRREASAWSSHLAGRVPDSAKQMQEDPLPSRWEMPQPLKAEITACRQRNSQRSQRSGGAGNSGREACGPSGGKMEELSQALASSFSVSQDLNSTAAPHPRLSQYKSKYSSLEQSERRRRLLELQKSKRLDYVNHARRLAEDDWTGMESEEENKKDDEEMDIDTVKKLPKHYANQLMLSEWLIDVPSDLGQEWIVVVCPVGKRALIVASRGSTSAYTKSGYCVNRFSSLLPGGNRRNSTAKDYTILDCIYNEVNQTYYVLDVMCWRGHPFYDCQTDFRFYWMHSKLPEEEGLGEKTKLNPFKFVGLKNFPCTPESLCDVLSMDFPFEVDGLLFYHKQTHYSPGSTPLVGWLRPYMVSDVLGVAVPAGPLTTKPDYAGHQLQQIMEHKKSQKEGMKEKLTHKASENGHYELEHLSTPKLKGSSHSPDHPGCLMEN

SEQ ID NO: 1030675 - protein, 360 aa, Homo sapiens; identical to SEQ ID NO: 1030673

SEQ ID NO: 1030676 - protein, 360 aa, Homo sapiens; identical to SEQ ID NO: 1030673

SEQ ID NO: 1030677 - protein, 360 aa, Homo sapiens; identical to SEQ ID NO: 1030673

SEQ ID NO: 1030678 - protein, 360 aa, Homo sapiens; identical to SEQ ID NO: 1030673

SEQ ID NO: 1030679 - protein, 376 aa, Homo sapiens
TLEVPLEFDGFSLLGKMEELSQALASSFSVSQDLNSTAAPHPRLSQYKSKYSSLEQSERRRRLLELQKSKRLDYVNHARRLAEDDWTGMESEEENKKDDEEMDIDTVKKLPKHYANQLMLSEWLIDVPSDLGQEWIVVVCPVGKRALIVASRGSTSAYTKSGYCVNRFSSLLPGGNRRNSTAKDYTILDCIYNEVNQTYYVLDVMCWRGHPFYDCQTDFRFYWMHSKLPEEEGLGEKTKLNPFKFVGLKNFPCTPESLCDVLSMDFPFEVDGLLFYHKQTHYSPGSTPLVGWLRPYMVSDVLGVAVPAGPLTTKPDYAGHQLQQIMEHKKSQKEGMKEKLTHKASENGHYELEHLSTPKLKGSSHSPDHPGCLMEN

SEQ ID NO: 1030680 - protein, 247 aa, Homo sapiens
MEELSQALASSFSVSQDLNSTAAPHPRLSQYKSKYSSLEQSERRRRLLELQKSKRLDYVNHARRLAEDDWTGMESEEENKKDDEEMDIDTVKKLPKHYANQLMLSEWLIDVPSDLGQEWIVVVCPVGKRALIVASRGSTSAYTKSGYCVNRFSSLLPGGNRRNSTAKDYTILDCIYNEVNQTYYVLDVMCWRGHPFYDCQTDFRFYWMHSKLPEEEGLGEKTKLNPVRPGVRITEFLMGSSVDWSVI

SEQ ID NO: 1030681 - protein, 360 aa, Homo sapiens; identical to SEQ ID NO: 1030673

SEQ ID NO: 1030682 - protein, 222 aa, Homo sapiens
MAAPAVSGLSRQVRCFSTSVVRPFAKLVRPPVQVYGIEGRYATALYSAASKQNKLEQVEKELLRVAQILKEPKVAASVLNPYVKRSIKVKSLNDITAKERFSPLTTNLISLLAENGRLSNTQGVVSAFSTMMSVHRGEVPCTVTSASPLEEATLSELKTVLKSFLSQGQVLKLEAKTDPSILGGMIVRIGEKYVDMSVKDQDSEAGQGYAGDCLKVLVSCHQ

SEQ ID NO: 1030683 - protein, 179 aa, Homo sapiens
YRLGIGSVFNRRGCPECGKGFRRSSDLVKHHRVHTGEKPYLCPECGKGFADSSARVKHLRTHRGERARPPPPSTLLRPHNPPGPVPMAPRPRVRAQPSGPSQPHVCGFCGKEFPRSSDLVKHRRTHTGEKPYKCAECGKGFGDSSARIKHQRGHLVLTPFGIGDGRARPLKQEAATGLE

SEQ ID NO: 1030684 - protein, 209 aa, Homo sapiens
  misc_feature (20)..(20): Xaa can be any naturally occurring amino acid
AQPPVTPRVLTLGEPFACLXGAQSLGPTGWEPPPPLAGDKPHKCPECGKGFRRSSDLVKHHRVHTGEKPYLCPECGKGFADSSARVKHLRTHRGERARPPPPSTLLRPHNPPGPVPMAPRPRVRAQPSGPSQPHVCGFCGKEFPRSSDLVKHRRTHTGEKPYKCAECGKGFGDSSARIKHQRGHLVLTPFGIGDGRARPLKQEAATGLE

SEQ ID NO: 1030685 - protein, 102 aa, Homo sapiens
MCEKVPFRVVILMTEVLEPNNTFFIFILFLKDELWSFSGRRLFPFPRIKTRIRPARSRSLSFARSGAHAPCSGPRWTYPRRHLPRQTRLSPGDFPQPSAAFP

SEQ ID NO: 1030686 - protein, 311 aa, Homo sapiens
MRGAARAAWGRAGQPWPRPPAPGPPPPPLPLLLLLLAGLLGGAGAQYSSDRCSWKGSGLTHEAHRKEVEQVYLRCAAGAVEWMYPTGALIVNLRPNTFSPARHLTVCIRSFTDSSGANIYLEKTGELRLLVPDGDGRPGRVQCFGLEQGGLFVEATPQQDIGRRTTGFQYELVRRHRASDLHELSAPCRPCSDTEVLLAVCTSDFAVRGSIQQVTHEPERQDSAIHLRVSRLYRQKSRVFEPVPEGDGHWQGRVRTLLECGVRPGHGDFLFTGHMHFGEARLGCAPRFKDFQRMYRDAQERGLNPCEVGTD

SEQ ID NO: 1030687 - protein, 311 aa, Homo sapiens; identical to SEQ ID NO: 1030686

SEQ ID NO: 1030688 - protein, 294 aa, Homo sapiens
MRGAARAAWGRAGQPWPRPPAPGPPPPPLPLLLLLLAGLLGGAGAQYSSDRCSWKGSGLTHEAHRKEVEQVYLRCAAGAVEWMYPTGALIVNLRPNTFSPARHLTVCIRSFTDSSGANIYLEKTGELRLLVPDGDGRPGRVQCFGLEQGGLFVEATPQQDIGRRTTGFQYELVRRHRASDLHELSAPCRPCSDTEVLLAVCTSDFAVRGSIQQVTHEPERQDSAIHLRVSRLYRQKSRVFEPVPEGDGHWQGRVRTLLECGVRPGHGDFLFTGPTLQGLPEDVQGCPGEGAEPL

SEQ ID NO: 1030689 - protein, 161 aa, Homo sapiens
MKKTVEDRMLLPGGVGRALVYQHSPSTYIDLAVDEHGLWAIHSGPGTHSHLVLTKIEPGTLGVEHSWDTPCRSQDAEASFLLCGVLYVVYSTGGQGPHRITCIYDPLGTISEEDLPNLFFPKRPRSHSMIHYNPRDKQLYAWNEGNQIIYKLQTKRKLPLK

SEQ ID NO: 1030690 - protein, 161 aa, Homo sapiens; identical to SEQ ID NO: 1030689

SEQ ID NO: 1030691 - protein, 118 aa, Homo sapiens
IPMVLSCILGSKAGSMSKQELDDILKFGTEELFKDENEGENKEEDSSVIHYDNEAIARLLDRNQDATEDTDVQNMNEYLSSFKVAQYVVREEDKVRGFGGQTLSIPGHLQKAVSFTQP

SEQ ID NO: 1030692 - protein, 1106 aa, Homo sapiens
FFRVLNGYKIDHKLLLTGTPLQNNLEELFHLLNFLTPERFNNLEGFLEEFADISKEDQIKKLHDLLGPHMLRRLKADVFKNMPAKTELIVRVELSPMQKKYYKYILTRNFEALNSRGGGNQVSLLNIMMDLKKCCNHPYLFPVAAMESPKLPSGAYEGGALIKSSGKLMLLQKMLRKLKEQGHRVLIFSQMTKMLDLLEDFLDYEGYKYERIDGGITGALRQEAIDRFNAPGAQQFCFLLSTRAGGLGINLATADTVIIFDSDWNPHNDIQAFSRAHRIGQANKVMIYRFVTRASVEERITQVAKRKMMLTHLVVRPGLGSKAGSMSKQELDDILKFGTEELFKDENEGENKEEDSSVIHYDNEAIARLLDRNQDATEDTDVQNMNEYLSSFKVAQYVVREEDKIEEIEREIIKQEENVDPDYWEKLLRHHYEQQQEDLARNLGKGKRVRKQVNYNDAAQEDQDNQSEYSVGSEEEDEDFDERPEGRRQSKRQLRNEKDKPLPPLLARVGGNIEVLGFNTRQRKAFLNAVMRWGMPPQDAFTTQWLVRDLRGKTEKEFKAYVSLFMRHLCEPGADGSETFADGVPREGLSRQQVLTRIGVMSLVKKKVQEFEHINGRWSMPELMPDPSADSKRSSRASSPTKTSPTTPEASATNSPCTSKPATPAPSEKGEGIRTPLEKEEAENQEEKPEKNSRIGEKMETEADAPSPAPSLGERLEPRKIPLEDEVPGVPGEMEPEPGYRGDREKSATESTPGERGEEKPLDGQEHRERPEGETGDLGKREDVKGDRELRPGPRDEPRSNGRREEKTEKPRFMFNIADGGFTELHTLWQNEERAAISSGKLNEIWHRRHDYWLLAGIVLHGYARWQDIQNDAQFAIINEPFKTEANKGNFLEMKNKFLARRFKLLEQALVIEEQLRRAAYLNLSQEPAHPAMALHARFAEAECLAESHQHLSKESLAGNKPANAVLHKVLNQLEELLSDMKADVTRLPATLSRIPPIAARLQMSERSILSRLASKGTEPHPTPAYPPGPYATPPGYGAAFSAAPVGALAAAGANYSQMPAGSFITAATNGPPVLVKKEKEMVGALVSDGLDRKEPRAGEVICIDD

SEQ ID NO: 1030693 - protein, 1072 aa, Homo sapiens
FFRVLNGYKIDHKLLLTGTPLQNNLEELFHLLNFLTPERFNNLEGFLEEFADISKEDQIKKLHDLLGPHMLRRLKADVFKNMPAKTELIVRVELSPMQKKYYKYILTRNFEALNSRGGGNQVSLLNIMMDLKKCCNHPYLFPVAAMESPKLPSGAYEGGALIKSSGKLMLLQKMLRKLKEQGHRVLIFSQMTKMLDLLEDFLDYEGYKYERIDGGITGALRQEAIDRFNAPGAQQFCFLLSTRAGGLGINLATADTVIIFDSDWNPHNDIQAFSRAHRIGQANKVMIYRFVTRASVEERITQVAKRKMMLTHLVVRPGLGSKAGSMSKQELDDILKFGTEELFKDENEGENKEEDSSVIHYDNEAIARLLDRNQDATEDTDVQNMNEYLSSFKVAQYVVREEDKIEEIEREIIKQEENVDPDYWEKLLRHHYEQQQEDLARNLGKGKRVRKQVNYNDAAQEDQDNQSEYSVGSEEEDEDFDERPEGRRQSKRQLRNEKDKPLPPLLARVGGNIEVLGFNTRQRKAFLNAVMRWGMPPQDAFTTQWLVRDLRGKTEKEFKAYVSLFMRHLCEPGADGSETFADGVPREGLSRQQVLTRIGVMSLVKKKVQEFEHINGRWSMPELMPDPSADSKRSSRASSPTKTSPTTPEASATNSPCTSKPATPAPSEKGEGIRTPLEKEEAENQEEKPEKNSRIGEKMETEADAPSPAPSLGERLEPRKIPLEDEVPGVPGEMEPEPGYRGDREKSEDVKGDRELRPGPRDEPRSNGRREEKTEKPRFMFNIADGGFTELHTLWQNEERAAISSGKLNEIWHRRHDYWLLAGIVLHGYARWQDIQNDAQFAIINEPFKTEANKGNFLEMKNKFLARRFKLLEQALVIEEQLRRAAYLNLSQEPAHPAMALHARFAEAECLAESHQHLSKESLAGNKPANAVLHKVLNQLEELLSDMKADVTRLPATLSRIPPIAARLQMSERSILSRLASKGTEPHPTPAYPPGPYATPPGYGAAFSAAPVGALAAAGANYSQMPAGSFITAATNGPPVLVKKEKEMVGALVSDGLDRKEPRAGEVICIDD

SEQ ID NO: 1030694 - protein, 972 aa, Homo sapiens
LAQLPPCSALAPFSGTGDKGASRDETPFKSSGKLMLLQKMLRKLKEQGHRVLIFSQMTKMLDLLEDFLDYEGYKYERIDGGITGALRQEAIDRFNAPGAQQFCFLLSTRAGGLGINLATADTVIIFDSDWNPHNDIQAFSRAHRIGQANKVMIYRFVTRASVEERITQVAKRKMMLTHLVVRPGLGSKAGSMSKQELDDILKFGTEELFKDENEGENKEEDSSVIHYDNEAIARLLDRNQDATEDTDVQNMNEYLSSFKVAQYVVREEDKIEEIEREIIKQEENVDPDYWEKLLRHHYEQQQEDLARNLGKGKRVRKQVNYNDAAQEDQDNQSEYSVGSEEEDEDFDERPEGRRQSKRQLRNEKDKPLPPLLARVGGNIEVLGFNTRQRKAFLNAVMRWGMPPQDAFTTQWLVRDLRGKTEKEFKAYVSLFMRHLCEPGADGSETFADGVPREGLSRQQVLTRIGVMSLVKKKVQEFEHINGRWSMPELMPDPSADSKRSSRASSPTKTSPTTPEASATNSPCTSKPATPAPSEKGEGIRTPLEKEEAENQEEKPEKNSRIGEKMETEADAPSPAPSLGERLEPRKIPLEDEVPGVPGEMEPEPGYRGDREKSATESTPGERGEEKPLDGQEHRERPEGETGDLGKREDVKGDRELRPGPRDEPRSNGRREEKTEKPRFMFNIADGGFTELHTLWQNEERAAISSGKLNEIWHRRHDYWLLAGIVLHGYARWQDIQNDAQFAIINEPFKTEANKGNFLEMKNKFLARRFKLLEQALVIEEQLRRAAYLNLSQEPAHPAMALHARFAEAECLAESHQHLSKESLAGNKPANAVLHKVLNQLEELLSDMKADVTRLPATLSRIPPIAARLQMSERSILSRLASKGTEPHPTPAYPPGPYATPPGYGAAFSAAPVGALAAAGANYSQMPAGSFITAATNGPPVLVKKEKEMVGALVSDGLDRKEPRAGEVICIDD

SEQ ID NO: 1030695 - protein, 1091 aa, Homo sapiens
FFRVLNGYKIDHKLLLTGTPLQNNLEELFHLLNFLTPERFNNLEGFLEEFADISKEDQIKKLHDLLGPHMLRRLKADVFKNMPAKTELIVRVELSPMQKKYYKYILTRNFEALNSRGGGNQVSLLNIMMDLKKCCNHPYLFPVAAMESPKLPSGAYEGGALIKSSGKLMLLQKMLRKLKEQGHRVLIFSQMTKMLDLLEDFLDYEGYKYERIDGGITGALRQEAIDRFNAPGAQQFCFLLSTRAGGLGINLATADTVIIFDSDWNPHNDIQAFSRAHRIGQANKVMIYRFVTRASVEERITQVAKRKMMLTHLVVRPGLGSKAGSMSKQELDDILKFGTEELFKDENEGENKEEDSSVIHYDNEAIARLLDRNQDATEDTDVQNMNEYLSSFKVAQYVVREEDKIEEIEREIIKQEENVDPDYWEKLLRHHYEQQQEDLARNLGKGKRVRKQVNYNDAAQEDQDNQSEYSVGSEEEDEDFDERPEGRRQSKRQLRNEKDKPLPPLLARVGGNIEVLGFNTRQRKAFLNAVMRWGMPPQDAFTTQWLVRDLRGKTEKEFKAYVSLFMRHLCEPGADGSETFADGVPREGLSRQQVLTRIGVMSLVKKKVQEFEHINGRWSMPELMPDPSADSKRSSRASSPTKTSPTTPEASATNSPCTSKPATPAPSEKGEGIRTPLEKEEAENQEEKPEKNSRIGEKMETEADAPSPAPSLGERLEPRKIPLEDEVPGVPGEMEPEPGYRGDREKSATESTPGERGEEKPLDGQEHRERPEGETGDLGKREDVKGDRELRPGPRDEPRSNGRREEKTEKPRFMFNIADGGFTELHTLWQNEERAAISSGKLNEIWHRRHDYWLLAGIVLHGYARWQDIQNDAQFAIINEPFKTEANKGNFLEMKNKFLARRFKLLEQALVIEEQLRRAAYLNLSQEPAHPAMALHARFAEAECLAESHQHLSKESLAGNKPANAVLHKGLPAGSLRYTSGVRGGLQRRTRRGPGRRRRQLQPDACRVLHHSRHQRPSSACEEGEGNGGGIGVRRAGSEGAPSRGGDLYRRLTGSQACPSPRPRPRGRPPAQALGPAASPPPSPPLGPSLG

SEQ ID NO: 1030696 - protein, 796 aa, Homo sapiens
IPMVLSCILGSKAGSMSKQELDDILKFGTEELFKDENEGENKEEDSSVIHYDNEAIARLLDRNQDATEDTDVQNMNEYLSSFKVAQYVVREEDKIEEIEREIIKQEENVDPDYWEKLLRHHYEQQQEDLARNLGKGKRVRKQVNYNDAAQEDQDNQSEYSVGSEEEDEDFDERPEGRRQSKRQLRNEKDKPLPPLLARVGGNIEVLGFNTRQRKAFLNAVMRWGMPPQDAFTTQWLVRDLRGKTEKEFKAYVSLFMRHLCEPGADGSETFADGVPREGLSRQQVLTRIGVMSLVKKKVQEFEHINGRWSMPELMPDPSADSKRSSRASSPTKTSPTTPEASATNSPCTSKPATPAPSEKGEGIRTPLEKEEAENQEEKPEKNSRIGEKMETEADAPSPAPSLGERLEPRKIPLEDEVPGVPGEMEPEPGYRGDREKSATESTPGERGEEKPLDGQEHRERPEGETGDLGKREDVKGDRELRPGPRDEPRSNGRREEKTEKPRFMFNIADGGFTELHTLWQNEERAAISSGKLNEIWHRRHDYWLLAGIVLHGYARWQDIQNDAQFAIINEPFKTEANKGNFLEMKNKFLARRFKLLEQALVIEEQLRRAAYLNLSQEPAHPAMALHARFAEAECLAESHQHLSKESLAGNKPANAVLHKVLNQLEELLSDMKADVTRLPATLSRIPPIAARLQMSERSILSRLASKGTEPHPTPAYPPGPYATPPGYGAAFSAAPVGALAAAGANYSQMPAGSFITAATNGPPVLVKKEKEMVGALVSDGLDRKEPRAGEVICIDD

SEQ ID NO: 1030697 - protein, 1106 aa, Homo sapiens; identical to SEQ ID NO: 1030692

SEQ ID NO: 1030698 - protein, 858 aa, Homo sapiens
FFRVLNGYKIDHKLLLTGTPLQNNLEELFHLLNFLTPERFNNLEGFLEEFADISKEDQIKKLHDLLGPHMLRRLKADVFKNMPAKTELIVRVELSPMQKKYYKYILTRNFEALNSRGGGNQVSLLNIMMDLKKCCNHPYLFPVAAMESPKLPSGAYEGGALIKSSGKLMLLQKMLRKLKEQGHRVLIFSQMTKMLDLLEDFLDYEGYKYERIDGGITGALRQEAIDRFNAPGAQQFCFLLSTRAGGLGINLATADTVIIFDSDWNPHNDIQAFSRAHRIGQANKVMIYRFVTRASVEERITQVAKRKMMLTHLVVRPGLGSKAGSMSKQELDDILKFGTEELFKDENEGENKEEDSSVIHYDNEAIARLLDRNQDATEDTDVQNMNEYLSSFKVAQYVVREEDKIEEIEREIIKQEENVDPDYWEKLLRHHYEQQQEDLARNLGKGKRVRKQVNYNDAAQEDQDNQSEYSVGSEEEDEDFDERPEGRRQSKRQLRNEKDKPLPPLLARVGGNIEVLGFNTRQRKAFLNAVMRWGMPPQDAFTTQWLVRDLRGKTEKEFKAYVSLFMFNIADGGFTELHTLWQNEERAAISSGKLNEIWHRRHDYWLLAGIVLHGYARWQDIQNDAQFAIINEPFKTEANKGNFLEMKNKFLARRFKLLEQALVIEEQLRRAAYLNLSQEPAHPAMALHARFAEAECLAESHQHLSKESLAGNKPANAVLHKVLNQLEELLSDMKADVTRLPATLSRIPPIAARLQMSERSILSRLASKGTEPHPTPAYPPGPYATPPGYGAAFSAAPVGALAAAGANYSQMPAGSFITAATNGPPVLVKKEKEMVGALVSDGLDRKEPRAGEVICIDD

SEQ ID NO: 1030699 - protein, 1106 aa, Homo sapiens; identical to SEQ ID NO: 1030692

SEQ ID NO: 1030700 - protein, 1106 aa, Homo sapiens; identical to SEQ ID NO: 1030692

SEQ ID NO: 1030701 - protein, 306 aa, Homo sapiens
FFRVLNGYKIDHKLLLTGTPLQNNLEELFHLLNFLTPERFNNLEGFLEEFADISKEDQIKKLHDLLGPHMLRRLKADVFKNMPAKTELIVRVELSPMQKKYYKYILTRNFEALNSRGGGNQVSLLNIMMDLKKCCNHPYLFPVAAMESPKLPSGAYEGGALIKSSGKLMLLQKMLRKLSDMKADVTRLPATLSRIPPIAARLQMSERSILSRLASKGTEPHPTPAYPPGPYATPPGYGAAFSAAPVGALAAAGANYSQMPAGSFITAATNGPPVLVKKEKEMVGALVSDGLDRKEPRAGEVICIDD

SEQ ID NO: 1030702 - protein, 1104 aa, Homo sapiens
  misc_feature (1079)..(1079): Xaa can be any naturally occurring amino acid
  misc_feature (1092)..(1092): Xaa can be any naturally occurring amino acid
  misc_feature (1097)..(1097): Xaa can be any naturally occurring amino acid
FFRVLNGYKIDHKLLLTGTPLQNNLEELFHLLNFLTPERFNNLEGFLEEFADISKEDQIKKLHDLLGPHMLRRLKADVFKNMPAKTELIVRVELSPMQKKYYKYILTRNFEALNSRGGGNQVSLLNIMMDLKKCCNHPYLFPVAAMESPKLPSGAYEGGALIKSSGKLMLLQKMLRKLKEQGHRVLIFSQMTKMLDLLEDFLDYEGYKYERIDGGITGALRQEAIDRFNAPGAQQFCFLLSTRAGGLGINLATADTVIIFDSDWNPHNDIQAFSRAHRIGQANKVMIYRFVTRASVEERITQVAKRKMMLTHLVVRPGLGSKAGSMSKQELDDILKFGTEELFKDENEGENKEEDSSVIHYDNEAIARLLDRNQDATEDTDVQNMNEYLSSFKVAQYVVREEDKIEEIEREIIKQEENVDPDYWEKLLRHHYEQQQEDLARNLGKGKRVRKQVNYNDAAQEDQDNQSEYSVGSEEEDEDFDERPEGRRQSKRQLRNEKDKPLPPLLARVGGNIEVLGFNTRQRKAFLNAVMRWGMPPQDAFTTQWLVRDLRGKTEKEFKAYVSLFMRHLCEPGADGSETFADGVPREGLSRQQVLTRIGVMSLVKKKVQEFEHINGRWSMPELMPDPSADSKRSSRASSPTKTSPTTPEASATNSPCTSKPATPAPSEKGEGIRTPLEKEEAENQEEKPEKNSRIGEKMETEADAPSPAPSLGERLEPRKIPLEDEVPGVPGEMEPEPGYRGDREKSATESTPGERGEEKPLDGQEHRERPEGETGDLGKREDVKGDRELRPGPRDEPRSNGRREEKTEKPRFMFNIADGGFTELHTLWQNEERAAISSGKLNEIWHRRHDYWLLAGIVLHGYARWQDIQNDAQFAIINEPFKTEANKGNFLEMKNKFLARRFKLLEQALVIEEQLRRAAYLNLSQEPAHPAMALHARFAEAECLAESHQHLSKESLAGNKPANAVLHKVLNQLEELLSDMKADVTRLPATLSRIPPIAARLQMSERSILSRLASKGTEPHPTPAYPPGPYATPPGYGAAFSAAPVGALAAAGANYSQMPAGSFITAATNGLTSHPWPXGKCQRLIEDPTRXTDNTXDPAAYQP

SEQ ID NO: 1030703 - protein, 857 aa, Homo sapiens
FFRVLNGYKIDHKLLLTGTPLQNNLEELFHLLNFLTPERFNNLEGFLEEFADISKEDQIKKLHDLLGPHMLRRLKADVFKNMPAKTELIVRVELSPMQKKYYKYILTRNFEALNSRGGGNQVSLLNIMMDLKKCCNHPYLFPVAAMESPKLPSGAYEGGALIKSSGKLMLLQKMLRKLKEQGHRVLIFSQMTKMLDLLEDFLDYEGYKYERIDGGITGALRQEAIDRFNAPGAQQFCFLLSTRAGGLGINLATADTVIIFDSDWNPHNDIQAFSRAHRIGQANKVMIYRFVTRASVEERITQVAKRKMMLTHLVVRPGLGSKAGSMSKQELDDILKFGTEELFKDENEGENKEEDSSVIHYDNEAIARLLDRNQDATEDTDVQNMNEYLSSFKVAQYVVREEDKIEEIEREIIKQEENVDPDYWEKLLRHHYEQQQEDLARNLGKGKRVRKQVNYNDAAQEDQDNQSEYSVGSEEEDEDFDERPEGRRQSKRQLRNEKDKPLPPLLARVGGNIEVLGFNTRQRKAFLNAVMRWGMPPQDAFTTQWLVRDLRGKTEKEFKAYVSLFMRHLCEPGADGSETFADGVPREGLSRQQVLTRIGVMSLVKKKVQEFEHINGRWSMPELMPDPSADSKRSSRASSPTKTSPTTPEASATNSPCTSKPATPAPSEKGEGIRTPLEKEEAENQEEKPEKNSRIGEKMETEADAPSPAPSLGERLEPRKIPLEDEVPGVPGEMEPEPGYRGDREKSATESTPGERGEEKPLDGQEHRERPEGETGDLGKREDVKGDRELRPGPRDEPRSNGRREEKTEKPRFMFNIADGGFTGWGDSRCFLLLKGICSSSWGFSFCLRLPATFNSK

SEQ ID NO: 1030704 - protein, 770 aa, Homo sapiens
FFRVLNGYKIDHKLLLTGTPLQNNLEELFHLLNFLTPERFNNLEGFLEEFADISKEDQIKKLHDLLGPHMLRRLKADVFKNMPAKTELIVRVELSPMQKKYYKYILTRNFEALNSRGGGNQVSLLNIMMDLKKCCNHPYLFPVAAMESPKLPSGAYEGGALIKSSGKLMLLQKMLRKLKEQGHRVLIFSQMTKMLDLLEDFLDYEGYKYERIDGGITGALRQEAIDRFNAPGAQQFCFLLSTRAGGLGINLATADTVIIFDSDWNPHNDIQAFSRAHRIGQANKVMIYRFVTRASVEERITQVAKRKMMLTHLVVRPGLGSKAGSMSKQELDDILKFGTEELFKDENEGENKEEDSSVIHYDNEAIARLLDRNQDATEDTDVQNMNEYLSSFKVAQYVVREEDKIEEIEREIIKQEENVDPDYWEKLLRHHYEQQQEDLARNLGKGKRVRKQVNYNDAAQEDQDNQSEYSVGSEEEDEDFDERPEGRRQSKRQLRNEKDKPLPPLLARVGGNIEVLGFNTRQRKAFLNAVMRWGMPPQDAFTTQWLVRDLRGKTEKEFKAYVSLFMRHLCEPGADGSETFADGVPREGLSRQQVLTRIGVMSLVKKKVQEFEHINGRWSMPELMPDPSADSKRSSRASSPTKTSPTTPEASATNSPCTSKPATPAPSEKGEGIRTPLEKEEAENQEEKPEKNSRIGEKMETEADAPSPAPSLGERLEPRKIPLEDEVPGVPGEMEPEPGYRGDREKSATELTPGVGGRDTLDDIPRGQLS

SEQ ID NO: 1030705 - protein, 444 aa, Homo sapiens
FFRVLNGYKIDHKLLLTGTPLQNNLEELFHLLNFLTPERFNNLEGFLEEFADISKEDQIKKLHDLLGPHMLRRLKADVFKNMPAKTELIVRVELSPMQKKYYKYILTRNFEALNSRGGGNQVSLLNIMMDLKKCCNHPYLFPVAAMESPKLPSGAYEGGALIKSSGKLMLLQKMLRKLKEQGHRVLIFSQMTKMLDLLEDFLDYEGYKYERIDGGITGALRQEAIDRFNAPGAQQFCFLLSTRAGGLGINLATADTVIIFDSDWNPHNDIQAFSRAHRIGQANKVMIYRFVTRASVEERITQVAKRKMMLTHLVVRPGLGSKAGSMSKQELDDILKFGTEELFKDENEGENKEEDSSVIHYDNEAIARLLDRNQDATEDTDVQNMNEYLSSFKVAQYVVREEDKLCFLSWFSKIPTYLPNVPFTPASSQTSRTAATLGSAWSPY

SEQ ID NO: 1030706 - protein, 221 aa, Homo sapiens
FFRVLNGYKIDHKLLLTGTPLQNNLEELFHLLNFLTPERFNNLEGFLEEFADISKEDQIKKLHDLLGPHMLRRLKADVFKNMPAKTELIVRVELSPMQKKYYKYILTRNFEALNSRGGGNQVSLLNIMMDLKKCCNHPYLFPVAAMESPKLPSGAYEGGALIKSSGKLMLLQKMLRKLKEQGHRVLIFSQMTKMLDLLEDFLDYEGYKYERIDGGKVFAGG

SEQ ID NO: 1030707 - protein, 1121 aa, Homo sapiens
FFRVLNGYKIDHKLLLTGTPLQNNLEELFHLLNFLTPERFNNLEGFLEEFADISKEDQIKKLHDLLGPHMLRRLKADVFKNMPAKTELIVRVELSPMQKKYYKYILTRNFEALNSRGGGNQVSLLNIMMDLKKCCNHPYLFPVAAMESPKLPSGAYEGGALIKSSGKLMLLQKMLRKLKEQGHRVLIFSQMTKMLDLLEDFLDYEGYKYERIDGGITGALRQEAIDRFNAPGAQQFCFLLSTRAGGLGINLATADTVIIFDSDWNPHNDIQAFSRAHRIGQANKVMIYRFVTRASVEERITQVAKRKMMLTHLVVRPGLGSKAGSMSKQELDDILKFGTEELFKDENEGENKEEDSSVIHYDNEAIARLLDRNQDATEDTDVQNMNEYLSSFKVAQYVVREEDKIEEIEREIIKQEENVDPDYWEKLLRHHYEQQQEDLARNLGKGKRVRKQVNYNDAAQEDQDNQSEYSVGSEEEDEDFDERPEGRRQSKRQLRNEKDKPLPPLLARVGGNIEVLGFNTRQRKAFLNAVMRWGMPPQDAFTTQWLVRDLRGKTEKEFKAYVSLFMRHLCEPGADGSETFADGVPREGLSRQQVLTRIGVMSLVKKKVQEFEHINGRWSMPELMPDPSADSKRSSRASSPTKTSPTTPEASATNSPCTSKPATPAPSEKGEGIRTPLEKEEAENQEEKPEKNSRIGEKMETEADAPSPAPSLGERLEPRKIPLEDEVPGVPGEMEPEPGYRGDREKSATESTPGERGEEKPLDGQEHRERPEGETGDLGKREDVKGDRELRPGPRDEPRSNGRREEKTEKPRFMFNIADGGFTELHTLWQNEERAAISSGKLNEIWHRRHDYWLLAGIVLHGYARWQDIQNDAQFAIINEPFKTEANKGNFLEMKNKFLARRFKLLEQALVIEEQLRRAAYLNLSQEPAHPAMALHARFAEAECLAESHQHLSKESLAGNKPANAVLHKGKGRGGPRGGGPTTLLLNQLEELLSDMKADVTRLPATLSRIPPIAARLQMSERSILSRLASKGTEPHPTPAYPPGPYATPPGYGAAFSAAPVGALAAAGANYSQMPAGSFITAATNGPPVLVKKEKEMVGALVSDGLDRKEPRAGEVICIDD

SEQ ID NO: 1030708 - protein, 1144 aa, Homo sapiens
FFRVLNGYKIDHKLLLTGTPLQNNLEELFHLLNFLTPERFNNLEGFLEEFADISKEDQIKKLHDLLGPHMLRRLKADVFKNMPAKTELIVRVELSPMQKKYYKYILTRNFEALNSRGGGNQVSLLNIMMDLKKCCNHPYLFPVAAMESPKLPSGAYEGGALIKSSGKLMLLQKMLRKLKEQGHRVLIFSQMTKMLDLLEDFLDYEGYKYERIDGGITGALRQEAIDRFNAPGAQQFCFLLSTRAGGLGINLATADTVIIFDSDWNPHNDIQAFSRAHRIGQANKVMIYRFVTRASVEERITQVAKRKMMLTHLVVRPGLGSKAGSMSKQELDDILKFGTEELFKDENEGENKEEDSSVIHYDNEAIARLLDRNQDATEDTDVQNMNEYLSSFKVAQYVVREEDKIEEIEREIIKQEENVDPDYWEKLLRHHYEQQQEDLARNLGKGKRVRKQVNYNDAAQEDQDNQSEYSVGSEEEDEDFDERPEGRRQSKRQLRNEKDKPLPPLLARVGGNIEVLGFNTRQRKAFLNAVMRWGMPPQDAFTTQWLVRDLRGKTEKEFKAYVSLFMRHLCEPGADGSETFADGVPREGLSRQQVLTRIGVMSLVKKKVQEFEHINGRWSMPELMPDPSADSKRSSRASSPTKTSPTTPEASATNSPCTSKPATPAPSEKGEGIRTPLEKEEAENQEEKPEKNSRIGEKMETEADAPSPAPSLGERLEPRKIPLEDEVPGVPGEMEPEPGYRGDREKSAGGCMALGVMGIRIWDFPLLGSGDEGNILPSYPLPPPTATESTPGERGEEKPLDGQEHRERPEGETGDLGKREDVKGDRELRPGPRDEPRSNGRREEKTEKPRFMFNIADGGFTELHTLWQNEERAAISSGKLNEIWHRRHDYWLLAGIVLHGYARWQDIQNDAQFAIINEPFKTEANKGNFLEMKNKFLARRFKLLEQALVIEEQLRRAAYLNLSQEPAHPAMALHARFAEAECLAESHQHLSKESLAGNKPANAVLHKVLNQLEELLSDMKADVTRLPATLSRIPPIAARLQMSERSILSRLASKGTEPHPTPAYPPGPYATPPGYGAAFSAAPVGALAAAGANYSQMPAGSFITAATNGPPVLVKKEKEMVGALVSDGLDRKEPRAGEVICIDD

SEQ ID NO: 1030709 - protein, 1234 aa, Homo sapiens
FFRVLNGYKIDHKLLLTGTPLQNNLEELFHLLNFLTPERFNNLEGFLEEFADISKEDQIKKLHDLLGPHMLRRLKADVFKNMPAKTELIVRVELSPMQKKYYKYILTRNFEALNSRGGGNQVSLLNIMMDLKKCCNHPYLFPVAAMESPKLPSGAYEGGALIKSSGKLMLLQKMLRKLKEQGHRVLIFSQMTKMLDLLEDFLDYEGYKYERIDGGITGALRQEAIDRFNAPGAQQFCFLLSTRAGGLGINLATADTVIIFDSDWNPHNDIQAFSRAHRIGQANKVMIYRFVTRASVEERITQVAKRKMMLTHLVVRPGLGSKAGSMSKQELDDILKFGTEELFKDENEGENKEEDSSVIHYDNEAIARLLDRNQDATEDTDVQNMNEYLSSFKVAQYVVREEDKIEEIEREIIKQEENVDPDYWEKLLRHHYEQQQEDLARNLGKGKRVRKQVNYNDAAQEDQDNQSEYSVGSEEEDEDFDERPEGRRQSKRQLRNEKDKPLPPLLARVGGNIEVLGFNTRQRKAFLNAVMRWGMPPQDAFTTQWLVRDLRGKTEKEFKAYVSLFMRHLCEPGADGSETFADGVPREGLSRQQVLTRIGVMSLVKKKVQEFEHINGRWSMPELMPDPSADSKRSSRASSPTKTSPTTPEASATNSPCTSKPATPAPSEKGEGIRTPLEKEEAENQEEKPEKNSRIGEKMETEADAPSPAPSLGERLEPRKIPLEDEVPGVPGEMEPEPGYRGDREKSATESTPGERGEEKPLDGQEHRERPEGETGDLGKREDVKGDRELRPGPRDEPRSNGRREEKTEKPRFMFNIADGGFTGWGDSRCFLLLKGICSSSWGFSFCLRLPATFNFQVTSNEVCCMLTPILALNLSEVSLLTPKLALIPPLFLILTNLVRTEFVPNLTFTHSSSGALQFPFIIQFLHLYLSVGLSAVCKTLLPLLSAAFFAELHTLWQNEERAAISSGKLNEIWHRRHDYWLLAGIVLHGYARWQDIQNDAQFAIINEPFKTEANKGNFLEMKNKFLARRFKLLEQALVIEEQLRRAAYLNLSQEPAHPAMALHARFAEAECLAESHQHLSKESLAGNKPANAVLHKVLNQLEELLSDMKADVTRLPATLSRIPPIAARLQMSERSILSRLASKGTEPHPTPAYPPGPYATPPGYGAAFSAAPVGALAAAGANYSQMPAGSFITAATNGPPVLVKKEKEMVGALVSDGLDRKEPRAGEVICIDD

SEQ ID NO: 1030710 - protein, 1106 aa, Homo sapiens; identical to SEQ ID NO: 1030692

SEQ ID NO: 1030711 - protein, 740 aa, Homo sapiens
MPTGGDYLTCSNINHSHPVSISRFAQYVSEFKNTFRGNIEEIEREIIKQEENVDPDYWEKLLRHHYEQQQEDLARNLGKGKRVRKQVNYNDAAQEDQDNQSEYSVGSEEEDEDFDERPEGRRQSKRQLRNEKDKPLPPLLARVGGNIEVLGFNTRQRKAFLNAVMRWGMPPQDAFTTQWLVRDLRGKTEKEFKAYVSLFMRHLCEPGADGSETFADGVPREGLSRQQVLTRIGVMSLVKKKVQEFEHINGRWSMPELMPDPSADSKRSSRASSPTKTSPTTPEASATNSPCTSKPATPAPSEKGEGIRTPLEKEEAENQEEKPEKNSRIGEKMETEADAPSPAPSLGERLEPRKIPLEDEVPGVPGEMEPEPGYRGDREKSATESTPGERGEEKPLDGQEHRERPEGETGDLGKREDVKGDRELRPGPRDEPRSNGRREEKTEKPRFMFNIADGGFTELHTLWQNEERAAISSGKLNEIWHRRHDYWLLAGIVLHGYARWQDIQNDAQFAIINEPFKTEANKGNFLEMKNKFLARRFKLLEQALVIEEQLRRAAYLNLSQEPAHPAMALHARFAEAECLAESHQHLSKESLAGNKPANAVLHKVLNQLEELLSDMKADVTRLPATLSRIPPIAARLQMSERSILSRLASKGTEPHPTPAYPPGPYATPPGYGAAFSAAPVGALAAAGANYSQMPAGSFITAATNGPPVLVKKEKEMVGALVSDGLDRKEPRAGEVICIDD

SEQ ID NO: 1030712 - protein, 1106 aa, Homo sapiens; identical to SEQ ID NO: 1030692

SEQ ID NO: 1030713 - protein, 1106 aa, Homo sapiens; identical to SEQ ID NO: 1030692

SEQ ID NO: 1030714 - protein, 163 aa, Homo sapiens [sequence omitted]

SEQ ID NO: 1030715 - protein, 248 aa, Homo sapiens
MPLFSWLHLCISLSFSCPSFSVARAPVLNQLEELLSDMKADVTRLPATLSRIPPIAARLQMSERSILSRLASKGTEPHPTPVTLFPPSSSSLFVFLLHTYKHFHQNPIQYGKTTCQNTVITLERVSLPVYPTLSSCRSVAHNVISYSFFPLTDYELTPNFCFLLFQAYPPGPYATPPGYGAAFSAAPVGALAAAGANYSQMPAGSFITAATNGPPVLVKKEKEMVGALVSDGLDRKEPRAGEVICIDD

SEQ ID NO: 1030716 - protein, 484 aa, Homo sapiens
FFRVLNGYKIDHKLLLTGTPLQNNLEELFHLLNFLTPERFNNLEGFLEEFADISKEDQIKKLHDLLGPHMLRRLKADVFKNMPAKTELIVRVELSPMQKKYYKYILTRNFEALNSRGGGNQVSLLNIMMDLKKCCNHPYLFPVAAMESPKLPSGAYEGGALIKSSGKLMLLQKMLRKLKEQGHRVLIFSQMTKMLDLLEDFLDYEGYKYERIDGGITGALRQEAIDRFNAPGAQQFCFLLSTRAGGLGINLATADTVIIFDSDWNPHNDIQAFSRAHRIGQANKVMIYRFVTRASVEERITQVAKRKMMLTHLVVRPGLGSKAGSMSKQELDDILKFGTEELFKDENEGENKEEDSSVIHYDNEAIARLLDRNQDATEDTDVQNMNEYLSSFKVAQYVVREEDKIEEIEREIIKQEENVDPDYWEKLLRHHYEQQQEDLARNLGKGKRVRKQVNYNDAAQEDQDNQSEYSVGQNIRCILKSQLW

SEQ ID NO: 1030717 - protein, 428 aa, Homo sapiens
FFRVLNGYKIDHKLLLTGTPLQNNLEELFHLLNFLTPERFNNLEGFLEEFADISKEDQIKKLHDLLGPHMLRRLKADVFKNMPAKTELIVRVELSPMQKKYYKYILTRNFEALNSRGGGNQVSLLNIMMDLKKCCNHPYLFPVAAMESPKLPSGAYEGGALIKSSGKLMLLQKMLRKLKEQGHRVLIFSQMTKMLDLLEDFLDYEGYKYERIDGGITGALRQEAIDRFNAPGAQQFCFLLSTRAGGLGINLATADTVIIFDSDWNPHNDIQAFSRAHRIGQANKVMIYRFVTRASVEERITQVAKRKMMLTHLVVRPGLGSKAGSMSKQELDDILKFGTEELFKDENEGENKEEDSSVIHYDNEAIARLLDRNQDATEDTDVQNMNEYLSSFKVAQYVVREEDKVRGFGGQTLSIPGHLQKAVSFTQP

SEQ ID NO: 1030718 - protein, 511 aa, Homo sapiens
TRSICPGGEQPAMKSSSLPCWDLMPDISQSVLDASLLQKQIMLGFSPAPGADSSQCWSLPAIVRPEFPRQSVAVPLGNFRENGFCTRAIVLTYQEHLGVTYLTLSEDPSPRVIIHNRCPVKMLIKENIKDIPKFEVYCKKIPSECSIHHELYHQISSYPDCKTKDLLPSLLLRVEPLDEVTTEWSDAIDINSQGTQVVFLTGFGYVYVDVVHQCGTVFITVAPEGKAGPILTNTNRAPEKIVTFKMFITQLSLAVFDDLTHHKASAELLRLTLDNIFLCVAPGAGPLPGEEPVAALFELYCVEICCGDLQLDNQLYNKSNFHFAVLVCQGEKAEPIQCSKMQSLLISNKELEEYKEKCFIKLCITLNEGKSILCDINEFSFELKPARLYVEDTFVYYIKTLFDTYLPNSRLAGHSTHLSGGKQVLPMQVTQHARALGGILWKLRKLGDSQPVNLLVSIHASLKLYIASDHTPLSFSVFERGPIFTTARQLVHALAMHYAAGALFRAGKNTS

SEQ ID NO: 1030719 - protein, 250 aa, Homo sapiens
MQIFVKTLTGKTITLEVEPSDTIENVKAKIQDKEGIPPDQQRLIFAGKQLEDGRTLSDYNIQKESTLHLVLRLRGGMQIFVKTLTGKTITCLEGGAQVTHRKCEGQDPGLTEGIPPDQQRLIFAGKQLEDGRTLSDYNIQKESTLHLVLRLRGGMQIFVKSLTGETISLEVEPSDTSRKCEGQDPRYKKESAPDQQRLIWAGSAVEDGALFSDYNIQKESDLTWSALRGGCNSGSRHSKCQGWLVCYRHL

SEQ ID NO: 1030720 - protein, 147 aa, Homo sapiens
LNRFWMAVLMFLIFTLGCGMQIFVKTLTGKTITLEVEPSDTIENVKAKIQDKEGIPPDQQRLIFAGKQLEDGRTLSDYNIQKESTSAPWCSLRLRGGMQIFVKTLTGKTITLDVEPSVTTKKVKQEDRRTFLTTVSKKSPPCACSWV

SEQ ID NO: 1030721 - protein, 161 aa, Homo sapiens
MWHAYFVYTLYWSHTHSRNWSEMHSIVNVKARSYDTERYSLLSQQRLIFAGKQLEDGRTLSDYNIQKESTLHLVLRLRGGMQIFVKTLTGNTITLRSGAEMTPIENVKAKIQDKEGIPPDQQRLIFAGKQLEDGRTLSDYNIQKESTLHLVRMLRYRARVY

SEQ ID NO: 1030722 - protein, 64 aa, Homo sapiens
MNDSVPEHEYWVKAPQIVLESYRPNFLHRKNFGSHNAARHKRELPPKDTHNWGKQRAQSSPHYT

SEQ ID NO: 1030723 - protein, 96 aa, Homo sapiens
DMESQFLFVDCCDRHLTMQIFVKTLTGKTITLEVEPSDTIENVKAKIQDKEGIPPDQQRLIFAGKQLEDGRTLSDYNIQKESTSAPWCSRLQRWEC

SEQ ID NO: 1030724 - protein, 96 aa, Homo sapiens; identical to SEQ ID NO: 1030723

SEQ ID NO: 1030725 - protein, 129 aa, Homo sapiens
MSRAKIQDKEGIPPDQQRLIFAGKQLEDGRTLSDYNIQKESTLHLVLRLRGGMQIFVKTLTGKTITLEVEPSDTIENVKAKIQDKEGIPPDQQRLIFAGKQLEDGRTLSDYNIQKESTLHLVLRLRGGV

SEQ ID NO: 1030726 - protein, 159 aa, Homo sapiens
MQIFVKTLTGKTITLEVASKVEPSPVTPLRMSRAKIQDKEGIPPDQQRLIFAGKQLEDGRTLSDYNIQKESTLHLVLRLRGGMQIFVKTLTGKTITLEVEPSDTIENVKAKIQDKEGIPPDQQRLIFAGKQLEDGRTLSDYNIQKESTLHLVLRLRGGV

SEQ ID NO: 1030727 - protein, 96 aa, Homo sapiens; identical to SEQ ID NO: 1030723

SEQ ID NO: 1030728 - protein, 98 aa, Homo sapiens
LNRFWMAVLMFLIFTLGCGMQIFVKTLTGKTITLEVEPSDTIENVKAKIQDKEGIPPDQQRLIFAGKQLEDGRTLSDYNIQKESTSAPWCSRLQRWEC

SEQ ID NO: 1030729 - protein, 96 aa, Homo sapiens; identical to SEQ ID NO: 1030723

SEQ ID NO: 1030730 - protein, 129 aa, Homo sapiens; identical to SEQ ID NO: 1030725

SEQ ID NO: 1030731 - protein, 96 aa, Homo sapiens; identical to SEQ ID NO: 1030723

SEQ ID NO: 1030732 - protein, 96 aa, Homo sapiens; identical to SEQ ID NO: 1030723

SEQ ID NO: 1030733 - protein, 159 aa, Homo sapiens; identical to SEQ ID NO: 1030726

SEQ ID NO: 1030734 - protein, 374 aa, Homo sapiens
SSPVCSSPICVLISTCVLILTCGSIPTCVLIPTCVLIPTCVLIPTCVLIPTCVLRLRGGMQIFVKTLTGKTITLEVEPSDTIENVKAKIQDKEGIPPDQQRLIFAGKQLEDGRTLSDYNIQKESTSAPWCSRLQRVGVLSLRDMTPDCVRPSPLEVEPSDTIENVKAKIQDKEGIPPDQQRLIFAGKQLEDGRTLSDYNIQKESTLHLVLRLRGGMQIFVKTLTGKTITLEVASTVEPSPVTPLRMSRAKIQDKEGIPPDQQRLIFAGKQLEDGRTLSDYNIQKESTLHLVLRLRGGMQIFVKTLTGKTITLEVEPSDTIENVKAKIQDKEGIPPDQQRLIFAGKQLEDGRTLSDYNIQKESTLHLVLRLRGGV

SEQ ID NO: 1030735 - protein, 311 aa, Homo sapiens
MQIFVKTLTGKTITLEVEPSDTIENVKAKIQDKEGIPPDQQRLIFAGKQLEDGRTLSDYNIQKESTLHLVLRLRGGMQIFVKTLTGKTITLEVEPSDTIENVKAKIQDKEGIPPDQQRLIFAGKQLEDGRTLSDYNIQKESTLHLVLRLRGGMQIFVKTLTGKTITLEVASKVEPSPVTPLRMSRAKIQDKEGIPPDQQRLIFAGKQLEDGRTLSDYNIQKESTLHLVLRLRGGMQIFVKTLTGKTITLEVEPSDTIENVKAKIQDKEGIPPDQQRLIFAGKQLEDGRTLSDYNIQKESTLHLVLRLRGGV

SEQ ID NO: 1030736 - protein, 140 aa, Homo sapiens
PHLCAPAPSVCSSPPVCSSSPVCSIPTCVLIPTCVLIPTCVLIPTCVLIPTCVLRLRGGMQIFVKTLTGKTITLEVEPSDTIENVKAKIQDKEGIPPDQQRLIFAGKQLEDGRTLSDYNIQKESTSAPWCSVSEVGCKSS

SEQ ID NO: 1030737 - protein, 96 aa, Homo sapiens; identical to SEQ ID NO: 1030723

SEQ ID NO: 1030738 - protein, 96 aa, Homo sapiens; identical to SEQ ID NO: 1030723

SEQ ID NO: 1030739 - protein, 152 aa, Homo sapiens
MQIFVKTLTGKTITLEVEPSDTIENVKAKIQDKEGIPPDQQRLIFAGKQLEDGRTLSDYNIQKESTLHLVLRLRGGMQIFVKTLTGKTITEVEPSDTIENVKAKIQDKEGIPPDQQRLIFAGKQLEDGRTLSDYNIQKESTLHLVLRLRGGY

SEQ ID NO: 1030740 - protein, 152 aa, Homo sapiens; identical to SEQ ID NO: 1030739

SEQ ID NO: 1030741 - protein, 140 aa, Homo sapiens; identical to SEQ ID NO: 1030736

SEQ ID NO: 1030742 - protein, 150 aa, Homo sapiens
MQIFVKTLTGKTITLEVEPSDTIENVKAKIQDKEGIPPDQQRLIFAGKQLEDGRTLSDYNIQKESTLHLVLRLRDGMQIFVRPDRRPHLEVEPMTPRNVRPDPDKKAPPDQQRLIFAGKQLEDGRTLSDYNIQKESTLHLVLRLSLRGGC

SEQ ID NO: 1030743 - protein, 243 aa, Homo sapiens
MDASCVTTISRKSEPESGSSGLELGMQIFVKTLTGKTITLEVEPSDTIENVKAKIQDKEGIPPDQQRLIFAGKQLEDGRTLSDYNIQKESTSAPWCSLQRWDANLREDPRLVKTITLEVEPSDTIENVKAKIQDKEGIPPDQQRLIFAGKQLEDGRTLSDYNIQKESTLHLVLRLRGGMQIFVQDHVTGKTISSRRGAELTALHECPGQDPRHTERHSLLNQHYCRTRSPESHAGQMRALPVT

SEQ ID NO: 1030744 - protein, 150 aa, Homo sapiens; identical to SEQ ID NO: 1030742

SEQ ID NO: 1030745 - protein, 110 aa, Homo sapiens
  misc_feature (9)..(10): Xaa can be any naturally occurring amino acid
  misc_feature (13)..(16): Xaa can be any naturally occurring amino acid
  misc_feature (19)..(19): Xaa can be any naturally occurring amino acid
  misc_feature (21)..(21): Xaa can be any naturally occurring amino acid
  misc_feature (24)..(24): Xaa can be any naturally occurring amino acid
  misc_feature (26)..(26): Xaa can be any naturally occurring amino acid
  misc_feature (28)..(28): Xaa can be any naturally occurring amino acid
  misc_feature (32)..(32): Xaa can be any naturally occurring amino acid
  misc_feature (34)..(34): Xaa can be any naturally occurring amino acid
  misc_feature (38)..(39): Xaa can be any naturally occurring amino acid
  misc_feature (42)..(42): Xaa can be any naturally occurring amino acid
  misc_feature (48)..(48): Xaa can be any naturally occurring amino acid
  misc_feature (50)..(51): Xaa can be any naturally occurring amino acid
  misc_feature (54)..(54): Xaa can be any naturally occurring amino acid
LPYLGPLPXXNGXXXXFWXAXCRXFXNXSTSXKXFVVXXFPXRFIPFXPXXNFXGKDPETRKASLLSQAEVDLVPEKQLEGWTHPVLTTTSRKESTLHLVLLVLRLRGGV

SEQ ID NO: 1030746 - protein, 92 aa, Homo sapiens
PFRALAPIRGGMQIFVKTLTGKTITLEVEPSDTIENVKAKIQDKEGIPPDQQRLIFAGKQLEDGRTLSDYNIQKESTSAPWCSVSEVGCKSS

SEQ ID NO: 1030747 - protein, 278 aa, Homo sapiens
SSPVCSSPICVLISTCVLILTCGSIPTCVLIPTCVLIPTCVLIPTCVLIPTCVLRLRGGMQIFVKTLTGKTITLEVEPSDTIENVKAKIQDKEGIPPDQQRLIFAGKQLEDGRTLSDYNIQKESTSAPWCSRLQRVGVLSLRDMTPDCVRPSPLEVEPSDTIENVKAKIQDKEGIPPDQQRLIFAGKQLEDGRTLSDYNIQKESTLHLVLRLRGGMQIFVKTLTGKTITLEVVKPIDPLENVKCKDPRNGRLSFDQQRLIFARKATWEKGPPWLITNI

SEQ ID NO: 1030748 - protein, 123 aa, Homo sapiens
  misc_feature (3)..(3): Xaa can be any naturally occurring amino acid
  misc_feature (43)..(43): Xaa can be any naturally occurring amino acid
  misc_feature (46)..(46): Xaa can be any naturally occurring amino acid
  misc_feature (48)..(48): Xaa can be any naturally occurring amino acid
PRXMKCKPSPDKRHPSGPQGYRATAESPTLSDSPSRRVSVTWXAFXSXSSVKTLTGKTITLEVEPSDTIENVKAKIQDKEGIPPDQQRLIFAGKQLEDGRTLSDYNIQKESTLHLVLRLRGGC

SEQ ID NO: 1030749 - protein, 79 aa, Homo sapiens
PHLCAPAPSVCSSPPVCSSSPVCSIPTCVLIPTCVLIPTCVLIPTCVLIPTCVLRLRGGHTQHTDEHTAHTQTHSTHTH

SEQ ID NO: 1030750 - protein, 96 aa, Homo sapiens; identical to SEQ ID NO: 1030723

SEQ ID NO: 1030751 - protein, 130 aa, Homo sapiens
MQIFVKTLTGKTITLEVEPSDTIENVKAKIQDKEGIPPDQQRLIFAGKQLEDGRTLSDYNIQKESTLHLVLRLSLRLRGGMQIFVKTLTGKTITLDVEPSVTTKKVKQEDRRTFLTTVSKKSPPCACSWV

SEQ ID NO: 1030752 - protein, 138 aa, Homo sapiens
PHLCAPAPSVCSSPPVCSSSPVCSIPTCVLIPTCVLIPTCVLIPTCVLIPTCVLRLRGGMQIFVKTLTGKTITLEVEPSDTIENVKAKIQDKEGIPPDQQRLIFAGKQLEDGRTLSDYNIQKESTSAPWCSRLQRWEC

SEQ ID NO: 1030753 - protein, 159 aa, Homo sapiens
MQIFVKTLTGKTITLEVASTVEPSPVTPLRMSRAKIQDKEGIPPDQQRLIFAGKQLEDGRTLSDYNIQKESTLHLVLRLRGGMQIFVKTLTGKTITLEVEPSDTIENVKAKIQDKEGIPPDQQRLIFAGKQLEDGRTLSDYNIQKESTLHLVLRLRGGV

SEQ ID NO: 1030754 - protein, 159 aa, Homo sapiens
MWHAYFVYTLYWSHTHSRNWSEMHSIVNVKARSYDTERYSLLSQQRLIFAGKQLEDGRTLSDYNIQKESTLHLVLRLRGGMQIFVKTLTGKTITLEVEPSDTIENVKAKIQDKEGIPPDQQRLIFAGKQLEDGRTLSDYNIQKESTSAPWCSRLQRWEC

SEQ ID NO: 1030755 - protein, 96 aa, Homo sapiens; identical to SEQ ID NO: 1030723

SEQ ID NO: 1030756 - protein, 96 aa, Homo sapiens; identical to SEQ ID NO: 1030723

SEQ ID NO: 1030757 - protein, 159 aa, Homo sapiens; identical to SEQ ID NO: 1030753

SEQ ID NO: 1030758 - protein, 337 aa, Homo sapiens
MDASCVTTISRKSEPESGSSGLELGMQIFVKTLTGKTITLEVEPSDTIENVKAKIQDKEGIPPDQQRLIFAGKQLEDGRTLSDYNIQKESTSAPWCSLQRWDANLREDPRLVKTITLEVEPSDTIENVKAKIQDKEGIPPDQQRLIFAGKQLEDGRTLSDYNIQKESTLHLVLRLRGGMQIFVKTLTGKTITLEVASKVEPSPVTPLRMSRAKIQDKEGIPPDQQRLIFAGKQLEDGRTLSDYNIQKESTLHLVLRLRGGMQIFVKTLTGKTITLEVEPSDTIENVKAKIQDKEGIPPDQQRLIFAGKQLEDGRTLSDYNIQKESTLHLVLRLRGGV

SEQ ID NO: 1030759 - protein, 311 aa, Homo sapiens; identical to SEQ ID NO: 1030735

SEQ ID NO: 1030760 - protein, 96 aa, Homo sapiens; identical to SEQ ID NO: 1030723

SEQ ID NO: 1030761 - protein, 96 aa, Homo sapiens; identical to SEQ ID NO: 1030723

SEQ ID NO: 1030762 - protein, 234 aa, Homo sapiens
MWHAYFVYTLYWSHTHSRNWSEMHSIVNVKARSYDTERYSLLSQQRLIFAGKQLEDGRTLSDYNIQKESTLHLVLRLRGGMQIFVKTLTGNTITLRSGAEMTPIENVKAKIQDKEGIPPDQQRLIFAGKQLEDGRTLSDYNIQKESTLHLVLRLRGGMQIFVKTLTGKTITLEVEPSDTIENVKAKIQDKEGIPPDQQRLIFAGKQLEDGRTLSDYNIQKESTLHLVLRLRGGV

SEQ ID NO: 1030763 - protein, 119 aa, Homo sapiens
MQIFVKTLTGKTITLEVEPSDTIENVKAKIQDKEGIPPDQQRLIFAGKQLEDGRTLSDYNIQKESTLHLVLRLRGGMQIFVKTLTGKTITFSRWSPVTPLRMSRQRSKTRKASLLTSRG

SEQ ID NO: 1030764 - protein, 119 aa, Homo sapiens
MQIFVKTLTGKTITLEVEPSDTIENVKAKIQDKEGIPPDQQRLIFAGKQLEDGRTLSDYNIQKESTLHLVLRGGGGGGGGGGGGGGGGGAPGPALRGGMQIFVKTLTGKTITCLEGGAQ

SEQ ID NO: 1030765 - protein, 145 aa, Homo sapiens
  misc_feature (1)..(1): Xaa can be any naturally occurring amino acid
  misc_feature (3)..(3): Xaa can be any naturally occurring amino acid
  misc_feature (6)..(6): Xaa can be any naturally occurring amino acid
XFXYPXTLEVEPSDTIENVKAKIQDKEGIPPDQQRLIFAGKQLEDGRTLSDYNIQKESTLHLVLRLRGGMQIFVIDPHLLRSSSSTVEPSPVTPLRMSRAKIQDKEGMQRLIFAGKQLEDGRTLSDYNIQKESTLHLVLRLRGGV

SEQ ID NO: 1030766 - protein, 140 aa, Homo sapiens
PHLCAPAPSVCSSPPVCSSSPVCSIPTCVLIPTCVLIPTCVLIPTCVLIPTCVLRLRGGMQIFVKTLTGKTITLEVEPSDTIENVKAKIQDKEGIPPDQQRLIFAGTSRGSSLQASSWKMAALFLTTTSRKSRPCTWSCV

SEQ ID NO: 1030767 - protein, 184 aa, Homo sapiens
MSGARAAPGAAGNGAVRGLRVDGLPPLPKSLSGLLHSASGGGASGGWRHLERLYAQKSRIQDELSRGGPGGGGARAAALPAKPPNLDAALALLRKEMVGLRQLDMSLLCQLYSLYESIQEYKGACQAASSPDCTYALENGFFDEEEEYFQEQNSLHDRRDRGPPRDLSLPVSSLSSSDWILESI

SEQ ID NO: 1030768 - protein, 128 aa, Homo sapiens
LNHAPCGRNVLAGADRRLSVPLKLNSSADFSFFTSPPPSLKVGLRQLDMSLLCQLYSLYESIQEYKGACQAASSPDCTYALENGFFDEEEEYFQEQNSLHDRRDRGPPRDLSLPVSSLSSSDWILESI

SEQ ID NO: 1030769 - protein, 196 aa, Homo sapiens
AAVAGAWPGRGAMSGARAAPGAAGNGAVRGLRVDGLPPLPKSLSGLLHSASGGGASGGWRHLERLYAQKSRIQDELSRGGPGGGGARAAALPAKPPNLDAALALLRKEMVGLRQLDMSLLCQLYSLYESIQEYKGACQAASSPDCTYALENGFFDEEEEYFQEQNSLHDRRDRGPPRDLSLPVSSLSSSDWILESI

SEQ ID NO: 1030770 - protein, 192 aa, Homo sapiens
ASYASDSGLEGGHAKVSLQPQDVPLTTLLEPDSFAIEVGGHISRRQKLPWSDREGPVRRGLSRRLTWSIYVRVYLYPMRRMQGEPVVHVKISTAYRGPRGKGMVKLLGSPSYWTRCHHLLLLLQESTSVVDGPRAQGMSATSFICRQGVLRGCMVAVCFDGSSFCLGDLEVLSSILHTYLLRCTCWGFIMRI

SEQ ID NO: 1030771 - protein, 209 aa, Homo sapiens
MFTVFEVSKVGLAFLLTAAGTAGQGRAEASAPGARSDLPGSGAPSRPRGEWEAAGGGLDSALGEGRGSWDQSQASCPDVLPVVSQSLGTPTPCNGCFVGSEAGPPPGQGRDRRRQGAEERWQVGLRQLDMSLLCQLYSLYESIQEYKGACQAASSPDCTYALENGFFDEEEEYFQEQNSLHDRRDRGPPRDLSLPVSSLSSSDWILESI

SEQ ID NO: 1030772 - protein, 196 aa, Homo sapiens; identical to SEQ ID NO: 1030769

SEQ ID NO: 1030773 - protein, 178 aa, Homo sapiens
PWKLLIVLEFKVENKGPQIAGFEHSMFFLNEPVCIFKTCAFKRELYFLNPAVNVETSRPPRACENTPLRSRLLLLGEWLARRLPSHSFSGRVGLRQLDMSLLCQLYSLYESIQEYKGACQAASSPDCTYALENGFFDEEEEYFQEQNSLHDRRDRGPPRDLSLPVSSLSSSDWILESI

SEQ ID NO: 1030774 - protein, 1005 aa, Homo sapiens
MPLLGAGGQWWPQGDWEPPACPLLPSLGFGSGISQERGLLPRVPQHIWAESGFQALSHTSSFLHDTRDFCLSRPHLTATQSKRCWSQIAPGLCTHCKERTAGCCPHSDPDNRKCSPCLGELRAIPVGGPHTTLLPLHSFSSGELLAGGSEEWVIVGLCFLSMWGSASWGPTLQETPFWGKKIEPQELSGFLEGFLEEGELEQARTLPGFPCCMQPHWPWWQTLPGHGTLPPNISLAQRSDPGSQGHTAILGKAGLVLGMALLTLGLSHPNLALWRSRSEGPITCATQGQLCDSLGADGCSLYLGPLNRPQHTGQVLGSKTPPATTWDFLCEGHWWSLRNRPGQTGSGSESLTLGRRGLQCRPGGWVCVSVCVCVCVCVRARARRYSRVSAARPGWPAGLSFPRSAPRPGPPPPCRCSALQEQKGELRKRLSYTTHKLEKLETEFDSTRHYLEIELRRAQEELEKVTEKLRRIQSNYMALQRINQELEDKLYRMGQHYEEEKRALSHEIVALNSHLLEAKVTIDKLSEDNELYRKDCNLAAQLLQCSQTYGRVHKVSELPSDFQERVSLHMEKHGCSLPSPLCHPAYADSVPTCVIAKVLEKPDPASLSSRLSDASARDLAFCDGVEKPGPRPPYKGDIYCSDTALYCPEERRRDRRPSVDAPVTDVGFLRAQNSTDSAAEEEEEAEAAAFPAGFQHEAFPSYAGSLPTSSSYSSFSATSEEKEHAQASTLTASQQAIYLNSRDELFDRKPPATTYEGSPRFAKATAAVAAPLEAEVAPGFGRTMSPYPAETFRFPASPGPQQALMPPNLWSLRAKPGTARLPGEDMRGQWRPLSVEDIGAYSYPVSAAGRASPCSFSERYYGGAGGSPGKKADGRASPLYASYKADSFSEGDDLSQGHLAEPCFLRAGGDLSLSPGRSADPLPGYAPSEGGDGDRLGVQLCGTASSPEPEQGSRDSLEPSSMEASPEMHPAARLSPQQAFPRTGGSGLSRKDSLTKAQLYGTLLN

SEQ ID NO: 1030775 - protein, 529 aa, Homo sapiens
MALQRINQELEDKLYRMGQHYEEEKRALSHEIVALNSHLLEAKVTIDKLSEDNELYRKDCNLAAQLLQCSQTYGRVHKVSELPSDFQERVSLHMEKHGCSLPSPLCHPAYADSVPTCVIAKVLEKPDPASLSSRLSDASARDLAFCDGVEKPGPRPPYKGDIYCSDTALYCPEERRRDRRPSVDAPVTDVGFLRAQNSTDSAAEEEEEAEAAAFPAGFQHEAFPSYAGSLPTSSSYSSFSATSEEKEHAQASTLTASQQAIYLNSRDELFDRKPPATTYEGSPRFAKATAAVAAPLEAEVAPGFGRTMSPYPAETFRFPASPGPQQALMPPNLWSLRAKPGTARLPGEDMRGQWRPLSVEDIGAYSYPVSAAGRASPCSFSERYYGGAGGSPGKKADGRASPLYASYKADSFSEGDDLSQGHLAEPCFLRAGGDLSLSPGRSADPLPGYAPSEGGDGDRLGVQLCGTASSPEPEQGSRDSLEPSSMEASPEMHPAARLSPQQAFPRTGGSGLSRKDSLTKAQLYGTLLN

SEQ ID NO: 1030776 - protein, 593 aa, Homo sapiens
MEKLSALQEQKGELRKRLSYTTHKLEKLETEFDSTRHYLEIELRRAQEELEKVTEKLRRIQSNYMALQRINQELEDKLYRMGQHYEEEKRALSHEIVALNSHLLEAKVTIDKLSEDNELYRKDCNLAAQLLQCSQTYGRVHKVSELPSDFQERVSLHMEKHGCSLPSPLCHPAYADSVPTCVIAKVLEKPDPASLSSRLSDASARDLAFCDGVEKPGPRPPYKGDIYCSDTALYCPEERRRDRRPSVDAPVTDVGFLRAQNSTDSAAEEEEEAEAAAFPAGFQHEAFPSYAGSLPTSSSYSSFSATSEEKEHAQASTLTASQQAIYLNSRDELFDRKPPATTYEGSPRFAKATAAVAAPLEAEVAPGFGRTMSPYPAETFRFPASPGPQQALMPPNLWSLRAKPGTARLPGEDMRGQWRPLSVEDIGAYSYPVSAAGRASPCSFSERYYGGAGGSPGKKADGRASPLYASYKADSFSEGDDLSQGHLAEPCFLRAGGDLSLSPGRSADPLPGYAPSEGGDGDRLGVQLCGTASSPEPEQGSRDSLEPSSMEASPEMHPAARLSPQQAFPRTGGSGLSRKDSLTKAQLYGTLLN

SEQ ID NO: 1030777 - protein, 642 aa, Homo sapiens
GGAGLPTDGAPRGCPAVPAVPGSARRGRGAHASCLLTLSFGFSQASAADMEKLSALQEQKGELRKRLSYTTHKLEKLETEFDSTRHYLEIELRRAQEELEKVTEKLRRIQSNYMALQRINQELEDKLYRMGQHYEEEKRALSHEIVALNSHLLEAKVTIDKLSEDNELYRKDCNLAAQLLQCSQTYGRVHKVSELPSDFQERVSLHMEKHGCSLPSPLCHPAYADSVPTCVIAKVLEKPDPASLSSRLSDASARDLAFCDGVEKPGPRPPYKGDIYCSDTALYCPEERRRDRRPSVDAPVTDVGFLRAQNSTDSAAEEEEEAEAAAFPAGFQHEAFPSYAGSLPTSSSYSSFSATSEEKEHAQASTLTASQQAIYLNSRDELFDRKPPATTYEGSPRFAKATAAVAAPLEAEVAPGFGRTMSPYPAETFRFPASPGPQQALMPPNLWSLRAKPGTARLPGEDMRGQWRPLSVEDIGAYSYPVSAAGRASPCSFSERYYGGAGGSPGKKADGRASPLYASYKADSFSEGDDLSQGHLAEPCFLRAGGDLSLSPGRSADPLPGYAPSEGGDGDRLGVQLCGTASSPEPEQGSRDSLEPSSMEASPEMHPAARLSPQQAFPRTGGSGLSRKDSLTKAQLYGTLLN

SEQ ID NO: 1030778 - protein, 593 aa, Homo sapiens; identical to SEQ ID NO: 1030776

SEQ ID NO: 1030779 - protein, 261 aa, Homo sapiens
MESGEEYPVLSTQHQHVVDRMTVNICKMIRWFPRERRDNSKQGEGASSVTRSSLRLAFASLYVLRVRLLHYMSEVMLVARTLKGEKWIRETLYEMAAVSYMKLCDSFRKRPEEQIAGGSFQAKDCECEWCTLPLAKKKIRMSLTFRRPKTLRLRRQPRYPRKSTPRRNKLGHYAIIKFPLTTESAVKKIEENNTLVFTVDVKANKHQIRQAVKKLYDSDVAKVTTLICPDKENKAYVRLAPDYDAFDVVTKLGSPKLSPAG

SEQ ID NO: 1030780 - protein, 121 aa, Homo sapiens [sequence omitted]

SEQ ID NO: 1030781 - protein, 204 aa, Homo sapiens
MLEMLEYNHYQVQTHLENPTKYHIQQAQRQQVKQYLSTTLANKHANQVLSLPCPNQPGDHVMPPVPGSSAPNSPMAMLTLNSNCEKEGFYKFEEQNRAESECPGMNTHSRASCMQMDDVIDDIISLESSYNEEILGLMDPALQMANTLPVSGNLIDLYGNQGLPPPGLTISNSCPANLPNIKRELTESEARALAKRGRTRTITT

SEQ ID NO: 1030782 - protein, 91 aa, Homo sapiens
MLEMLEYNHYQVQTHLENPTKYHIQQAQRQQVKQYLSTTLANKHANQVLSLPCPNQPGDHVMPPVPGSSAPNSPMAMLTLNSNCEKEFMKQ

SEQ ID NO: 1030783 - protein, 91 aa, Homo sapiens; identical to SEQ ID NO: 1030782

SEQ ID NO: 1030784 - protein, 127 aa, Homo sapiens
MDVFKKGFSIAKEGVVDAVEKTKQGVTEAAEKTKEGVMYVGAKTKENVVQSVTSVAEKTKEQANAVSEAVVSSVNTVATKTVEEAENIAVTSGVVRKEDLRPSAPQQEGEASKEKEEVAEEAQSGGD

SEQ ID NO: 1030785 - protein, 128 aa, Homo sapiens
TGTARNFGMGRRALQAWGFQAWDTWAFLGQESTQVNLQLRSQMRPIPGRSALRVEALIGVNRRHRGQPLRQHSSQLKPAARREIQLRPACSSTTLHTHHGCLQEGLLHRQGGRGGCGGKDQAGGDGSS

SEQ ID NO: 1030786 - protein, 346 aa, Homo sapiens
TGTARNFGMGRRALQAWGFQAWDTWAFLGQESTQVNLQLRSQMRPIPGRSALRVEALIGVKGGIGDSRCGSTRASSSPQLAGRSSSVLPAAAQPCTPTMDVFKKGFSIAKEGVVGAVEKTKQGVTEAAEKTKEGVMYVGAKTKENVVQSVTSGEKPQGQGTHGGEDPWGSCILVLGLKPRVLPYPQLGSQALQTPADHKAKLGWASPYPQQHQRCPGVRGSRGGSQQGQALSSWEGAASLTQQACLGAGAGVEASQCPPIVAEKTKEQANAVSEAVVSSVNTVATKTVEEAENIAVTSGVVRKVSPGPHPAQFLSLGPERLVGGGGITPIQTPGNNTGGCGWLQIQ

SEQ ID NO: 1030787 - protein, 205 aa, Homo sapiens
MARNFGMGRRALQAWGFQAWDTWAFLGQESTQVNLQLRSQMRPIPGRSALRVEALIGVKGGIGDSRCGSTRASSSPQLAGRSSSVLPAAAQPCTPTMDVFKKGFSIAKEGVVGAVVYVGAKTKENVVQSVTSVAEKTKEQANAVSEAVVSSVNTVATKTVEEAENIAVTSGVVRKEDLRPSAPQQEGEASKEKEEVAEEAQSGGD

SEQ ID NO: 1030788 - protein, 127 aa, Homo sapiens; identical to SEQ ID NO: 1030784

SEQ ID NO: 1030789 - protein, 222 aa, Homo sapiens
MARNFGMGRRALQAWGFQAWDTWAFLGQESTQVNLQLRSQMRPIPGRSALRVEALIGVKGGIGDSRCGSTRASSSPQLAGRSSSVLPAAAQPCTPTMDVFKKGFSIAKEGVVGAVEKTKQGVTEAAEKTKEGVMYVGAKTKENVVQSVTSGLPWGWGWGGGQPVSSHSGREDQGAGQRRERGCGEQRQHCGHQDRGGGGEHRGHLRGGAQGGLEAICPPTGG

SEQ ID NO: 1030790 - protein, 222 aa, Homo sapiens; identical to SEQ ID NO: 1030789

SEQ ID NO: 1030791 - protein, 128 aa, Homo sapiens; identical to SEQ ID NO: 1030785

SEQ ID NO: 1030792 - protein, 123 aa, Homo sapiens
MPYPPTDPTVVQLSVVFVLTAPTTRGRSGLQLHLYVGAKTKENVVQSVTSVAEKTKEQANAVSEAVVSSVNTVATKTVEEAENIAVTSGVVRKEDLRPSAPQQEGEASKEKEEVAEEAQSGGD

SEQ ID NO: 1030793 - protein, 127 aa, Homo sapiens; identical to SEQ ID NO: 1030784

SEQ ID NO: 1030794 - protein, 127 aa, Homo sapiens; identical to SEQ ID NO: 1030784

SEQ ID NO: 1030795 - protein, 217 aa, Homo sapiens
MSSKVSRDTLYEAVREVLHGNQRKRRKFLETVELQISLKNYDPQKDKRFSGTVRLKSTPRPKFSVCVLGDQQHCDEAKAVDIPHMDIEALKKLNKNKKLVKKLAKKYDAFLASESLIKQIPRILGPGLNKAGKFPSLLTHNENMVAKVDEVKSTIKFQMKKVLCLAVAVGHVKMTDDELVYNIHLAVNFLVSLLKKNWQNVRALYIKSTMGKPQRLY

SEQ ID NO: 1030796 - protein, 351 aa, Homo sapiens
  misc_feature (178)..(178): Xaa can be any naturally occurring amino acid
MSSKVSRDTLYEAVREVLHGNQRKRRKFLETVELQISLKNYDPQKDKRFSGTVRLDRSDPSQASGPPGLPLPVTGSRLSREAGHSRVQRLLGARFRPICIRSRARRGRIPYPVFLKHEGRRGIGLWPEHRTASLEKPGMDAGRIVNASRCKATVGYAERSHDHFTGPLRTQVLGRNLXECCPTEKTQALKSTPRPKFSVCVLGDQQHCDEAKAVDIPHMDIEALKKLNKNKKLVKKLAKKYDAFLASESLIKQIPRILGPGLNKAGKFPSLLTHNENMVAKVDEVKSTIKFQMKKVLCLAVAVGHVKMTDDELVYNIHLAVNFLVSLLKKNWQNVRALYIKSTMGKPQRLY

SEQ ID NO: 1030797 - protein, 213 aa, Homo sapiens
  misc_feature (40)..(40): Xaa can be any naturally occurring amino acid
MDAGRIVNASRCKATVGKHSGPMTTFTGPLRTQVLGRNLXECCPTEKTQALKSTPRPKFSVCVLGDQQHCDEAKAVDIPHMDIEALKKLNKNKKLVKKLAKKYDAFLASESLIKQIPRILGPGLNKAGKFPSLLTHNENMVAKVDEVKSTIKFQMKKVLCLAVAVGHVKMTDDELVYNIHLAVNFLVSLLKKNWQNVRALYIKSTMGKPQRLY

SEQ ID NO: 1030798 - protein, 231 aa, Homo sapiens
MSSKVSRDTLYEAVREVLHGNQRKRRKFLETVELQISLKNYDPQKDKRFSGTVRWLNVTLLRSLMFSCVVSVGGHMHAHDDCWLEARAIFLASVDIRMASELKPQQEFTNKKLVKKLAKKYDAFLASESLIKQIPRILGPGLNKAGKFPSLLTHNENMVAKVDEVKSTIKFQMKKVLCLAVAVGHVKMTDDELVYNIHLAVNFLVSLLKKNWQNVRALYIKSTMGKPQRLY

SEQ ID NO: 1030799 - protein, 217 aa, Homo sapiens; identical to SEQ ID NO: 1030795

SEQ ID NO: 1030800 - protein, 228 aa, Homo sapiens
MSSKVSRDTLYEAVREVLHGNQRKRRKFLETVELQISLKNYDPQKDKRFSGTVRLKSTPRPKFSVCVLGDQQHCDEAKAVDIPHMDIEALKKLNKNKKLVKKLAKKYDAFLASESLIKQIPRILGPGLNKAGKFPSLLTHNENMVAKVDEVKSTIKFQMKKVLCLAVAVGHVKMTDDELVYNIHLAVNFLVSLLKKNWQNVRALYIKSTMGKPQRSVLGCSNKPHCCH

SEQ ID NO: 1030801 - protein, 227 aa, Homo sapiens
MSSKVSRDTLYEAVREVLHGNQRKRRKFLETVELQISLKNYDPQKDKRFSGTVRLKSTPRPKFSVCVLGDQQHCDEAKAVDIPHMDIEALKKLNKDIEALKNLTKNKKLVKKLAKKYDAFLASESLIKQIPRILGPGLNKAGKFPSLLTHNENMVAKVDEVKSTIKFQMKKVLCLAVAVGHVKMTDDELVYNIHLAVNFLVSLLKKNWQNVRALYIKSTMGKPQRLY

SEQ ID NO: 1030802 - protein, 75 aa, Homo sapiens
  misc_feature (75)..(75): Xaa can be any naturally occurring amino acid
MVAAKKTKKSLESINSRLPLVMKSGKYVLGYQQTLKMIRPGQAKLVILANNCPALRKSEIEYYAIMALSRDPLTX

SEQ ID NO: 1030803 - protein, 86 aa, Homo sapiens
MVAAKKTKKSLESINSRLPLVMKSGKYVLGYQQTLKMIRPGQAKLVILANNCPALRKSEIEYYAIETSKTRAIETSKTSAIETSKT

SEQ ID NO: 1030804 - protein, 128 aa, Homo sapiens
MVAAKKTKKSLESINSRLPLVMKSGKYVLGYQQTLKMIRPGQAKLVILANNCPALRKSEIEYYAMLAKTGVHHYSGIILTGHSMRKILQSVTLAIIDPGDSDIIRSMPEQAGGKDRTFSSYNNFTWKP

SEQ ID NO: 1030805 - protein, 52 aa, Homo sapiens
MVAAKKTKKSLESINSRLPLVMKSGKYVPGVKTRLFKSYSNKAKPKFGAYSL

SEQ ID NO: 1030806 - protein, 77 aa, Homo sapiens
MVAAKKTKKSLESINSRLPLVMKSGKYVLGYQQTLKMIRPGQAKLVILANNCPALRKSEIEYYAMLAYRGYKLELYT

SEQ ID NO: 1030807 - protein, 145 aa, Homo sapiens
MSLYRNSVYHSDVTMVELAGVRRPSNGQWGWTQGRWPKKSAEFLLHMLKNAESNAELKGLDVDSLVIEHIQVNKAPKMRRRTYRAHGRINPYMSSPCHIEMILTEKEQIVPKPEEEVAQKKKISQKKLKKQKLMARELNSGHSTH

SEQ ID NO: 1030808 - protein, 349 aa, Homo sapiens
MSLYRNSVYHSDVTMVELAGVRRPSNGQWGWTQGRWPKKSAEFLLHMLKNAESNAELKGLDVDSLVIEHIQVNKAPKMRRRTYRAHGRINPYMSSPCHIEMILTEKEQIVPKPEEEVAQKKKISQKKLKKQKLMARELNSGHSTHKCTTLDTHTHTYTTTPPPTGGGERTNRRITPKREATPTMISDVHTPTRLPGFKQRVGPPNKRAEQQHTLTTAKSRGGTSVMLITNHAASRSTRQNKPEVNQHDGHTLLSRNTHHPTHQGAGQHPHTAGDHKKPPPNSNDTNDDAPKETTPTTTIHRDHQQASPNTPSGPINHDGAPRQPRCATSRIKPACTNSTYTPTRAAPSE

SEQ ID NO: 1030809 - protein, 127 aa, Homo sapiens
MSLYRNSVYHSDVTMVELAGVRRPSNGQWGWTQGRWPKKSAEFLLHMLKNAESNAELKGLDVDSLVIEHIQVNKAPKMRRRTYRAHGRINPYMSSPCHIEMILTEKEQIVPKPEEEVAQKKKISQKN

SEQ ID NO: 1030810 - protein, 117 aa, Homo sapiens
AAATTTTSLLLLNSRPLTKNAESNAELKGLDVDSLVIEHIQVNKAPKMRRRTYRAHGRINPYMSSPCHIEMILTEKEQIVPKPEEEVAQKKKISQKKLKKQKLMARELNSGHSTHKC

SEQ ID NO: 1030811 - protein, 145 aa, Homo sapiens; identical to SEQ ID NO: 1030807

SEQ ID NO: 1030812 - protein, 145 aa, Homo sapiens; identical to SEQ ID NO: 1030807

SEQ ID NO: 1030813 - protein, 145 aa, Homo sapiens; identical to SEQ ID NO: 1030807

SEQ ID NO: 1030814 - protein, 145 aa, Homo sapiens; identical to SEQ ID NO: 1030807

SEQ ID NO: 1030815 - protein, 145 aa, Homo sapiens; identical to SEQ ID NO: 1030807

SEQ ID NO: 1030816 - protein, 145 aa, Homo sapiens; identical to SEQ ID NO: 1030807

SEQ ID NO: 1030817 - protein, 145 aa, Homo sapiens; identical to SEQ ID NO: 1030807

SEQ ID NO: 1030818 - protein, 145 aa, Homo sapiens; identical to SEQ ID NO: 1030807

SEQ ID NO: 1030819 - protein, 148 aa, Homo sapiens
MSLYRNSVYHSDVTMVELAGVRRPSNGQWGWTQGRWPKKSAEFLLHMLKNAESNAELKGLDVDSLVIEHIQVNKAPKMRRRTYRAHGRINPYMSSPCHIEMILTEKEQIVPKPEEEVAQKKKISQKKLKKQKLMARELNSGHSTHLRV

SEQ ID NO: 1030820 - protein, 161 aa, Homo sapiens
MSLYRNSVYHSDVTMVELAGVRRPSNGQWGWTQGRWPKKSAEFLLHMLKNAESNAELKGLDVDSLVIEHIQVNKAPKMRRRTYRAHGRINPYMSSPCHIEMILTEKEQIVPKPEEEVAQKKKISQKKLKKQKLMARELNSGHSTHKCRAAEFQHNKDEHII

SEQ ID NO: 1030821 - protein, 197 aa, Homo sapiens
MSLYRNSVYHSDVTMVELAGVRRPSNGQWGWTQGRWPKKSAEFLLHMLKNAESNAELKGLDVDSLVIEHIQVNKAPKMRRRTYRAHGRINPYMSSPCHIEMILTEKEQIVPKPEEEVAQKKKISQKKLKKQKLMARELNSGHSTHKINVINRKKKHTKQKTKTKNTTKKKKNKHRARLIWGGGKKGKQKGGGGKRGY

SEQ ID NO: 1030822 - protein, 145 aa, Homo sapiens; identical to SEQ ID NO: 1030807

SEQ ID NO: 1030823 - protein, 137 aa, Homo sapiens
MSLYRNSVYHSDVTMVELAGVRRPSNGQWGWTQGRWPKKSAEFLLHMLKNAESNAELKGLDVDSLVIEHIQVNKAPKMRRRTYRAHGRINPYMSSPCHIEMILTEKEQIVPKPEEEVAQKKKISQKKLKKQKLMARE

SEQ ID NO: 1030824 - protein, 197 aa, Homo sapiens; identical to SEQ ID NO: 1030821

SEQ ID NO: 1030825 - protein, 205 aa, Homo sapiens
MVRYSLDPENPTKSCKSRGSNLRVHFKNTRETAQAIKGMHIRKATKYLKDVTLQKQCVPFRRYNGGVGRCAQAKQWAMGLDRCAQAKQWGWTQGRWPKKSAEFLLHMLKNAESNAELKGLDVDSLVIEHIQVNKAPKMRRRTYRAHGRINPYMSSPCHIEMILTEKEQIVPKPEEEVAQKKKISQKKLKKQKLMARELNSGHSTH

SEQ ID NO: 1030826 - protein, 137 aa, Homo sapiens; identical to SEQ ID NO: 1030823

SEQ ID NO: 1030827 - protein, 123 aa, Homo sapiens
MSLYRNSVYHSDVTMVELAGVRRPSNGQWGWTQGRWPKKSAEFLLHMLKNAESNAELKGLDVDSLVIEHIQVNKAPKMRRRSSSEQFHLGAYVELLRPKWNCSAGEEKRTKTSKALLYFLKVL

SEQ ID NO: 1030828 - protein, 137 aa, Homo sapiens; identical to SEQ ID NO: 1030823

SEQ ID NO: 1030829 - protein, 81 aa, Homo sapiens
  misc_feature (12)..(12): Xaa can be any naturally occurring amino acid
YYYYYYYISGRXSIQVNKAPEMRRRTYRAHGRINPYMSSPCHIEMILTEKEQIVPKPEEEVAQKKKISQKKLKKQKLMARE

SEQ ID NO: 1030830 - protein, 145 aa, Homo sapiens; identical to SEQ ID NO: 1030807

SEQ ID NO: 1030831 - protein, 145 aa, Homo sapiens; identical to SEQ ID NO: 1030807

SEQ ID NO: 1030832 - protein, 147 aa, Homo sapiens
MSLYRNSVYHSDVTMVELAGVRRPSNGQWGWTQGRWPKKSAEFLLHMLKNAESNAELKGLDVDSLVIEHIQVNKAPKMRRRTYRAHGRINPYMSSPCHIEMILTEKEQIVPKPEEEVAQKKKISQKKLKKQKLMARELNSGHSTHKC

SEQ ID NO: 1030833 - protein, 145 aa, Homo sapiens; identical to SEQ ID NO: 1030807

SEQ ID NO: 1030834 - protein, 145 aa, Homo sapiens; identical to SEQ ID NO: 1030807

SEQ ID NO: 1030835 - protein, 145 aa, Homo sapiens; identical to SEQ ID NO: 1030807

SEQ ID NO: 1030836 - protein, 145 aa, Homo sapiens; identical to SEQ ID NO: 1030807

SEQ ID NO: 1030837 - protein, 145 aa, Homo sapiens; identical to SEQ ID NO: 1030807

SEQ ID NO: 1030838 - protein, 145 aa, Homo sapiens; identical to SEQ ID NO: 1030807

SEQ ID NO: 1030839 - protein, 348 aa, Homo sapiens
MSLYRNSVYHSDVTMVELAGVRRPSNGQWGWTQGRWPKKSAEFLLHMLKNAESNAELKGLDVDSLVIEHIQVNKAPKMRRRTYRAHGRINPYMSSPCHIEMILTEKEQIVPKPEEEVAQKKKISQKKLKKQKLMARELNSGHSTHKCTTLDTHTHPYTTTPPPTGGGERTNRRITPKREATPTMISTSTPQRVFLDSNKGWGPTNKRAEQQHTLTTAKSRGGTSVMLITNHAASRSTRQNKPGEPTRRTHPVEQKHTPPNTPGGGAAPTHGGRPQETTAEQQRYYRRRTKGDHTNNNHPPRPPTGEPKHTQRTHQSRRRPKTAAVRHKPNQASMHKQHIHPNKSRALR

SEQ ID NO: 1030840 - protein, 147 aa, Homo sapiens; identical to SEQ ID NO: 1030832

SEQ ID NO: 1030841 - protein, 152 aa, Homo sapiens
MSLYRNSVYHSDVTMVELAGVRRPSNGQWGWTQGRWPKKSAEFLLHMLKNAESNAELKGLDVDSLVIEHIQVNKAPKMRRRTYRAHGRINPYMSSPCHIEMILTEKEQIVPKPEEEVAQKKKISQKKLKKQKLMARELNSGHSTHKKKKKKK

SEQ ID NO: 1030842 - protein, 127 aa, Homo sapiens; identical to SEQ ID NO: 1030809

SEQ ID NO: 1030843 - protein, 105 aa, Homo sapiens
MSLYRNSVYHSDVTMVELAGVRRPSNGQWGWTQGRWPKKSAEFLLHMLKNAESNAELKGLDVDSLVIEHIQVNKAPKMRRRTYRAHGRINPYMSSPCHIEMILLV

SEQ ID NO: 1030844 - protein, 137 aa, Homo sapiens; identical to SEQ ID NO: 1030823

SEQ ID NO: 1030845 - protein, 137 aa, Homo sapiens; identical to SEQ ID NO: 1030823

SEQ ID NO: 1030846 - protein, 112 aa, Homo sapiens
MSLYRNSVYHSDVTMVELAGVRRPSNGQWGWTQGRWPKKSAEFLLHMLTRPFLCAPSLSVLRLGCMSVLFAHTLSAPPPPHLLPSPPPRPPASRHRTAARSTASRVPSRPPS

SEQ ID NO: 1030847 - protein, 145 aa, Homo sapiens; identical to SEQ ID NO: 1030807

SEQ ID NO: 1030848 - protein, 145 aa, Homo sapiens; identical to SEQ ID NO: 1030807

SEQ ID NO: 1030849 - protein, 999 aa, Homo sapiens
MGWKPSEARGQSQSFQASGLQPRSLKAARRATGRPDRSRAAPPNMDPDPQAGVQVGMRVVRGVDWKWGQQDGGEGGVGTVVELGRHGSPSTPDRTVVVQWDQGTRTNYRAGYQGAHDLLLYDNAQIGVRHPNIICDCCKKHGLRGMRWKCRVCLDYDLCTQCYMHNKHELAHAFDRYETAHSRPVTLSPRQGLPRIPLRGIFQGAKVVRGPDWEWGSQDGGEGKPGRVVDIRGWDVETGRSVASVTWADGTTNVYRVGHKGKVDLKCVGEAAGGFYYKDHLPRLGKPAELQRRVSADSQPFQHGDKVKCLLDTDVLREMQEGHGGWNPRMAEFIGQTGTVHRITDRGDVRVQFNHETRWTFHPGALTKHHSFWVGDVVRVIGDLDTVKRLQAGHGEWTDDMAPALGRVGKVVKVFGDGNLRVAVAGQRWTFSPSCLVAYRPEEDANLDVAERARENKSSLSVALDKLRAQKSDPEHPGRLVVEVALGNAARALDLLRRRPEQVDTKNQGRTALQVAAYLGQVELIRLLLQARAGVDLPDDEGNTALHYAALGNQPEATRVLLSAGCRADAINSTQSTALHVAVQRGFLEVVRALCERGCDVNLPDAHSDTPLHSAISAGTGASGIVEVLTEVPNIDVTATNSQVSPCCTMPPSRVTLLAVRKILARARQLVDAKKEDGFTALHLAALNNHREVAQILIREGRCDVNVRNRKLQSPLHLAVQQAHVGLVPLLVDAGCSVNAEDEEGDTALHVALQRHQLLPLVADGAGGDPGPLQLLSRLQASGLPGSAELTVGAAVACFLALEGADVSYTNHRGRSPLDLAAEGRVLKALQGCAQRFRERQAGGGAAPGPRQTLGTPNTVTNLHVGAAPGPEAAECLVCSELALLVLFSPCQHRTVCEECARRMKKCIRCQVVVSKKLRPDGSEVASAAPAPGPPRQLVEELQSRYRQMEERITCPICIDSHIRLVFQCGHGACAPCGSALSACPICRQPIRDRIQIFV

SEQ ID NO: 1030850 - protein, 1013 aa, Homo sapiens
MGWKPSEARGQSQSFQASGLQPRSLKAARRATGRPDRSRAARPTTDPSAHRSRAAPPNMDPDPQAGVQVGMRVVRGVDWKWGQQDGGEGGVGTVVELGRHGSPSTPDRTVVVQWDQGTRTNYRAGYQGAHDLLLYDNAQIGVRHPNIICDCCKKHGLRGMRWKCRVCLDYDLCTQCYMHNKHELAHAFDRYETAHSRPVTLSPRQGLPRIPLRGIFQGAKVVRGPDWEWGSQDGGEGKPGRVVDIRGWDVETGRSVASVTWADGTTNVYRVGHKGKVDLKCVGEAAGGFYYKDHLPRLGKPAELQRRVSADSQPFQHGDKVKCLLDTDVLREMQEGHGGWNPRMAEFIGQTGTVHRITDRGDVRVQFNHETRWTFHPGALTKHHSFWVGDVVRVIGDLDTVKRLQAGHGEWTDDMAPALGRVGKVVKVFGDGNLRVAVAGQRWTFSPSCLVAYRPEEDANLDVAERARENKSSLSVALDKLRAQKSDPEHPGRLVVEVALGNAARALDLLRRRPEQVDTKNQGRTALQVAAYLGQVELIRLLLQARAGVDLPDDEGNTALHYAALGNQPEATRVLLSAGCRADAINSTQSTALHVAVQRGFLEVVRALCERGCDVNLPDAHSDTPLHSAISAGTGASGIVEVLTEVPNIDVTATNSQVSPCCTMPPSRVTLLAVRKILARARQLVDAKKEDGFTALHLAALNNHREVAQILIREGRCDVNVRNRKLQSPLHLAVQQAHVGLVPLLVDAGCSVNAEDEEGDTALHVALQRHQLLPLVADGAGGDPGPLQLLSRLQASGLPGSAELTVGAAVACFLALEGADVSYTNHRGRSPLDLAAEGRVLKALQGCAQRFRERQAGGGAAPGPRQTLGTPNTVTNLHVGAAPGPEAAECLVCSELALLVLFSPCQHRTVCEECARRMKKCIRCQVVVSKKLRPDGSEVASAAPAPGPPRQLVEELQSRYRQMEERITCPICIDSHIRLVFQCGHGACAPCGSALSACPICRQPIRDRIQIFV

SEQ ID NO: 1030851 - protein, 927 aa, Homo sapiens
MGWKPSEARGQSQSFQASGLQPRSLKAARRATGRPDRSRAAPPNMDPDPQAGVQGVRHPNIICDCCKKHGLRGMRWKCRVCLDYDLCTQCYMHNKHELAHAFDRYETAHSRPVTLSPRQGLPRIPLRGIFQGAKVVRGPDWEWGSQDGGEGKPGRVVDIRGWDVETGRSVASVTWADGTTNVYRVGHKGKVDLKCVGEAAGGFYYKDHLPRLGKPAELQRRVSADSQPFQHGDKVKCLLDTDVLREMQEGHGGWNPRMAEFIGQTGTVHRITDRGDVRVQFNHETRWTFHPGALTKHHSFWVGDVVRVIGDLDTVKRLQAGHGEWTDDMAPALGRVGKVVKVFGDGNLRVAVAGQRWTFSPSCLVAYRPEEDANLDVAERARENKSSLSVALDKLRAQKSDPEHPGRLVVEVALGNAARALDLLRRRPEQVDTKNQGRTALQVAAYLGQVELIRLLLQARAGVDLPDDEGNTALHYAALGNQPEATRVLLSAGCRADAINSTQSTALHVAVQRGFLEVVRALCERGCDVNLPDAHSDTPLHSAISAGTGASGIVEVLTEVPNIDVTATNSQVSPCCTMPPSRVTLLAVRKILARARQLVDAKKEDGFTALHLAALNNHREVAQILIREGRCDVNVRNRKLQSPLHLAVQQAHVGLVPLLVDAGCSVNAEDEEGDTALHVALQRHQLLPLVADGAGGDPGPLQLLSRLQASGLPGSAELTVGAAVACFLALEGADVSYTNHRGRSPLDLAAEGRVLKALQGCAQRFRERQAGGGAAPGPRQTLGTPNTVTNLHVGAAPGPEAAECLVCSELALLVLFSPCQHRTVCEECARRMKKCIRCQVVVSKKLRPDGSEVASAAPAPGPPRQLVEELQSRYRQMEERITCPICIDSHIRLVFQCGHGACAPCGSALSACPICRQPIRDRIQIFV

SEQ ID NO: 1030852 - protein, 1017 aa, Homo sapiens
MGWKPSEARGQSQSFQASGLQPRSLKAARRATGRPDRSRAAPPNMDPDPQAGVQVGMRVVRGVDWKWGQQDGGEGGVGTVVELGRHGSPSTPDRTVVVQWDQGTRTNYRAGYQGAHDLLLYDNAQIGVRHPNIICDCCKKHGLRGMRWKCRVCLDYDLCTQCYMHNKHELAHAFDRYETAHSRPVTLSPRQGLPRIPLRGIFQGAKVVRGPDWEWGSQDGGEGKPGRVVDIRGWDVETGRSVASVTWADGTTNVYRVGHKGKVDLKCVGEAAGGFYYKDHLPRLGKPAELQRRVSADSQPFQHGDKVKCLLDTDVLREMQEGHGGWNPRMAEFIGQTGTVHRITDRGDVRVQFNHETRWTFHPGALTKHHSFWVGDVVRVIGDLDTVKRLQAGHGEWTDDMAPALGRVGKVVKVFGDGNLRVAVAGQRWTFSPSCLVAYRPEEDANLDVAERARENKSSLSVALDKLRAQKSDPEHPGRLVVEVALGNAARALDLLRRRPEQVDTKNQGRTALQVAAYLGQVELIRLLLQARAGVDLPDDEGNTALHYAALGNAALMWPPVCCSLMLLVLPCVLCTGSFNHVIPMNVTCQLALVCLLHDGGPSLARVVAGALCVSAAVTSTCPTPTRTRPCTPPSRRALEPAALSRSSRRCQTSMLPPPTARFHPAAPCLPQGSRASCEKDSGSGAAAGGRQEGGRLHGAASGCPQQPPEVAQILIREGRCDVNVRNRKLQSPLHLAVQQAHVGLVPLLVDAGCSVNAEDEEGDTALHVALQRHQLLPLVADGAGGDPGPLQLLSRLQASGLPGSAELTVGAAVACFLALEGADVSYTNHRGRSPLDLAAEGRVLKALQGCAQRFRERQAGGGAAPGPRQTLGTPNTVTNLHVGAAPGPEAAECLVCSELALLVLFSPCQHRTVCEECARRMKKCIRCQVVVSKKLRPDGSEVASAAPAPGPPRQLVEELQSRYRQMEERITCPICIDSHIRLVFQCGHGACAPCGSALSACPICRQPIRDRIQIFV

SEQ ID NO: 1030853 - protein, 1019 aa, Homo sapiens
MGWKPSEARGQSQSFQASGLQPRSLKAARRATGRPDRSRAAPPNMDPDPQAGVQVGMRVVRGVDWKWGQQDGGEGGVGTVVELGRHGSPSTPDRTVVVQWDQGTRTNYRAGYQGAHDLLLYDNAQIGVRHPNIICDCCKKHGLRGMRWKCRVCLDYDLCTQCYMHNKHELAHAFDRYETAHSRPVTLSPRQGLPRIPLRGIFQGAKVVRGPDWEWGSQDGGEGKPGRVVDIRGWDVETGRSVASVTWADGTTNVYRVGHKGKVDLKCVGEAAGGFYYKDHLPRLGKPAELQRRVSADSQPFQHGDKVKCLLDTDVLREMQEGHGGWNPRMAEFIGQTGTVHRITDRGDVRVQFNHETRWTFHPGALTKHHSFWVGDVVRVIGDLDTVKRLQAGHGEWTDDMAPALGRVGKVVKVFGDGNLRVAVAGQRWTFSPSCLVAYRPEEDANLDVAERARENKSSLSVALDKLRAQKSDPEHPGRLVVEVALGNAARALDLLRRRPEQVDTKNQGRTALQVAAYLGQVELIRLLLQARAGVDLPDDEGNTALHYAALGNQPEATRVLLSAGCRADAINSTQSTALHVAVQRGFLEVVRALCERGCDVNLPDAHSDTPLHSAISAGTGASGIVEVLTEVPNIDVTATNSQVSPCCTMPPSRVTLLAVRKILARARQLVDAKKEDGFTALHLAALNNHREVAQILIREGRCDVNVRNRKLQSPLHLAVQQAHVGLVPLLVDAGCSVNAEDEEGDTALHVALQRHQLLPLVADGAGGDPGPLQLLSRLQASGLPGSAELTVGAAVACFLALEGADVSYTNHRGRSPLDLAAEGRVLKALQGCAQRFRERQAGGGAAPGPRQTLGTPNTVTNLHVGAAPGPEAAECLVCSELALLVLFSPCQHRTVCEECARRMKKCIRCQVVVSKKLRPDGSEVASAAPAPGPPRQLVEELQSRYRQMEERITCPICIDSHIRLVFQCGHGACAPCGSAARPCPFSAIHRDRSEFELAGRQRPDCFGPRLVYNEDLAL

SEQ ID NO: 1030854 - protein, 822 aa, Homo sapiens
MGWKPSEARGQSQSFQASGLQPRSLKAARRATGRPDRSRAAPPNMDPDPQAGVQVGMRVVRGVDWKWGQQDGGEGGVGTVVELGRHGSPSTPDRTVVVQWDQGTRTNYRAGYQGAHDLLLYDNAQIGVRHPNIICDCCKKHGLRGMRWKCRVCLDYDLCTQCYMHNKHELAHAFDRYETAHSRPVTLSPRQGLPRIPLRGIFQGAKVVRGPDWEWGSQDGGEGKPGRVVDIRGWDVETGRSVASVTWADGTTNVYRVGHKGKVDLKCVGEAAGGFYYKDHLPRLGKPAELQRRVSADSQPFQHGDKVKCLLDTDVLREMQEGHGGWNPRMAEFIGQTGTVHRITDRGDVRVQFNHETRWTFHPGALTKHHSFWVGDVVRVIGDLDTVKRLQAGHGEWTDDMAPALGRVGKVVKVFGDGNLRVAVAGQRWTFSPSCLVAYRPEEDANLDVAERARENKSSLSVALDKLRAQKSDPEHPGRLVVEVALGNAARALDLLRRRPEQVDTKNQGRTALQVAAYLGQVELIRLLLQARAGVDLPDDEGNTALHYAALGNQPEATRVLLSAGCRADAINSTQSTALHVAVQRGFLEVVRALCERGCDVNLPDAHSDTPLHSAISAGTGASGIVEVLTEVPNIDVTATNSQVSPCCTMPPSRVTRYCEKDSGSGAAAGGRQEGGRLHGAASGCPQQPPLVDAGCSVNAEDEEGDTALHVALQRHQLLPLVADGAGGDPGPLQLLSRLQASGLPGSAELTVGAAVACFLALEGADVSYTNHRGRSPLDLAAEGRVLKALQGCAQRFRVRAQDEEVHQVPGGRQQETAPRRL

SEQ ID NO: 1030855 - protein, 142 aa, Homo sapiens
PGPAGAGVVRWGRRPGRVGCGARQALWPGLAAAEQSGPVGGLERRDRPTDGLAGGPAPPSGAGGTETSGQVGVGRVGSPARLEASPKVSRHQGCSPGASRRPGGRLDGRTGELLIVRGLIVCTWLSHFGAPWKPRQRGCVCV

SEQ ID NO: 1030856 - protein, 178 aa, Homo sapiens
PGPAGAGVVRWGRRPGRVGCGARQALWPGLAAAEQSGPVGGLERRDRPTDGLAGGPAPPSGAGGTETSGQVGVGRVGSPARLEASPKVSRHQGCSPGASRRPGGRLDGRTGQVSPCWPPRLRASSHSVGLISLGHLGCPSALAGATPWPVACHTQRHFGVIRHSWRCKEEGSLMSSSM

SEQ ID NO: 1030857 - protein, 963 aa, Homo sapiens
MGWKPSEARGQSQSFQASGLQPRSLKAARRATGRPDRSRAAPPNMDPDPQAGVQVGMRVVRGVDWKWGQQDGGEGGVGTVVELGRHGSPSTPDRTVVVQWDQGTRTNYRAGYQGAHDLLLYDNAQIGVRHPNIICDCCKKHGLRGMRWKCRVCLDYDLCTQCYMHNKHELAHAFDRYETAHSRPVTLSPRQGLPRIPLRGIFQGAKVVRGPDWEWGSQDGGEGKPGRVVDIRGWDVETGRSVASVTWADGTTNVYRVGHKGKVDLKCVGEAAGGFYYKDHLPRLGKPAELQRRVSADSQPFQHGDKVKCLLDTDVLREMQEGHGGWNPRMAGHHSFWVGDVVRVIGDLDTVKRLQAGHGEWTDDMAPALGRVGKVVKVFGDGNLRVAVAGQRWTFSPSCLVAYRPEEDANLDVAERARENKSSLSVALDKLRAQKSDPEHPGRLVVEVALGNAARALDLLRRRPEQVDTKNQGRTALQVAAYLGQVELIRLLLQARAGVDLPDDEGNTALHYAALGNQPEATRVLLSAGCRADAINSTQSTALHVAVQRGFLEVVRALCERGCDVNLPDAHSDTPLHSAISAGTGASGIVEVLTEVPNIDVTATNSQVSPCCTMPPSRVTLLAVRKILARARQLVDAKKEDGFTALHLAALNNHREVAQILIREGRCDVNVRNRKLQSPLHLAVQQAHVGLVPLLVDAGCSVNAEDEEGDTALHVALQRHQLLPLVADGAGGDPGPLQLLSRLQASGLPGSAELTVGAAVACFLALEGADVSYTNHRGRSPLDLAAEGRVLKALQGCAQRFRERQAGGGAAPGPRQTLGTPNTVTNLHVGAAPGPEAAECLVCSELALLVLFSPCQHRTVCEECARRMKKCIRCQVVVSKKLRPDGSEVASAAPAPGPPRQLVEELQSRYRQMEERITCPICIDSHIRLVFQCGHGACAPCGSALSACPICRQPIRDRIQIFV

SEQ ID NO: 1030858 - protein, 1087 aa, Homo sapiens
PGPAGAGVVRWGRRPGRVGCGARQALWPGLAAAEQSGPVGGLERRDRPTDGLAGGPAPPSGAGGTETSGQVGVGRVGSPARLEASPKVSRHQGCSPGASRRPGGRLDGRTGPEQPGPPRTPLPTVSRAAPPNMDPDPQAGVQVGMRVVRGVDWKWGQQDGGEGGVGTVVELGRHGSPSTPDRTVVVQWDQGTRTNYRAGYQGAHDLLLYDKYKIGVRHPNIICDCCKKHGLRGMRWKCRVCLDYDLCTQCYMHNKHELAHAFDRYETAHSRPVTLSPRQGLPRIPLRGIFQGAKVVRGPDWEWGSQDGGEGKPGRVVDIRGWDVETGRSVASVTWADGTTNVYRVGHKGKVDLKCVGEAAGGFYYKDHLPRLGKPAELQRRVSADSQPFQHGDKVKCLLDTDVLREMQEGHGGWNPRMAEFIGQTGTVHRITDRGDVRVQFNHETRWTFHPGALTKHHSFWVGDVVRVIGDLDTVKRLQAGHGEWTDDMAPALGRVGKVVKVFGDGNLRVAVAGQRWTFSPSCLVAYRPEEDANLDVAERARENKSSLSVALDKLRAQKSDPEHPGRLVVEVALGNAARALDLLRRRPEQVDTKNQGRTALQVAAYLGQVELIRLLLQARAGVDLPDDEGNTALHYAALGNQPEATRVLLSAGCRADAINSTQSTALHVAVQRGFLEVVRALCERGCDVNLPDAHSDTPLHSAISAGTGASGIVEVLTEVPNIDVTATNSQVSPCCTMPPSRVTLLAVRKILARARQLVDAKKEDGFTALHLAALNNHREVAQILIREGRCDVNVRNRKLQSPLHLAVQQAHVGLVPLLVDAGCSVNAEDEEGDTALHVALQRHQLLPLVADGAGGDPGPLQLLSRLQASGLPGSAELTVGAAVACFLALEGADVSYTNHRGRSPLDLAAEGRVLKALQGCAQRFRERQAGGGAAPGPRQTLGTPNTVTNLHVGAAPGPEAAECLVCSELALLVLFSPCQHRTVCEECARRMKKCIRCQVVVSKKLRPDGSEVASAAPAPGPPRQLVEELQSRYRQMEERITCPICIDSHIRLVFQCGHGACAPCGSALSACPICRQPIRDRIQIFV

SEQ ID NO: 1030859 - protein, 1030 aa, Homo sapiens
MGWKPSEARGQSQSFQASGLQPRSLKAARRATGRPDRSRAAPPNMDPDPQAGVQVGMRVVRGVDWKWGQQDGGEGGVGTVVELGRHGSPSTPDRTVVVQWDQGTRTNYRAGYQGAHDLLLYDNAQIGVRHPNIICDCCKKHGLRGMRWKCRVCLDYDLCTQCYMHNKHELAHAFDRYETAHSRPVTLSPRQGLPRIPLRGIFQGAKVVRGPDWEWGSQDGGEGKPGRVVDIRGWDVETGRSVASVTWADGTTNVYRVGHKGKVDLKCVGEAAGGFYYKDHLPRLGKPAELQRRVSADSQPFQHGDKVKCLLDTDVLREMQEGHGGWNPRMAEFIGQTGTVHRITDRGDVRVQFNHETRWTFHPGALTKHHSFWVGDVVRVIGDLDTVKRLQAGHGEWTDDMAPALGRVGKVVKVFGDGNLRVAVAGQRWTFSPSCLVAYRPEEDANLDVAERARENKSSLSVALDKLRAQKSDPEHPGRLVVEVALGNAARALDLLRRRPEQVDTKNQGRTALQVAAYLGQVELIRLLLQARAGVDLPDDEGNTALHYAALGNQPEATRVLLSAGCRADAINSTQSTALHVAVQRGFLEVVRALCERGCDVNLPDAHSDTPLHSAISAGTGASGIVEVLTEVPNIDVTATNSQVSPCCTMPPSRVTRCECGVGTQLQPASCCAAWGQSHGPRPTSLLHRAVRKILARARQLVDAKKEDGFTALHLAALNNHREVAQILIREGRCDVNVRNRKLQSPLHLAVQQAHVGLVPLLVDAGCSVNAEDEEGDTALHVALQRHQLLPLVADGAGGDPGPLQLLSRLQASGLPGSAELTVGAAVACFLALEGADVSYTNHRGRSPLDLAAEGRVLKALQGCAQRFRERQAGGGAAPGPRQTLGTPNTVTNLHVGAAPGPEAAECLVCSELALLVLFSPCQHRTVCEECARRMKKCIRCQVVVSKKLRPDGSEVASAAPAPGPPRQLVEELQSRYRQMEERITCPICIDSHIRLVFQCGHGACAPCGSALSACPICRQPIRDRIQIFV

SEQ ID NO: 1030860 - protein, 1032 aa, Homo sapiens
MGWKPSEARGQSQSFQASGLQPRSLKAARRATGRPDRSRAAPPNMDPDPQAGVQVGMRVVRGVDWKWGQQDGGEGGVGTVVELGRHGSPSTPDRTVVVQWDQGTRTNYRAGYQGAHDLLLYDNAQIGVRHPNIICDCCKKHGLRGMRWKCRVCLDYDLCTQCYMHNKHELAHAFDRYETAHSRPVTLSPRQGLPRIPLRGIFQGAKVVRGPDWEWGSQDGGEGKPGRVVDIRGWDVETGRSVASVTWADGTTNVYRVGHKGKVDLKCVGEAAGGFYYKDHLPRLGKPAELQRRVSADSQPFQHGDKVKCLLDTDVLREMQEGHGGWNPRMAEFIGQTGTVHRITDRGDVRVQFNHETRWTFHPGALTKHHSFWVGDVVRVIGDLDTVKRLQAGHGEWTDDMAPALGRVGKVVKVFGDGNLRVAVAGQRWTFSPSCLVAYRPEEDANLDVAERARENKSSLSVALDKLRAQKSDPEHPGRLVVEVALGNAARALDLLRRRPEQVDTKNQGRTALQVAAYLGQVELIRLLLQARAGVDLPDDEGNTALHYAALGNQPEATRVLLSAGCRADAINSTQSTALHVAVQRGFLEVVRALCERGCDVNLPDAHSDTPLHSAISAGTGASGIVEVLTEVPNIDVTATNSQVSPCCTMPPSRVTLLAVRKILARARQLVDAKKEDGFTALHLAALNNHREVAQILIREGRCDVNVRNRKLQSPLHLAVQQAHVGLVPLLVDAGCSVNAEDEEGDTALHVALQRHQLLPLVADGAGGDPGPLQLLSRTWGAGCWGCQVPGDASLGPAPAPALTGVCPAAQLQASGLPGSAELTVGAAVACFLALEGADVSYTNHRGRSPLDLAAEGRVLKALQGCAQRFRERQAGGGAAPGPRQTLGTPNTVTNLHVGAAPGPEAAECLVCSELALLVLFSPCQHRTVCEECARRMKKCIRCQVVVSKKLRPDGSEVASAAPAPGPPRQLVEELQSRYRQMEERITCPICIDSHIRLVFQCGHGACAPCGSALSACPICRQPIRDRIQIFV

SEQ ID NO: 1030861 - protein, 862 aa, Homo sapiens
MGWKPSEARGQSQSFQASGLQPRSLKAARRATGRPDRSRAAPPNMDPDPQAGVQVGMRVVRGVDWKWGQQDGGEGGVGTVVELGRHGSPSTPDRTVVVQWDQGTRTNYRAGYQGAHDLLLYDNAQIGVRHPNIICDCCKKHGLRGMRWKCRVCLDYDLCTQCYMHNKHELAHAFDRYETAHSRPVTLSPRQGLPRIPLRGIFQGAKVVRGPDWEWGSQDGGEGKPGRVVDIRGWDVETGRSVASVTWADGTTNVYRVGHKGKVDLKCVGEAAGGFYYKDHLPRLGKPAELQRRVSADSQPFQHGDKVKCLLDTDVLREMQEGHGGWNPRMAEFIGQTGTVHRITDRGDVRVQFNHETRWTFHPGALTKHHSFWVGDVVRVIGDLDTVKRLQAGHGEWTDDMAPALGRVGKVVKVFGDGNLRVAVAGQRWTFSPSCLVAYRPEEDANLDVAERARENKSSLSVALDKLRAQKSDPEHPGRLVVEVALGNAARALDLLRRRPEQVDTKNQGRTALQVAAYLGQVELIRLLLQARAGVDLPDDEGNTALHYAALGNQPEATRVLLSAGCRADAINSTQSTALHVAVQRGFLEVVRALCERGCDVNLPDAHSDTPLHSAISAGTGASGIVEVLTEVPNIDVTATNSQVSPCCTMPPSRVTLLAVRKILARARQLVDAKKEDGFTALHLAALNNHREVAQILIREGRCDVNVRNRKLQSPLHLAVQQAHVGLVPLLVDAGCSVNAEDEEGDTALHVALQRHQLLPLVADGAGGDPGPLQLLSRLQASGLPGSAELTVGAAVACFLALEGADVSYTNHRGRSPLDLAAEGRVLKALQGCAQRFRVRAQDEEVHQVPGGRQQETAPRRL

SEQ ID NO: 1030862 - protein, 999 aa, Homo sapiens
  misc_feature (950)..(951): Xaa can be any naturally occurring amino acid
MGWKPSEARGQSQSFQASGLQPRSLKAARRATGRPDRSRAAPPNMDPDPQAGVQVGMRVVRGVDWKWGQQDGGEGGVGTVVELGRHGSPSTPDRTVVVQWDQGTRTNYRAGYQGAHDLLLYDNAQIGVRHPNIICDCCKKHGLRGMRWKCRVCLDYDLCTQCYMHNKHELAHAFDRYETAHSRPVTLSPRQGLPRIPLRGIFQGAKVVRGPDWEWGSQDGGEGKPGRVVDIRGWDVETGRSVASVTWADGTTNVYRVGHKGKVDLKCVGEAAGGFYYKDHLPRLGKPAELQRRVSADSQPFQHGDKVKCLLDTDVLREMQEGHGGWNPRMAEFIGQTGTVHRITDRGDVRVQFNHETRWTFHPGALTKHHSFWVGDVVRVIGDLDTVKRLQAGHGEWTDDMAPALGRVGKVVKVFGDGNLRVAVAGQRWTFSPSCLVAYRPEEDANLDVAERARENKSSLSVALDKLRAQKSDPEHPGRLVVEVALGNAARALDLLRRRPEQVDTKNQGRTALQVAAYLGQVELIRLLLQARAGVDLPDDEGNTALHYAALGNQPEATRVLLSAGCRADAINSTQSTALHVAVQRGFLEVVRALCERGCDVNLPDAHSDTPLHSAISAGTGASGIVEVLTEVPNIDVTATNSQVSPCCTMPPSRVTLLAVRKILARARQLVDAKKEDGFTALHLAALNNHREVAQILIREGRCDVNVRNRKLQSPLHLAVQQAHVGLVPLLVDAGCSVNAEDEEGDTALHVALQRHQLLPLVADGAGGDPGPLQLLSRLQASGLPGSAELTVGAAVACFLALEGADVSYTNHRGRSPLDLAAEGRVLKALQGCAQRFRERQAGGGAAPGPRQTLGTPNTVTNLHVGAAPGPEAAECLVCSELALLVLFSPCQHRTVCEECARRMKKCIRCQVVVSKKLRPDGSEVASAAPAPGPPRQLVEELQSRYRQMXXFFFFFFFFDSHIRLVFQCGHGACAPCGSALSACPICRQPIRDRIQIFV

SEQ ID NO: 1030863 - protein, 518 aa, Homo sapiens
PGRGPAGLSLCVLGSGLAGLSLCVSHRARRPPSPTSSPVRNQPEATRVLLSAGCRADAINSTQSTALHVAVQRGFLEVVRALCERGCDVNLPDAHSDTPLHSAISAGTGASGIVEVLTEVPNIDVTATNSQVSPCCTMPPSRVTRCECGVGTQLQPASCCAAWGQSHGPRPTSLLHRAVRKILARARQLVDAKKEDGFTALHLAALNNHREVAQILIREGRCDVNVRNRKLQSPLHLAVQQAHVGLVPLLVDAGCSVNAEDEEGDTALHVALQRHQLLPLVADGAGGDPGPLQLLSRLQASGLPGSAELTVGAAVACFLALEGADVSYTNHRGRSPLDLAAEGRVLKALQGCAQRFRERQAGGGAAPGPRQTLGTPNTVTNLHVGAAPGPEAAECLVCSELALLVLFSPCQHRTVCEECARRMKKCIRCQVVVSKKLRPDGSEVASAAPAPGPPRQLVEELQSRYRQMEERITCPICIDSHIRLVFQCGHGACAPCGSALSACPICRQPIRDRIQIFV

SEQ ID NO: 1030864 - protein, 170 aa, Homo sapiens
GPGEDGPGLAVISAVSRSGVTRNRRIGPHWWSRQELTYGAASAGQCQRARRRSPSPRLYGNRVRLQDRHGAGARRLSRFWNLAAPNARVGDAGRSRVTHFRCLPCPSPCGGRGHGGGAPAGGGPWAPALRVPQFPAAALLSARWPRRAWEPEAVPESLLGHWRDAGRPLG

SEQ ID NO: 1030865 - protein, 1066 aa, Homo sapiens
PGPAGAGVVRWGRRPGRVGCGARQALWPGLAAAEQSGPVGGLERRDRPTDGLAGGPAPPSGAGGTETSGQVGVGRVGSPARLEASPKVSRHQGCSPGASRRPGGRLDGRTGPEQPRPTWTQTPRRACRWACGWCAAWTGSGASRTAARAAWARWWSLAATAAPRHPTAQWSCSGTRARAPTTAPATRARTTCCCVRHPNIICDCCKKHGLRGMRWKCRVCLDYDLCTQCYMHNKHELAHAFDRYETAHSRPVTLSPRQGLPRIPLRGIFQGAKVVRGPDWEWGSQDGGEGKPGRVVDIRGWDVETGRSVASVTWADGTTNVYRVGHKGKVDLKCVGEAAGGFYYKDHLPRLGKPAELQRRVSADSQPFQHGDKVKCLLDTDVLREMQEGHGGWNPRMAEFIGQTGTVHRITDRGDVRVQFNHETRWTFHPGALTKHHSFWVGDVVRVIGDLDTVKRLQAGHGEWTDDMAPALGRVGKVVKVFGDGNLRVAVAGQRWTFSPSCLVAYRPEEDANLDVAERARENKSSLSVALDKLRAQKSDPEHPGRLVVEVALGNAARALDLLRRRPEQVDTKNQGRTALQVAAYLGQVELIRLLLQARAGVDLPDDEGNTALHYAALGNQPEATRVLLSAGCRADAINSTQSTALHVAVQRGFLEVVRALCERGCDVNLPDAHSDTPLHSAISAGTGASGIVEVLTEVPNIDVTATNSQVSPCCTMPPSRVTLLAVRKILARARQLVDAKKEDGFTALHLAALNNHREVAQILIREGRCDVNVRNRKLQSPLHLAVQQAHVGLVPLLVDAGCSVNAEDEEGDTALHVALQRHQLLPLVADGAGGDPGPLQLLSRLQASGLPGSAELTVGAAVACFLALEGADVSYTNHRGRSPLDLAAEGRVLKALQGCAQRFRERQAGGGAAPGPRQTLGTPNTVTNLHVGAAPGPEAAECLVCSELALLVLFSPCQHRTVCEECARRMKKCIRCQVVVSKKLRPDGSEVASAAPAPGPPRQLVEELQSRYRQMEERITCPICIDSHIRLVFQCGHGACAPCGSALSACPICRQPIRDRIQIFV

SEQ ID NO: 1030866 - protein, 857 aa, Homo sapiens
SSVSFICEPSCSVTLSPRQGLPRIPLRGIFQGAKVVRGPDWEWGSQDGEWRQRGGVRAGLWLAHGSALACWGGLFSPGGEGKPGRVVDIRGWDVETGRSVASVTWADGTTNVYRVGHKGKVDLKCVGEAAGGFYYKDHLPRLGKPAELQRRVSADSQPFQHGDKVKCLLDTDVLREMQEGHGGWNPRMAEFIGQTGTVHRITDRGDVRVQFNHETRWTFHPGALTKHHSFWVGDVVRVIGDLDTVKRLQAGHGEWTDDMAPALGRVGKVVKVFGDGNLRVAVAGQRWTFSPSCLVAYRPEEDANLDVAERARENKSSLSVALDKLRAQKSDPEHPGRLVVEVALGNAARALDLLRRRPEQVDTKNQGRTALQVAAYLGQVELIRLLLQARAGVDLPDDEGNTALHYAALGNQPEATRVLLSAGCRADAINSTQSTALHVAVQRGFLEVVRALCERGCDVNLPDAHSDTPLHSAISAGTGASGIVEVLTEVPNIDVTATNSQVSPCCTMPPSRVTLLAVRKILARARQLVDAKKEDGFTALHLAALNNHREVAQILIREGRCDVNVRNRKLQSPLHLAVQQAHVGLVPLLVDAGCSVNAEDEEGDTALHVALQRHQLLPLVADGAGGDPGPLQLLSRLQASGLPGSAELTVGAAVACFLALEGADVSYTNHRGRSPLDLAAEGRVLKALQGCAQRFRERQAGGGAAPGPRQTLGTPNTVTNLHVGAAPGPEAAECLVCSELALLVLFSPCQHRTVCEECARRMKKCIRCQVVVSKKLRPDGSEVASAAPAPGPPRQLVEELQSRYRQMEERITCPICIDSHIRLVFQCGHGACAPCGSALSACPICRQPIRDRIQIFV

SEQ ID NO: 1030867 - protein, 363 aa, Homo sapiens
MLPPPTARFHPAAPCLPQGSRASCEKDSGSGAAAGGRQEGGRLHGAASGCPQQPPEVAQILIREGRCDVNVRNRKLQSPLHLAVQQAHVGLVPLLVDAGCSVNAEDEEGDTALHVALQRHQLLPLVADGAGGDPGPLQLLSRLQASGLPGSAELTVGAAVACFLALEGADVSYTNHRGRSPLDLAAEGRVLKALQGCAQRFRERQAGGGAAPGPRQTLGTPNTVTNLHVGAAPGPEAAECLVCSELALLVLFSPCQHRTVCEECARRMKKCIRCQVVVSKKLRPDGSEVASAAPAPGPPRQLVEELQSRYRQMEERITCPICIDSHIRLVFQCGHGACAPCGSALSACPICRQPIRDRIQIFV

SEQ ID NO: 1030868 - protein, 156 aa, Homo sapiens
MGWKPSEARGQSQSFQASGLQPRSLKAARRATGRPDRSRAAPPNMDPDPQAGVQVGMRVVRGVDWKWGQQDGGEGGVGTVVELGRHGSPSTPDRTVVVQWDQGTRTNYRAGYQGAHDLLLYDNAQIGVRHPNIICDCLSACPICRQPIRDRIQIFV

SEQ ID NO: 1030869 - protein, 112 aa, Homo sapiens
MSTASTPRAPTTGTADLQLERINVYYNEATGGKYCAPAPCSWIWSPAPWTPCARGPSGRSSGRTTSFSVRVVLGTTGPRGTTQNGAELVDSVLDVVTNTEAESCDCLQGFPS

SEQ ID NO: 1030870 - protein, 112 aa, Homo sapiens
MSTASTPRAPTTGTADLQLERINVYYNEATGGKYCAPAPCSWIWSPAPWTPCARGPSGRSSGRTTSFSVRVVLGTTGPRGTTQNGAELVDSVLDVVTNTEAESCDCLQGFPC

SEQ ID NO: 1030871 - protein, 112 aa, Homo sapiens; identical to SEQ ID NO: 1030869

SEQ ID NO: 1030872 - protein, 445 aa, Homo sapiens
MREIVHLQAGQCGNQIGAKFWEVISDEHGIDPTGTYHGDSDLQLERINVYYNEATGGKYVPRAVLVDLEPGTMDSVRSGPFGQIFRPDNFVFGQSGAGNNWAKGHYTEGAELVDSVLDVVRKEAESCDCLQGFQLTHSLGGGTGSGMGTLLISKIREEYPDRIMNTFSVVPSPKVSDTVVEPYNATLSVHQLVENTDETYCIDNEALYDICFRTLKLTTPTYGDLNHLVSATMSGVTTCLRFPGQLNADLRKLAVNMVPFPRLHFFMPGFAPLTSRGSQQYRALTVPELTQQMFDAKNMMAACDPRHGRYLTVAAVFRGRMSMKEVDEQMLNVQNKNSSYFVEWIPNNVKTAVCDIPPRGLKMSATFIGNSTAIQELFKRISEQFTAMFRRKAFLHWYTGEGMDEMEFTEAESNMNDLVSEYQQYQDATAEEEGEFEEEAEEEVA

SEQ ID NO: 1030873 - protein, 166 aa, Homo sapiens
MFDAKNMMAACDPRHGRYLTVAAVFRGRMSMKEVDEQMLNVQNKNSSYFVEWIPNNVKTAVCDIPPRGLKMSATFIGNSTAIQELFKRISEQFTAMFRRKAFLHWYTGEGMDEMEFTEAESNMNDLVSEYQQYQDATAEEEGEFEEEAEEEGGLEPSVTGESREAV

SEQ ID NO: 1030874 - protein, 112 aa, Homo sapiens; identical to SEQ ID NO: 1030870

SEQ ID NO: 1030875 - protein, 158 aa, Homo sapiens
MFDAKNMMAACDPRHGRYLTVAAVFRGRMSMKEVDEQMLNVQNKNSSYFVEWIPNNVKTAVCDIPPRGLKMSATFIGNSTAIQELFKRISEQFTAMFRRKAFLHWYTGEGMDEMEFTEAESNMNDLVSEYQQYQDATAEEEGEMYEDDEEESEAQGPK

SEQ ID NO: 1030876 - protein, 144 aa, Homo sapiens
MFDAKNMMAACDPRHGRYLTVAAVFRGRMSMKEVDEQMLNVQNKNSSYFVEWIPNNVKTAVCDIPPRGLKMSATFIGTGRPSGASSAFEQSRQVGARLWQVPGGGQGSEATRAGVRPVTGGRGQGTGRRNRQVARLKLGAHFVD

SEQ ID NO: 1030877 - protein, 185 aa, Homo sapiens
  misc_feature (180)..(180): Xaa can be any naturally occurring amino acid
MFDAKNMMAACDPRHGRYLTVAAVFRGRMSMKEVDEQMLTIQSKNSSYFVEWIPNNVKVAVCDIPPRGLKMSSTFIGNSTAIQELFKRISEQFTAMFRRKAFLHWYTGEGMDEMEFTEAESNMNDLVSEYQQYQDATADEQGEFEEEAGRGRGVDAPARRVRESGGGKRGGGGLPGTKTXQGKER

SEQ ID NO: 1030878 - protein, 126 aa, Homo sapiens
MTLGGHHHLACASQGQLNAGPAEAGLVNMVPFPRLHFFMPGFAPLDQPGQPAVPGADRARAFLHWYTGEGMDEMEFTEAESNMNDLVSEYQQYQDATAEEEGEFEEEAEEEGGLEPSVTGESREAV

SEQ ID NO: 1030879 - protein, 112 aa, Homo sapiens; identical to SEQ ID NO: 1030870

SEQ ID NO: 1030880 - protein, 112 aa, Homo sapiens; identical to SEQ ID NO: 1030870

SEQ ID NO: 1030881 - protein, 112 aa, Homo sapiens; identical to SEQ ID NO: 1030870

SEQ ID NO: 1030882 - protein, 112 aa, Homo sapiens; identical to SEQ ID NO: 1030870

SEQ ID NO: 1030883 - protein, 306 aa, Homo sapiens
MEQTATTAADAPPQPPTTTRATTTHGSTHTPKRHTTRHPPTPKAPTNHDQHARATRPGETDPQQENKQRARKHTHRQRHQRRRRTNLSHTTQTRNDRTPTHNNETPSKSRTHPKERSKNKRHNHGNHKMHKRGQSRTGHTTTAGKKHKQYPKENQRNITRQGARKENQNRAETDQTEGPRNPRRTTPGTQTTREKHHKTSTRETTNRPEPYKNQSHNKENKETTTHTTKRQQKQTQTKKDEHNKHRTKNNKDTRDKGARKQKNRREQKPSHEEGGRDEEREQGSSYKKIETRKEYGDPTPQQKTEE

SEQ ID NO: 1030884 - protein, 166 aa, Homo sapiens; identical to SEQ ID NO: 1030873

SEQ ID NO: 1030885 - protein, 191 aa, Homo sapiens
MVPFPRLHFFMPGFAPLTVPELTQQMFDAKNMMAACDPRHGRYLTVAAVFRGRMSMKEVDEQMLNVQNKNSSYFVEWIPNNVKTAVCDIPPRGLKMSATFIGNSTAIQELFKRISEQFTAMFRRKAFLHWYTGEGMDEMEFTEAESNMNDLVSEYQQYQDATAEEEGEFEEEAEEEGGLEPSVTGESREAV

SEQ ID NO: 1030886 - protein, 112 aa, Homo sapiens; identical to SEQ ID NO: 1030870

SEQ ID NO: 1030887 - protein, 112 aa, Homo sapiens; identical to SEQ ID NO: 1030870

SEQ ID NO: 1030888 - protein, 166 aa, Homo sapiens; identical to SEQ ID NO: 1030873

SEQ ID NO: 1030889 - protein, 166 aa, Homo sapiens; identical to SEQ ID NO: 1030873

SEQ ID NO: 1030890 - protein, 112 aa, Homo sapiens; identical to SEQ ID NO: 1030870

SEQ ID NO: 1030891 - protein, 166 aa, Homo sapiens; identical to SEQ ID NO: 1030873

SEQ ID NO: 1030892 - protein, 153 aa, Homo sapiens
MFDAKNMMAACDPRHGRYLTVAAVFRGRMSMKEVDEQMLNVQNKNSSYFVEWIPNNVKTAVCDIPPRGLKMSATFIGNSTAIQELFKRISEQFTAMFRRKAFLHWYTGEGMDEMEFTEAESNMNDLVSEYQQYQDATADEQGEFEEEEGEDEA

SEQ ID NO: 1030893 - protein, 166 aa, Homo sapiens; identical to SEQ ID NO: 1030873

SEQ ID NO: 1030894 - protein, 158 aa, Homo sapiens
MFDAKNMMAACDPRHGRYLTVAAVFRGRMSMKEVDEQMLTIQSKNSSYFVEWIPNNVKVAVCDIPPRGLKMSSTFIGNSTAIQELFKRISEQFTAMFRRKAFLHWYTGEGMDEMEFTEAESNMNDLVSEYQQYQDATAEEEGEMYEDDEEESEAQGPK

SEQ ID NO: 1030895 - protein, 165 aa, Homo sapiens
MFDAKNMMAACDPRHGRYLTVAAVFRGRMSMKEVDEQMLNVQNKNSSYFVEWIPNNVKTAVCDIPPRGLKMSATFIGNSTAIQELFKRISEQFTAMFRRKAFLHCVTMANISESKRATATVVKDDSLRGPEYAIMICTWWSEYQQYQRCPQSVRYGWSEFRGGSA

SEQ ID NO: 1030896 - protein, 166 aa, Homo sapiens; identical to SEQ ID NO: 1030873

SEQ ID NO: 1030897 - protein, 112 aa, Homo sapiens; identical to SEQ ID NO: 1030870

SEQ ID NO: 1030898 - protein, 144 aa, Homo sapiens; identical to SEQ ID NO: 1030876

SEQ ID NO: 1030899 - protein, 166 aa, Homo sapiens; identical to SEQ ID NO: 1030873

SEQ ID NO: 1030900 - protein, 166 aa, Homo sapiens; identical to SEQ ID NO: 1030873

SEQ ID NO: 1030901 - protein, 112 aa, Homo sapiens; identical to SEQ ID NO: 1030870

SEQ ID NO: 1030902 - protein, 107 aa, Homo sapiens
MNHRLGWWFAFAQKCQTQWVEALQTPTLSVHQTRKKQTPRRDLTLQYTGEGMDEMEFTEAESNMNDLVSEYQQYQDATAEEEGEFEEEAEEEGGLEPSVTGESREAV

SEQ ID NO: 1030903 - protein, 104 aa, Homo sapiens
MSTASTPRAPTTGTADLQLERINVYYNEATGGKYCAPAPCSWIWSPAPWTPCARGPSGRSSGRTTSFSVSRGWGLGGGSKVKGLLQGHRRGNCAAGAPGRPPLL

SEQ ID NO: 1030904 - protein, 445 aa, Homo sapiens; identical to SEQ ID NO: 1030872

SEQ ID NO: 1030905 - protein, 445 aa, Homo sapiens; identical to SEQ ID NO: 1030872

SEQ ID NO: 1030906 - protein, 327 aa, Homo sapiens
MAVPAKKRKMNFSEREVEIIVEELELKKHLLVNHFNAGVPLAAKSAAWHGILRRVNAVATCRRELPEVKKKWSDLKTEVRRKVAQVRAAVEGGEAPGPTEEDGAGGPGTGGGSGGGGPAVAPVLLTPMQQRICNLLGEATIISLPSTTEIHPVALGPSATAAAATVTLTQIPTETTYHTLEEGVVEYCTAEAPPPLPPETPVDMMAQHADTSVKPQALKSRIALNSAKLIQEQRVTNLHVKEIAQHLEQQNDLLQMIRRSQEVQACAQERQAQAMEGTQAALSVLIQVLRPMIKDFRRYLQSNTANPAPASDPGQVAQNGQPDSIIQ

SEQ ID NO: 1030907 - protein, 206 aa, Homo sapiens
GTRPHRTFHRARLVVDSQAIFVEKIDGNNTAQVRQLILDSVFSVGDLSSVPTETTYHTLEEGVVEYCTAEAPPPLPPETPVDMMAQHADTSVKPQALKSRIALNSAKLIQEQRVTNLHVKEIAQHLEQQNDLLQMIRRSQEVQACAQERQAQAMEGTQAALSVLIQVLRPMIKDFRRYLQSNTANPAPASDPGQVAQNGQPDSIIQ

SEQ ID NO: 1030908 - protein, 185 aa, Homo sapiens
RQAGGRGGFRDAPPLRAPLRRPRPGAPEVPTETTYHTLEEGVVEYCTAEAPPPLPPETPVDMMAQHADTSVKPQALKSRIALNSAKLIQEQRVTNLHVKEIAQHLEQQNDLLQMIRRSQEVQACAQERQAQAMEGTQAALSVLIQVLRPMIKDFRRYLQSNTANPAPASDPGQVAQNGQPDSIIQ

SEQ ID NO: 1030909 - protein, 327 aa, Homo sapiens; identical to SEQ ID NO: 1030906

SEQ ID NO: 1030910 - protein, 172 aa, Homo sapiens
MAVPAKKRKMNFSEREVEIIVEELELKKHLLVNHFNAGVPLAAKSAAWHGILRRVNAVATCRRELPEVKKKWSDLKTEVRRKVAQVRAAVEGGEAPGPTEEDGAGGPGTGGGSGGGGPAVAPVLLTPMQQRICNLLGEATIISLPSTTEIHPVALGPSATAAAATVTLTQSE

SEQ ID NO: 1030911 - protein, 327 aa, Homo sapiens; identical to SEQ ID NO: 1030906

SEQ ID NO: 1030912 - protein, 182 aa, Homo sapiens
MPLSQIKKVLDIRETEDCHNAFALLVRPPTEQANVLLSFQMTSDELPKENWLKMLCRHVANTICKADAENLIYTADPESFEVNTKDMDSTLSRASRAIKKTSKKVTRAFSFSKTPKRALRRALMTSHGSVEGRSPSSNDKHVMSRLSSTSSLAGIPSPSLVSLPSFFERRSHTLSRSTTHLI

SEQ ID NO: 1030913 - protein, 562 aa, Homo sapiens
GAGEEWRYLSEESAFEEVALLDISNTPESSINYGDTPKSCTKSSKSSTPVPSKQSARWQVAKELYQTESNYVNILATIIQLFQVPLEEEGQRGGPILAPEEIKTIFGSIPDIFDVHTKIKDDLEDLIVNWDESKSIGDIFLKYSKDLVKTYPPFVNFFEMSKETIIKCEKQKPRFHAFLKINQAKPECGRQSLVELLIRPVQRLPSVALLLNDLKKHTADENPDKSTLEKAIGSLKEVMTHINEDKRKTEAQKQIFDVVYEVDGCPANLLSSHRSLVQRVETISLGEHPCDRGEQVTLFLFNDCLEIARKRHKVIGTFRSPHGQTRPPASLKHIHLMPLSQIKKVLDIRETEDCHNAFALLVRPPTEQANVLLSFQMTSDELPKENWLKMLCRHVANTICKADAENLIYTADPESFEVNTKDMDSTLSRASRAIKKTSKKVTRAFSFSKTPKRALRRALMTSHGSVEGRSPSSNDKHVMSRLSSTSSLAITHSVSTSNVIGFTKHVYVQRLNSTGGRSQYSWFQSVRHSAFRASFSEILEGNTDFSNFKKVLSKSSLTFVKN

SEQ ID NO: 1030914 - protein, 257 aa, Homo sapiens
GAGEEWRYLSEESAFEEVALLDISNTPESSINYGDTPKSCTKSSKSSTPVPSKQSARWQVAKELYQTESNYVNILATIIQLFQVPLEEEGQRGGPILAPEEIKTIFGSIPDIFDVHTKIKDDLEDLIVNWDESKSIGDIFLKYSKDLVKTYPPFVNFFEMSKETIIKCEKQKPRFHAFLKINQAKPECGRQSLVELLIRPVQRLPSVALLLNDLKKHTADENPDKSTLEKAIGSLKEVMTHINEDKRKTEAQKQILI

SEQ ID NO: 1030915 - protein, 182 aa, Homo sapiens; identical to SEQ ID NO: 1030912

SEQ ID NO: 1030916 - protein, 518 aa, Homo sapiens
GAGEEWRYLSEESAFEEVALLDISNTPESSINYGDTPKSCTKSSKSSTPVPSKQSARWQVAKELYQTESNYVNILATIIQLFQVPLEEEGQRGGPILAPEEIKTIFGSIPDIFDVHTKIKDDLEDLIVNWDESKSIGDIFLKYSKDLVKTYPPFVNFFEMSKETIIKCEKQKPRFHAFLKINQAKPECGRQSLVELLIRPVQRLPSVALLLNDLKKHTADENPDKSTLEKAIGSLKEVMTHINEDKRKTEAQKQIFDVVYEVDGCPANLLSSHRSLVQRVETISLGEHPCDRGEQVTLFLFNDCLEIARKRHKVIGTFRSPHGQTRPPASLKHIHLMPLSQIKKVLDIRETEDCHNAFALLVRPPTEQANVLLSFQMTSDELPKENWLKMLCRHVANTICKADAENLIYTADPESFEVNTKDMDSTLSRASRAIKKTSKKVTRAFSFSKTPKRALRRALMTSHGSVEGRSPSSNDKHVMSRLSSTSSLAGIPSPSLVSLPSFFERRSHTLSRSTTHLI

SEQ ID NO: 1030917 - protein, 386 aa, Homo sapiens
  misc_feature (357)..(357): Xaa can be any naturally occurring amino acid
GAGEEWRYLSEESAFEEVALLDISNTPESSINYGDTPKSCTKSSKSSTPVPSKQSARWQVAKELYQTESNYVNILATIIQLFQVPLEEEGQRGGPILAPEEIKTIFGSIPDIFDVHTKIKDDLEDLIVNWDESKSIGDIFLKYSKDLVKTYPPFVNFFEMSKETIIKCEKQKPRFHAFLKINQAKPECGRQSLVELLIRPVQRLPSVALLLNDLKKHTADENPDKSTLEKAIGSLKEVMTHINEDKRKTEAQKQIFDVVYEVDGCPANLLSSHRSLVQRVETISLGEHPCDRGEQVTLFLFNDCLEIARKRHKVIGTFRSPHGQTRPPASLKHIHLMPLSQIKKVLDIRETEGMPVXYILGYIKIVYIHCRFNLLHFGFFKLVNYL

SEQ ID NO: 1030918 - protein, 182 aa, Homo sapiens; identical to SEQ ID NO: 1030912

SEQ ID NO: 1030919 - protein, 182 aa, Homo sapiens; identical to SEQ ID NO: 1030912

SEQ ID NO: 1030920 - protein, 482 aa, Homo sapiens
GAGEEWRYLSEESAFEEVALLDISNTPESSINYGDTPKSCTKSSKSSTPVPSKQSARWQVAKELYQTESNYVNILATIIQLFQVPLEEEGQRGGPILAPEEIKTIFGSIPDIFDVHTKIKDDLEDLIVNWDESKSIGDIFLKYSKDLVKTYPPFVNFFEMSKETIIKCEKQKPRFHAFLKINQAKPECGRQSLVELLIRPVQRLPSVALLLNDLKKHTADENPDKSTLEKAIGSLKEVMTHINEDKRKTEAQKQIFDVVYEVDGCPANLLSSHRSLVQRVETISLGEHPCDRGEQVTLFLFNDCLEIARKRHKVIGTFRSPHGQTRPPASLKHIHLMPLSQIKKVLDIRETEDCHNAFALLVRPPTEQANVLLSFQMTSDELPKENWLKMLCRHVANTICKADAENLIYTADPESFEVNTKDMDSTLSRASRAIKKTSKKVTRAFSFSKTPKRALRRALMTSHGSVEGRSPSSNDKHVKEYE

SEQ ID NO: 1030921 - protein, 245 aa, Homo sapiens
MDTCGVGYVALGEAGPVGNMTVVDSPGQEVLNQLDVKTSSEMTSAEASVEMSLPTPLPGFEDSPDQRRLPPEQESLSRLEQPDLSSEMSKVSKPRASKPGRKRGGRTRKGPKRPQQPNPPSAPLVPGLLDQSNPLSTPMPKKRGRKSKAELLLLKLSKDLDRPESQSPKRPPEDFETPSGERPRRRAAQVALLYLQELAEELSTALPAPVSCPEGPKVSSPTKPKKIRQPAACPGGRRGGWCSTG

SEQ ID NO: 1030922 - protein, 243 aa, Homo sapiens
MAPNGLPNHIMAPVWKCLHLTKDFREQKHSYWEFAEWIPLAWKWHLLSELEAAPYLPQEEKSPLFSVQREGLPEDGTLYRINRFSSITAHPERWDVSFFTGGPLWALDWCPVPEGAGASQYVALFSSPDMNETHPLSQLHSGPGLLQLWGLGTLQQESCPGNRAHFVYGMLVTTDASGDLKFCPVEHGELPGTPRQAPLLARLGLLGSGLDQNGKRSAISALTPSGGTDWSENNKMKMMACSI

SEQ ID NO: 1030923 - protein, 270 aa, Homo sapiens
MDTCGVGYVALGEAGPVGNMTVVDSPGQEVLNQLDVKTSSEMTSAEASVEMSLPTPLPGFEDSPDQRRLPPEQESLSRLEQPDLSSEMSKVSKPRASKPGRKRGGRTRKGPKRPQQPNPPSAPLVPGLLDQSNPLSTPMPKKRGRKSKAELLLLKLSKDLDRPESQSPKRPPEDFETPSGERPRRRAAQVGISGFSQELGLRILKRLAALGLGLRGPRGEPYITGKVELVLPCGRVVCARSRFFPGALTGHVGSDHYTLCAEAWLWRTRG

SEQ ID NO: 1030924 - protein, 304 aa, Homo sapiens
TGYEAGMLSDRRRIFELRLPEGLWRGLSVRQNPLKSLLKHKVLAPSRIADSGQPFWGVLMDTCGVGYVALGEAGPVGNMTVVDSPGQEVLNQLDVKTSSEMTSAEASVEMSLPTPLPGFEDSPDQRRLPPEQESLSRLEQPDLSSEMSKVSKPRASKPGRKRGGRTRKGPKRPQQPNPPSAPLVPGLLDQSNPLSTPMPKKRGRKSKAELLLLKLSKDLDRPESQSPKRPPEDFETPSGERPRRRAAQVALLYLQELAEELSTALPAPVSCPEGPKVSSPTKPKKIRQPAACPGGRRGGWCSTG

SEQ ID NO: 1030925 - protein, 298 aa, Homo sapiens
MDTCGVGYVALGEAGPVGNMTVVDSPGQEVLNQLDVKTSSEMTSAEASVEMSLPTPLPGFEDSPDQRRLPPEQESLSRLEQPDLSSEMSKVSKPRASKPGRKRGGRTRKGPKRPQQPNPPSAPLVPGLLDQSNPLSTPMPKKRGRKSKAELLLLKLSKDLDRPESQSPKRPPEDFETPSGERPRRRAAQVALLYLQELAEELSTALPAPVSCPEGPKVSSPTKPKKIRQPAACPGGRRGGGPPDETSQVSHKWKWAREALTSGCEPRFWKTREPGNIAGGPGNSGATERSEDTTPRRR

SEQ ID NO: 1030926 - protein, 243 aa, Homo sapiens; identical to SEQ ID NO: 1030922

SEQ ID NO: 1030927 - protein, 160 aa, Homo sapiens
MPGFVDLILGRISEENRKNPDGGLLGALGSFFFLPPLAGPFISRSQCTLSVFAISSNLDFSFPDIVFHLSEHFLENSGLLSPSSAPWLAFIILDIRAPETRAQHESPALPRLPFEHLRALQGPRPGNLRVLGYEPCQPPVADAAAVLGRSHLAALLATAA

SEQ ID NO: 1030928 - protein, 175 aa, Homo sapiens
MGRAQSLSDSSAVSTPSCPGVAWPGGIVSHSRWTRAEWVRDGTSPVDSSSATPPHLPGEEQHTVRTNGETSSEKIQSQGWAWMWASRDHLPEPDLGDAAPPGSPSSFWTSGLPRQERSTSRQRSRGSPSSTCVPYKVHALATFECSATSHASRLWQTLQQFWADHISRPFSPRRP

SEQ ID NO: 1030929 - protein, 138 aa, Homo sapiens
MVSRTEGNIDDSLIGGNASAEGPEGEGTESTVITGVDIVMNHHLQETSFTKEAYKKYIKDYMKSIKGKLEEQRPERVKPFMTGAAEQIKHILANFKNYQFFIGENMNPDGMVALLDYREDGVTPYMIFFKDGLEMEKC

SEQ ID NO: 1030930 - protein, 113 aa, Homo sapiens
MIIYRDLISHDEMFSDIYKIREIADGLCLEVEGKMVSRTEGNIDDSLIGGNASAEGPEGEGTESTVITGVDIVMNHLPLHLQAQPVRDLPDLVDVGEHLIVADEVPVDNHDGD

SEQ ID NO: 1030931 - protein, 196 aa, Homo sapiens
MIIYRDLISHDEMFSDIYKIREIADGLCLEVEGKMSRSGLRVGEIRAERDSRYSSASHRHEVCANPPRTIILAEETLIIRALRINIEKLEAELILEIGPHDSRDPIHSSRGMYRGHDCFQALGSLEIHSRDRTWYTTLHKRRHQQCHETWATHSSHGTPRYELPGQHRTTSYSKVYEHGREENHRGTQTFNATKNW

SEQ ID NO: 1030932 - protein, 172 aa, Homo sapiens
MIIYRDLISHDEMFSDIYKIREIADGLCLEVEGKMVSRTEGNIDDSLIGGNASAEGPEGEGTESTVITGVDIVMNHHLQETSFTKEAYKKYIKDYMKSIKGKLEEQRPERVKPFMTGAAEQIKHILANFKNYQFFIGENMNPDGMVALLDYREDGVTPYMIFFKDGLEMEKC

SEQ ID NO: 1030933 - protein, 169 aa, Homo sapiens
SGAGSLGGSLGGTLEALRVAPGSGAWHVEGKMVSRTEGNIDDSLIGGNASAEGPEGEGTESTVITGVDIVMNHHLQETSFTKEAYKKYIKDYMKSIKGKLEEQRPERVKPFMTGAAEQIKHILANFKNYQFFIGENMNPDGMVALLDYREDGVTPYMIFFKDGLEMEKC

SEQ ID NO: 1030934 - protein, 114 aa, Homo sapiens
MIIYRDLISHDEMFSDIYKIREIADGLCLEVEGKMVSRTEGNIDDSLIGGNASAEGPEGEGTESTVITGVDIVMNHHLQETSFTKEAYKKYIKDYMKSIKGKLEEQRPERVKWQ

SEQ ID NO: 1030935 - protein, 172 aa, Homo sapiens; identical to SEQ ID NO: 1030932

SEQ ID NO: 1030936 - protein, 172 aa, Homo sapiens; identical to SEQ ID NO: 1030932

SEQ ID NO: 1030937 - protein, 145 aa, Homo sapiens
MIIYRDLISHDEMFSDIYKIREIADGLCLEVEGKMVSRTEGNIDDSLIGGNASAEGPEGEGTESTVITGVDIVMNHHLQETSFTKEAYKKYIKDYMKSIKGKLEEQRPERVKPFMTGAAEQIKHILANFKNYQFFIGENMNPDDS

SEQ ID NO: 1030938 - protein, 273 aa, Homo sapiens
MSILCSQVQGDLSVQRGGIDSRRGAQQQPHRLQPALPGCVVQRAHAIAVLDVNSGLSLKQQGYELQAAPQSSVVEGRESISILVVHVEPLCGAQELCLCGLDLRHQFLHTGHISILDGEDQVLFTTHTGSWAELYTQESRAKAGNGSKLGRQGASHSPLEGSRFRGSKSGVPGSGLLVRYRGILPKVLRELPPHEGKLIFEGVKATWKSGWISACGFRQLQDGLGLGTPIFPAWLWNTSAHPESSQHSLGPQAAAVHWSQGSLPPPAGSGCLL

SEQ ID NO: 1030939 - protein, 275 aa, Homo sapiens
  misc_feature (261)..(261): Xaa can be any naturally occurring amino acid
  misc_feature (268)..(268): Xaa can be any naturally occurring amino acid
  misc_feature (271)..(271): Xaa can be any naturally occurring amino acid
HTLSCLRLFSPLLSLSLFTLPASREVLEVLAADCLWLRLWPMLFKQAELWMPHQGKGNKGEPPSALGLSTRKALSVLKEQLEAVLEGHLRERKKCLTWKEVWRSSFLHHSNRCSCFHWPGASLMLLAVLLLLGCCGGQPAGSRGVGLVNASALFLLLLLNLVLIGRQDRLKRREVERRLRGIIDQIQDALRDGREIQWPSAMYPDLHMPFAPSWSLHWAYRDGHLVNLPVSLLVEGDIIALRPGQESFASLRGIKDDSTSXWNPENFXPLXPSTL

SEQ ID NO: 1030940 - protein, 1356 aa, Homo sapiens
MDLKEKHLGEPPSALGLSTRKALSVLKEQLEAVLEGHLRERKKCLTWKEVWRSSFLHHSNRCSCFHWPGASLMLLAVLLLLGCCGGQPAGSRGVGLVNASALFLLLLLNLVLIGRQDRLKRREVERRLRGIIDQIQDALRDGREIQWPSAMYPDLHMPFAPSWSLHWAYRDGHLVNLPVSLLVEGDIIALRPGQESFASLRGIKDDEHIVLEPGDLFPPFSPPPSPRGEVERGPQSPQQHRLFRVLETPVIDNIRWCLDMALSRPVTALDNERFTVQSVMLHYAVPVVLAGFLITNALRFIFSAPGVTSWQYTLLQLQVNGVLPILPLLFPVLWVLATACGEARVLAQMSKASPSSLLAKFSEDTLSSYTEAVSSQEMLRCIWGHFLRVLGGTSPTLSHSSSLLHSLGSVTVLCCVDKQGILSWPNPSPETVLFFSGKVEPPHSSHEDLTDGLSTRSFCHPEPHERDALLAGSLNNTLHLSNEQERGDWPGEAPKPPEPYSHHKAHGRSKHPSGSNVSFSRDTEGGEEEPSKTQPGMESDPYEAEDFVCDYHLEMLSLSQDQQNPSCIQFDDSNWQLHLTSLKPLGLNVLLNLCDASVTERLCRFSDHLCNIALQESHSAVLPVHVPWGLCELARLIGFTPGAKELFKQENHLALYRLPSAETMKETSLGRLSCVTKRRPPLSHMISLFIKDTTTSTEQMLSHGTADVVLEACTDFWDGADIYPLSGSDRKKVLDFYQRACLSGYCSAFAYKPMNCALSSQLNGKCIELVQVPGQSSIFTMCELPSTIPIKQNARRSSWSSDEGIGEVLEKEDCMQALSGQIFMGMVSSQYQARLDIVRLIDGLVNACIRFVYFSLEDELKSKVFAEKMGLETGWNCHISLTPNGDMPGSEIPPSSPSHAGSLHDDLNQVSRDDAEGLLLMEEEGHSDLISFQPTDSDIPSFLEDSNRAKLPRGIHQVRPHLQNIDNVPLLVPLFTDCTPETMCEMIKIMQEYGEVTCCLGSSANLRNSCLFLQSDISIALDPLYPSRCSWETFGYATSISMAQASDGLSPLQLSGQLNSLPCSLTFRQEETISIIRLIEQARHATYGIRKCFLFLLQCQLTLVVIQFLSCLVQLPPLLSTTDILWLSCFCYPLLSISLLGKPPHSSIMSMATGKNLQSIPKKTQHYFLLCFLLKFSLTISSCLICFGFTLQSFCDSSRDRNLTNCSSVMLPSNDDRAPAWFEDFANGLLSAQKLTAALIVLHTVFISITHVHRTKPLWRKSPLTNLWWAVTVPVVLLGQVVQTAVDLQLWTHRDSHVHFGLEDVPLLTWLLGCLSLVLVVVTNEIVKLHEIRVRVRYQKRQKLQFETKLGMNSPF

SEQ ID NO: 1030941 - protein, 1388 aa, Homo sapiens
MDLKEKHLGEPPSALGLSTRKALSVLKEQLEAVLEGHLRERKKCLTWKEVWRSSFLHHSNRCSCFHWPGASLMLLAVLLLLGCCGGQPAGSRGVGLVNASALFLLLLLNLVLIGRQDRLKRREVERRLRGIIDQIQDALRDGREIQWPSAMYPDLHMPFAPSWSLHWAYRDGHLVNLPVSLLVEGDIIALRPGQESFASLRGIKDDEHIVLEPGDLFPPFSPPPSPRGEVERGPQSPQQHRLFRVLETPVIDNIRWCLDMALSRPVTALDNERFTVQSVMLHYAVPVVLAGFLITNALRFIFSAPGVTSWQYTLLQLQVNGVLPILPLLFPVLWVLATACGEARVLAQMSKASPSSLLAKFSEDTLSSYTEAVSSQEMLRCIWGHFLRVLGGTSPTLSHSSSLLHSLGSVTVLCCVDKQGILSWPNPSPETVLFFSGKVEPPHSSHEDLTDGLSTRSFCHPSGEPHERDALLAGSLNNTLHLSNEQERGDWPGEAPKPPEPYSHHKAHGRSKHPSGSNVSFSRDTEGGEEEPSKTQPGMESDPYEAEDFVCDYHLEMLSLSQDQQNPSCIQFDDSNWQLHLTSLKPLGLNVLLNLCDASVTERLCRFSDHLCNIALQESHSAVLPVHVPWGLCELARLIGFTPGAKELFKQENHLALYRLPSAETMKETSLGRLSCVTKRRPPLSHMISLFIKDTTTSTEQMLSHGTADVVLEACTDFWDGADIYPLSGSDRKKVLDFYQRACLSGYCSAFAYKPMNCALSSQLNGKCIELVQVPGQSSIFTMCELPSTIPIKQNARRSSWSSDEGIGEVLEKEDCMQALSGQIFMGMVSSQYQARLDIVRLIDGLVNACIRFVYFSLEDELKSKVFAEKMGLETGWNCHISLTPNGDMPGSEIPPSSPSHAGSLHDDLNQVSRDDAEGLLLMEEEGHSDLISFQPTDSDIPSFLEDSNRAKLPRGIHQVRPHLQNIDNVPLLVPLFTDCTPETMCEMIKIMQEYGEVTCCLGSSANLRNSCLFLQSDISIALDPLYPSRCSWETFGYATSISMAQASDGLSPLQLSGQLNSLPCSLTFRQEETISIIRLIEQARHATYGIRKCFLFLLQCQLTLVVIQFLSCLVQLPPLLSTTDILWLSCFCYPLLSISLLGKPPHSSIMSMATGKNLQSIPKKTQHYFLLCFLLKFSLTISSCLICFGFTLQSFCDSSRDRNLTNCSSVMLPSNDDRAPAWFEDFANGLLSAQKLTAALIVLHTGERAPWEGVDDGGKGAPLWKSDPHIAPPSPVFISITHVHRTKPLWRKSPLTNLWWAVTVPVVLLGQVVQTAVDLQLWTHRDSHVHFGLEDVPLLTWLLGCLSLVLVVVTNEIVKLHEIRVRVRYQKRQKLQFETKLGMNSPF

SEQ ID NO: 1030942 - protein, 1334 aa, Homo sapiens
MVLMSSRMCLVEALGVPSCSLVPMLFSAALSAAARDELVCSSLCWAWPGPTVPVLSGRGGGTGRGPSRGASLGPENASWVQATDTGLGAVPAPGTLRRAAGAAGGSVSPFHRLAAELSRPGPGQGGTGGCMAGLGARGVGTPWAGRLLGSGWGRLEAGGDSPGVGEGSGAAGPGVALATPKASSAVCSGSLSRHLGLRLTVSDSVRLKSRPGGTGVSRGGGPAGFGRCLMVRFPSSANGSPSPELPRDGGVPSGPGSSSSVSDAGPAGAGGPGGSEGPAGSLSVRLRGPVAPSLGPGLPSSGGGSGLGPETELRRLGGGGGGPLRRARRAKDWLRGVPRAGVGVTLGLVRTRALRPGRRVRVAYCLGCCPLALRPPPQHPPLWARRLRLWDRRLGRGGSGGVAGGPAKEEKAQGAPGGGPGAGLEGEPWGYIKTYGGGPWPGSEEQSLGGRSVPSGRFLSWGGLGSPPLGCGAGCSCEWPDPRERAPMLSWLGERAGGRGSGSGPPPAMAACSSGLSSLPWKVRSRGPAVAGPSPFSSPSMAISSGPLASLAPAFAEGLPLQQAPPKLRQPLHPQHELLLMPELVDPNLLQLLPGEVGHQPHGVVAAAHQLLVVLWQPQCTQPLQQVRWDVAGQPLGDAELSDLWGDLLPVPRLGHPDGRQVLRCHAADGRHIIAGLQKVGSVALQLELAEPVMNGLRVLPLQQLFWPHVLGEDLLPRAAVGQRAVAQVVCQGRRVESWQHLVLSSRGQWLGVLNQEARAMAISALRALPAAGTADAAHAALTAHTIPVTCWAVWAEAHPRKLAVGKRVRGFFGRRLRCPGEAWAQGGGCGGEAGCRDAHPLADHLDNARGEVAYAVCAPLALVDVALPAAVGMLFYTVMTSPARTLRAVGSWRFQKSLSARTFRIPEASRSELLDFPAGLGGGELIHYVQRRLVIRIPDVHVHTSLQKQPHHLGLAIQCGLVERRTRLGLAVDLDPSSQELPDDFSVAILGSQVQGRGVVGVTRVFGLTLQQCHTEVAVQKQLGHLESAKFTGQVQGRLLGLVDQAWVGLMLEEHFCHLIMSILCSQVQGDLSVQRGGIDSRRGAQQQPHRLQPALPGCVVQRAHAIAVLDVNSGLSLKQQGYELQAAPQSSVVEGRESISILVVHVEPLCGAQELCLCGLDLRHQFLHTGHISILDGEDQVLFTTHTGSWAELYTQESRAKAGNGSKLGRQGASHSPLEGSRFRGSKSGVPGSGLLVRYRGILPKVLRELPPHEGKLIFEGVKATWKSGWISACGFRQLQDGLGLGTPIFPAWLWNTSAHPESSQHSLGPQAAAVHWSQGSLPPPAGSGCLL

SEQ ID NO: 1030943 - protein, 1356 aa, Homo sapiens; identical to SEQ ID NO: 1030940

SEQ ID NO: 1030944 - protein, 363 aa, Homo sapiens
MVLMSSRMCLVEALGVPSCSLVPMLFSAALSAAARDELVCSSLCWAWPGPTVPVLSGRGGGTGRGPSRGASLGPENASWVQATDTGLGAVPAPGTLRRAAGAAGGSVSPFHRLAAELSRPGPGQGGTGGCMAGLGARGVGTPWAGRLLGSGWGRLEAGGDSPGVGEGSGAAGPGVALATPKASSAVCSGSLSRHLGLRLTVSDSVRLKSRPGGTGVSRGGGPAGFGRCLMVRFPSSANGSPSPELPRDGGVPSGPGSSSSVSDAGPAGAGGPGGSEGPAGSLSVRLRGPVAPSLGPGLPSSGGGSGLGPETELRRLGGGGGGPLRRARRAKDWLRGVPRAGVGVTLGLVRTRALRPGRRVRVA

SEQ ID NO: 1030945 - protein, 562 aa, Homo sapiens
MDLKEKHLGEPPSALGLSTRKALSVLKEQLEAVLEGHLRERKKCLTWKEVWRSSFLHHSNRCSCFHWPGASLMLLAVLLLLGCCGGQPAGSRGVGLVNASALFLLLLLNLVLIGRQDRLKRREVERRLRGIIDQIQDALRDGREIQWPSAMYPDLHMPFAPSWSLHWAYRDGHLVNLPVSLLVEGDIIALRPGQESFASLRGIKDDEHIVLEPGDLFPPFSPPPSPRGEVERGPQSPQQHRLFRVLETPVIDNIRWCLDMALSRPVTALDNERFTVQSVMLHYAVPVVLAGFLITNALRFIFSAPGVTSWQYTLLQLQVNGVLPILPLLFPVLWVLATACGEARVLAQMSKASPSSLLAKFSEDTLSSYTEAVSSQEMLRCIWGHFLRVLGGTSPTLSHSSSLLHSLGSVTVLCCVDKQGILSWPNPSPETVLFFSGKVEPPHSSHEDLTDGLSTRSFCHPSGEPHERDALLAGSLNNTLHLSNEQERGDWPGEAPKPPEPYSHHKAHGRSKHPSGSNVSFSRDTEGGEEEPSKTQPGMESDPYEAEDFVCDYHLVGPWTRP

SEQ ID NO: 1030946 - protein, 577 aa, Homo sapiens
MDLKEKHLGEPPSALGLSTRKALSVLKEQLEAVLEGHLRERKKCLTWKEVWRSSFLHHSNRCSCFHWPGASLMLLAVLLLLGCCGGQPAGSRGVGLVNASALFLLLLLNLVLIGRQDRLKRREVERRLRGIIDQIQDALRDGREIQWPSAMYPDLHMPFAPSWSLHWAYRDGHLVNLPVSLLVEGDIIALRPGQESFASLRGIKDDEHIVLEPGDLFPPFSPPPSPRGEVERGPQSPQQHRLFRVLETPVIDNIRWCLDMALSRPVTALDNERFTVQSVMLHYAVPVVLAGFLITNALRFIFSAPGVTSWQYTLLQLQVNGVLPILPLLFPVLWVLATACGEARVLAQMSKASPSSLLAKFSEDTLSSYTEAVSSQEMLRCIWGHFLRVLGGTSPTLSHSSSLLHSLGSVTVLCCVDKQGILSWPNPSPETVLFFSGKVEPPHSSHEDLTDGLSTRSFCHPSGEPHERDALLAGSLNNTLHLSNEQERGDWPGEAPKPPEPYSHHKAHGRSKHPSGSNVSFSRDTEGGEEEPSKVTGGGGTGQPHPRPQAVLASLASLASQGLKEQASLPSVPAPPG

SEQ ID NO: 1030947 - protein, 433 aa, Homo sapiens
  misc_feature (1)..(1): Xaa can be any naturally occurring amino acid
XPFLGHPGADSGWTAVEGMSAPPACPPSSGLFLPGSEDLASCSWAFSVLQSLDGHQLRTLGQPAPAFAEGLPLQQAPPKLRQPLHPQHELLLMPELVDPNLLQLLPGEVGHQPHGVVASCSPAACGTVAAPVHTCHSSRSVWKSTVLRTPASQPPPPARGEKGTAEATAEGDSTCPTPQPPLMAHWDVAGQPLGDAELSDLWGDLLPVPRLGHPDGRQVLRCHAADGRHIIAGLQKVGSVALQLELAEPVMNGLRVLPLQQLFWPHVLGEDLLPRAAVGQRAVAQVVCQGRRVESWQHLVLSSRGQWLGVLNQEARAMAISALRALPAAGTADAAHAALTAHTIPVTCWAVWAEAHPRKLAVGKRVRGFFGRRLRCPGEAWAQGGGCGGEAGCRDAHPLADHLDNARGEVAYAVCAPLALVDVALPAAVGMLF

SEQ ID NO: 1030948 - protein, 174 aa, Homo sapiens
MPSLFDKATYGIRKCFLFLLQCQLTLVVIQFLSCLVQLPPLLSTTDILWLSCFCYPLLSISLLGKPPHSSIMSMATGKNLQSIPKKTQHYFLLCFLLKFSLTISSCLICFGFTLQSFCDSSRDRNLTNCSSVMLPSNDDRAPAWFEDFANGLLSAQKLTAALIVLHTCPWSLWW

SEQ ID NO: 1030949 - protein, 363 aa, Homo sapiens; identical to SEQ ID NO: 1030944

SEQ ID NO: 1030950 - protein, 1278 aa, Homo sapiens
MDLKEKHLGEPPSALGLSTRKALSVLKEQLEAVLEGHLRERKKCLTWKEVWRSSFLHHSNRCSCFHWPGASLMLLAVLLLLGCCGGQPAGSRGVGLVNASALFLLLLLNLVLIGRQDRLKRREVERRLRGIIDQIQDALRDGREIQWPSAMYPDLHMPFAPSWSLHWAYRDGHLVNLPVSLLVEGDIIALRPGQESFASLRGIKDDEHIVLEPGDLFPPFSPPPSPRGEVERGPQSPQQHRLFRVLETPVIDNIRWCLDMALSRPVTALDNERFTVQSVMLHYAVPVVLAGFLITNALRFIFSAPGVTSWQYTLLQLQVNGVLPILPLLFPVLWVLATACGEARVLAQMSKASPSSLLAKFSEDTLSSYTEAVSSQEMLRCIWGHFLRVLGGTSPTLSHSSSLLHSLGSVTVLCCVDKQGILSWPNPSPETVLFFSGKVEPPHSSHEDLTDGLSTRSFCHPSGEPHERDALLAGSLNNTLHLSNEQERGDWPGEAPKPPEPYSHHKAHGRSKHPSGSNVSFSRDTEGGEEEPSKTQPGMESDPYEAEDFVCDYHLEMLSLSQDQQNPSCIQFDDSNWQLHLTSLKPLGLNVLLNLCDASVTERLCRFSDHLCNIALQESHSAVLPVHVPWGLCELARLIGFTPGAKELFKQENHLALYRLPSAETMKETSLGRLSCVTKRRPPLSHMISLFIKDTTTSTEQMLSHGTADVVLEACTDFWDGADIYPLSGSDRKKVLDFYQRACLSGYCSAFAYKPMNCALSSQLNGKCIELVQVPGQSSIFTMCELPSTIPIKQNARRSSWSSDEGIGEVLEKEDCMQALSGQIFMGMVSSQYQARLDIVRLIDGLVNACIRFVYFSLEDELKSKVFAEKMGLETGWNCHISLTPNGDMPGSEIPPSSPSHAGSLHDDLNQVSRDDAEGLLLMEEEGHSDLISFQPTDSDIPSFLEDSNRAKLPRGIHQVRPHLQNIDNVPLLVPLFTDCTPETMCEMIKIMQEYGEVTCCLGSSANLRNSCLFLQSDISIALDPLYPSRCSWETFGYATSISMAQASDGLSPLQLSGQLNSLPCSLTFRQEETISIIRLIEQARHATYGIRKCFLFLLQCQLTLVVIQFLSCLVQLPPLLSTTDILWLSCFCYPLLSISLLGKPPHSSIMSMATGKNLQSIPKKTQHYFLLCFLLKFSLTISSCLICFGFTLQSFCDSSRDRNLTNCSSVMLPSNDDRAPAWFEDFANGLLSAQKLTAALIVLHTVFISITHVHRTKPLWRKSPLTNLWWAVTVPVV

SEQ ID NO: 1030951 - protein, 233 aa, Homo sapiens
MDLKEKHLGEPPSALGLSTRKALSVLKEQLEAVLEGHLRERKKCLTWKEVWRSSFLHHSNRCSCFHWPGASLMLLAVLLLLGCCGGQPAGSRGVGLVNASALFLLLLLNLVLIGRQDRLKRREVERRLRGIIDQIQDALRDGREIQWPSAMYPDLHMPFAPSWSLHWAYRDGHLVNLPVSLLVEGDIIALRPGQESFASLRGIKDTERAGAAGGSVALSPLLPGVRVEGRRGG

SEQ ID NO: 1030952 - protein, 1356 aa, Homo sapiens; identical to SEQ ID NO: 1030940

SEQ ID NO: 1030953 - protein, 1356 aa, Homo sapiens; identical to SEQ ID NO: 1030940

SEQ ID NO: 1030954 - protein, 1356 aa, Homo sapiens; identical to SEQ ID NO: 1030940

SEQ ID NO: 1030955 - protein, 1356 aa, Homo sapiens; identical to SEQ ID NO: 1030940

SEQ ID NO: 1030956 - protein, 1356 aa, Homo sapiens; identical to SEQ ID NO: 1030940

SEQ ID NO: 1030957 - protein, 151 aa, Homo sapiens
  misc_feature (13)..(13): Xaa can be any naturally occurring amino acid
  misc_feature (16)..(16): Xaa can be any naturally occurring amino acid
  misc_feature (48)..(48): Xaa can be any naturally occurring amino acid
  misc_feature (66)..(67): Xaa can be any naturally occurring amino acid
  misc_feature (70)..(70): Xaa can be any naturally occurring amino acid
  misc_feature (147)..(147): Xaa can be any naturally occurring amino acid
  misc_feature (151)..(151): Xaa can be any naturally occurring amino acid
MCLLFIYNSGTAXKYXKAAEAQNFKNELLHSGSLHVCFTRPWYSKVSXRSLAAPSEVTSAASGTSXXAPXARPGPGWTPRTSGSRESAAAAAVAGATPAQAAAAPRPSSWALRTSASPRLLRTAASPTPGSCSRPGYGAPCAGGAGXKAAX

SEQ ID NO: 1030958 - protein, 88 aa, Homo sapiens
SPPVWLPKIQWLKDAQGLPGGGGGDNSGTLRDARHSDLAALYTIVAVFPSPLAAQNASLRLNNSVSRFKLRMAKKNYDLRILERASSQ

SEQ ID NO: 1030959 - protein, 104 aa, Homo sapiens
MEEGKGTVTEGARAGWRGLKDPDRPWTEAGSKETDVKLEPKTVMKMETQIPTLALDSFLLPCHGSSLFPWLTPLASLFFPSSSFFFFFFFLRRSFALVTPAGVQ

SEQ ID NO: 1030960 - protein, 737 aa, Homo sapiens
MLLHRGAAYFEMDHNVDQTGKADIINKTSNTRIPEQRFSEHIKDEKNTEFQQRFILKRDDASMDRDDNQIRVPLQDGRRSKSIEEREEEYQRVRERIFARETGQNGYLNDIRGNREGLSRTSSSRQSSTDSELKSLEPRPWSSTDSDGSVRSMRPPVTKASSFSGISILTRGDSIGSSKGGSAGRISRPGMALGAPEVCNQVTSSQSVRGLLPCTAQQQQQQQQQQLPALPPTPQQQPPLNNHMISQADDLSNPFGQMSLSRQGSTEAADPSAALFQTPLISQHPQQTSFIMASTGQPLPTSNYSTSSHAPPTQQVLPPQGYMQPPQQIQVSYYPPGQYPNSNQQYRPLSHPVAYSPQRGQQLPQPSQQPGLQPMMPNQQQAAYQGMIGVQQPQNQGLLSSQRSSMGGQMQGLVVQYTPLPSYQVPVGSDSQNVVQPPFQQPMLVPVSQSVQGGLPAAGVPVYYSMIPPAQQERYEPFCRVSSKPPGSEQYQMPQSPSPCSPPQMPQQYSGVSPSGPGVVVMQLNVPNGPQPPQNPSMVQWSHCKYYSMDQRGQKPGDLYSPDSSPQANTQMSSSPVTSPTQSPAPSPVTSLSSVCTGLSPLPVLTQFPRPGGPAQGDGRYSLLGQPLQYNLSICPPLLHGQSTYTVHQADILMQGSQCCLHGMRVVFQMLKGQSGLKHGNRGKRQALKSASTEPGDKQMLSWGGVLEVTDLPEGITPYLERGQNFFTAGLYNGGPG

SEQ ID NO: 1030961 - protein, 121 aa, Homo sapiens
PDRSLLSIHRMLLHRGAAYFEMDHNVDQTGKAVIINKTSNTRIPEQRFSEHIKDEKNTEFQQRFILKRDDASMDRDDNQIRVPLQDGRRSKSIEEREEEYQRVRERIFARETGQNGYLNDI

SEQ ID NO: 1030962 - protein, 714 aa, Homo sapiens
MLLHRGAAYFEMDHNVDQTGKADIINKTSNTRIPEQRFSEHIKDEKNTEFQQRFILKRDDASMDRDDNQIRVPLQDGRRSKSIEEREEEYQRVRERIFARETGQNGYLNDIRGNREGLSRTSSSRQSSTDSELKSLEPRPWSSTDSDGSVRSMRPPVTKASSFSGISILTRGDSIGSSKGGSAGRISRPGMALGAPEVCNQVTSSQSVRGLLPCTAQQQQQQQQQQLPALPPTPQQQPPLNNHMISQADDLSNPFGQMSLSRQGSTEAADPSAALFQTPLISQHPQQTSFIMASTGQPLPTSNYSTSSHAPPTQQVLPPQGYMQPPQQIQVSYYPPGQYPNSNQQYRPLSHPVAYSPQRGQQLPQPSQQPGLQPMMPNQQQAAYQGMIGVQQPQNQGLLSSQRSSMGGQMQGLVVQYTPLPSYQVPVGSDSQNVVQPPFQQPMLVPVSQSVQGGLPAAGVPVYYSMIPPAQQERYEPFCRVSSKPPGSEQYQMPQSPSPCSPPQMPQQYSGVSPSGPGVVVMQLNVPNGPQPPQNPSMVQWSHCKYYSMDQRGQKPGDLYSPDSSPQANTQMSSSPVTSPTQSPAPSPVTSLSSVCTGLSPLPVLTQFPRPGGPAQGDGRYSLLGQPLQYNLSICPPLLHGQSTYTVHQGQSGLKHGNRGKRQALKSASTEPGDKQMLSWGGVLEVTDLPEGITPYLERGQNFFTAGLYNGGPG

SEQ ID NO: 1030963 - protein, 223 aa, Homo sapiens
MGHCVFENSTGCFVFGCVGGSASFFHMLCCVLPGCPALILFCFYTPAISLDVWLFFPPGLEPGTVVITEQAVDTCFKAEFEQIVLGKRVIRKTDLNKKLVQELLLCSAELSEFTTVVGNTMCTLDFYEGQGRLDGALCSYTEKDKQAYLEAAYAAGVRNIEMESSVFAAMCSACGLQAAVVCVTLLNRLEGDQISSPRNVLSEYQQRPQRLVSYFIKKKLSKA

SEQ ID NO: 1030964 - protein, 180 aa, Homo sapiens
MAATGANAEKAESHKGLEPGTVVITEQAVDTCFKAEFEQIVLGKRVIRKTDLNKKLVQELLLCSAELSEFTTVVGNTMCTLDFYEGQGRLDGALCSYTEKDKQAYLEAAYAAGVRNIEMESSVFAAMCSACGLQAAVVCVTLLNRLEGDQISSPRNVLSEYQQRPQRLVSYFIKKKLSKA

SEQ ID NO: 1030965 - protein, 109 aa, Homo sapiens
SSEPLDQRLSLPHSILRPRLTAWAAWFPEEAERLLLRAVGSSSGPCEMLDPRHLALMWSLSFAAAVVCVTLLNRLEGDQISSPRNVLSEYQQRPQRLVSYFIKKKLSKA

SEQ ID NO: 1030966 - protein, 319 aa, Homo sapiens
HSPGGLVKAEFLGPLDSAGPGEASELIFFSKFIGNTDVAGLGAPLEDLCYDSALMGVSLLWLQFVCVGGSPSRMKAFIRCVGAELGLDCPGRDYPNICAGTDRYAMYKVGPVLSVSHGMGIPSISIMLHELIKLLYYARCSNVTIIRIGTSGGIGLEPGTVVITEQAVDTCFKAEFEQIVLGKRVIRKTDLNKKLVQELLLCSAELSEFTTVVGNTMCTLDFYEGQGRLDGALCSYTEKDKQAYLEAAYAAGVRNIEMESSVFAAMCSACGLQAAVVCVTLLNRLEGDQISSPRNVLSEYQQRPQRLVSYFIKKKLSKA

SEQ ID NO: 1030967 - protein, 180 aa, Homo sapiens; identical to SEQ ID NO: 1030964

SEQ ID NO: 1030968 - protein, 103 aa, Homo sapiens; identical to SEQ ID NO: 825151

SEQ ID NO: 1030969 - protein, 277 aa, Homo sapiens
MAATGANAEKAESHNDCPVRLLNPNIAKMKEDILYHFNLTTSRHNFPALFGDVKFVCVGGSPSRMKAFIRCVGAELGLDCPGRDYPNICTGPASVGGMAATGANAEKAESHKGLEPGTVVITEQAVDTCFKAEFEQIVLGKRVIRKTDLNKKLVQELLLCSAELSEFTTVVGNTMCTLDFYEGQGRLDGALCSYTEKDKQAYLEAAYAAGVRNIEMESSVFAAMCSACGLQAAVVCVTLLNRLEGDQISSPRNVLSEYQQRPQRLVSYFIKKKLSKA

SEQ ID NO: 1030970 - protein, 310 aa, Homo sapiens
MAATGANAEKAESHNDCPVRLLNPNIAKMKEDILYHFNLTTSRHNFPALFGDVKFVCVGGSPSRMKAFIRCVGAELGLDCPGRDYPNICAGTDRYAMYKVGPVLSVSHGMGIPSISIMLHELIKLLYYARCSNVTIIRIGTSGGIGLEPGTVVITEQAVDTCFKAEFEQIVLGKRVIRKTDLNKKLVQELLLCSAELSEFTTVVGNTMCTLDFYEGQGRLDGALCSYTEKDKQAYLEAAYAAGVRNIEMESSVFAAMCSACGLQAAVVCVTLLNRLEGDQISSPRNVLSEYQQRPQRLVSYFIKKKLSKA

SEQ ID NO: 1030971 - protein, 109 aa, Homo sapiens; identical to SEQ ID NO: 1030965

SEQ ID NO: 1030972 - protein, 310 aa, Homo sapiens; identical to SEQ ID NO: 1030970

SEQ ID NO: 1030973 - protein, 310 aa, Homo sapiens; identical to SEQ ID NO: 1030970

SEQ ID NO: 1030974 - protein, 180 aa, Homo sapiens; identical to SEQ ID NO: 1030964

SEQ ID NO: 1030975 - protein, 232 aa, Homo sapiens
MAATGANAEKAESHNDCPVRLLNPNIAKMKEDILYHFNLTTSRHNFPALFGDVKFVCVGGSPSRMKAGLEPGTVVITEQAVDTCFKAEFEQIVLGKRVIRKTDLNKKLVQELLLCSAELSEFTTVVGNTMCTLDFYEGQGRLDGALCSYTEKDKQAYLEAAYAAGVRNIEMESSVFAAMCSACGLQAAVVCVTLLNRLEGDQISSPRNVLSEYQQRPQRLVSYFIKKKLSKA

SEQ ID NO: 1030976 - protein, 117 aa, Homo sapiens
MAATGANAEKAESHNDCPVRLLNPNIAKMKEDILYHFNLTTSRHNFPALFGDVKFVCVGGSPSRMKAFIRCVGAELGLDCPGRDYPNICTGPASVGGMAATGANAEKAESHNDAPAE

SEQ ID NO: 1030977 - protein, 173 aa, Homo sapiens
MIPNLYDPLREIGPEAQNSARGAFLARGPVGTHGGAMMVVGTGNPWRSPPSCPCCSLLGMQMYSRQLASTEWLTIQGGLLGSGLFVFSLTAFNNLENLVFGKGFQAKIFPEILLCLLLALFASGLIHRVCVTTCFIFSMVGLYYINKISSTLYQAAAPVLTPAKVTGKSKKRN

SEQ ID NO: 1030978 - protein, 202 aa, Homo sapiens
MIPNLYDPLREIGPEAQNSARGAFLARGPVGTHGGAMMVVGTGNPWRSPPSCPCCSLLGMQMYSRQLASTEWLTIQGGLLGSGLFVFSLTAFNNLENLVFGKGFQAKIFPEILLCLLLALFASGLIHRVCVTTWYVLDSWVRGVAFRFLALDLTVMVPEFFLPHLPLSLFSLPVFLNLNLDSFLDASVFPRRHQAGRCPLVP

SEQ ID NO: 1030979 - protein, 244 aa, Homo sapiens
  misc_feature (219)..(219): Xaa can be any naturally occurring amino acid
  misc_feature (222)..(222): Xaa can be any naturally occurring amino acid
MIPNLYDPLREIGPEAQNSARGAFLARGPVGTHGGAMMVVGTGNPWRSPPSCPCCSLLGMQMYSRQLASTEWLTIQGGLLGSGLFVFSLTAFNNLENLVFGKGFQAKIFPEILLCLLLALFASGLIHRVCVTTCFIFSMVGLYYINKISSTLYQAAAPVLTAFNNLENLVFGKGFQAKIFPESLLCLLLALFASGLIHRVCVTTCFIFSMVGLYYINKXSSXLYQAAAPVLTPAKVTGKSKKRN

SEQ ID NO: 1030980 - protein, 173 aa, Homo sapiens; identical to SEQ ID NO: 1030977

SEQ ID NO: 1030981 - protein, 5179 aa, Homo sapiens
MGLPLARLAAVCLALSLAGGSELQTEGRTRYHGRNVCSTWGNFHYKTFDGDVFRFPGLCDYNFASDCRGSYKEFAVHLKRGPGQAEAPAGVESILLTIKDDTIYLTRHLAVLNGAVVSTPHYSPGLLIEKSDAYTKVYSRAGLTLMWNREDALMLELDTKFRNHTCGLCGDYNGLQSYSEFLSDGVLFSPLEFGNMQKINQPDVVCEDPEEEVAPASCSEHRAECERLLTAEAFADCQDLVPLEPYLRACQQDRCRCPGGDTCVCSTVAEFSRQCSHAGGRPGNWRTATLCPKTCPGNLVYLESGSPCMDTCSHLEVSSLCEEHRMDGCFCPEGTVYDDIGDSGCVPVSQCHCRLHGHLYTPGQEITNDCEQCVCNAGRWVCKDLPCPGTCALEGGSHITTFDGKTYTFHGDCYYVLAKGDHNDSYALLGELAPCGSTDKQTCLKTVVLLADKKKNAVVFKSDGSVLLNQLQVNLPHVTASFSVFRPSSYHIMVSMAIGVRLQVQLAPVMQLFVTLDQASQGQVQGLCGNFNGLEGDDFKTASGLVEATGAGFANTWKAQSTCHDKLDWLDDPCSLNIESANYAEHWCSLLKKTETPFGRCHSAVDPAEYYKRCKYDTCNCQNNEDCLCAALSSYARACTAKGVMLWGWREHVCNKDVGSCPNSQVFLYNLTTCQQTCRSLSEADSHCLEGFAPVDGCGCPDHTFLDEKGRCVPLAKCSCYHRGLYLEAGDVVVRQEERCVCRDGRLHCRQIRLIGQSCTAPKIHMDCSNLTALATSKPRALSCQTLAAGYYHTECVSGCVCPDGLMDDGRGGCVVEKECPCVHNNDLYSSGAKIKVDCNTCTCKRGRWVCTQAVCHGTCSIYGSGHYITFDGKYYDFDGHCSYVAVQDYCGQNSSLGSFSIITENVPCGTTGVTCSKAIKIFMGRTELKLEDKHRVVIQRDEGHHVAYTTREVGQYLVVESSTGIIVIWDKRTTVFIKLAPSYKGTVCGLCGNFDHRSNNDFTTRDHMVVSSELDFGNSWKEAPTCPDVSTNPEPCSLNPHRRSWAEKQCSILKSSVFSICHSKVDPKPFYEACVHDSCSCDTGGDCECFCSAVASYAQECTKEGACVFWRTPDLCPIFCDYYNPPHECEWHYEPCGNRSFETCRTINGIHSNISVSYLEGCYPRCPKDRPIYEEDLKKCVTADKCGCYVEDTHYPPGASVPTEETCKSCVCTNSSQVVCRPEEGKILNQTQDGAFCYWEICGPNGTVEKHFNICSITTRPSTLTTFTTITLPTTPTSFTTTTTTTTPTSSTVLSTTPKLCCLWSDWINEDHPSSGSDDGDREPFDGVCGAPEDIECRSVKDPHLSLEQHGQKVQCDVSVGFICKNEDQFGNGPFGLCYDYKIRVNCCWPMDKCITTPSPPTTTPSPPPTTTTTLPPTTTPSPPTTTTTTPPPTTTPSPPITTTTTPLPTTTPSPPISTTTTPPPTTTPSPPTTTPSPPTTTPSPPTTTTTTPPPTTTPSPPMTTPITPPASTTTLPPTTTPSPPTTTTTTPPPTTTPSPPTTTPITPPTSTTTLPPTTTPSPPPTTTTTPPPTTTPSPPTTTTPSPPTITTTTPPPTTTPSPPTTTTTTPPPTTTPSPPTTTPITPPTSTTTLPPTTTPSPPPTTTTTPPPTTTPSPPTTTTPSPPITTTTTPPPTTTPSSPITTTPSPPTTTMTTPSPTTTPSSPITTTTTPSSTTTPSPPPTTMTTPSPTTTPSPPTTTMTTLPPTTTSSPLTTTPLPPSITPPTFSPFSTTTPTTPCVPLCNWTGWLDSGKPNFHKPGGDTELIGDVCGPGWAANISCRATMYPDVPIGQLGQTVVCDVSVGLICKNEDQKPGGVIPMAFCLNYEINVQCCECVTQPTTMTTTTTENPTPPTTTPITTTTTVTPTPTPTGTQTPTTTPITTTTTVTPTPTPTGTQTPTTTPITTTTTVTPTPTPTGTQTPTTTPITTTTTVTPTPTPTGTQTPTTTPITTTTTVTPTPTPTGTQTPTTTPITTTTTVTPTPTPTGTQTPTTTPITTTTTVTPTPTPTGTQTPTTTPITTTTTVTPTPTPTGTQTPTTTPITTTTTVTPTPTPTGTQTPTTTPITTTTTVTPTPTPTGTQTPTTTPITTTTTVTPTPTPTGTQTPTTTPITTTTTVTPTPTPTGTQTPTTTPITTTTTVTPTPTPTGTQTPTTTPITTTTTVTPTPTPTGTQTPTTTPITTTTTVTPTPTPTGTQTPTTTPITTTTTVTPTPTPTGTQTPTTTPITTTTTVTPTPTPTGTQTPTTTPITTTTTVTPTPTPTGTQTPTTTPITTTTTVTPTPTPTGTQTPTTTPITTTTTVTPTPTPTGTQTPTTTPITTTTTVTPTPTPTGTQTPTTTPITTTTTVTPTPTPTGTQTPTTTPITTTTTVTPTPTPTGTQTPTTTPITTTTTVTPTPTPTGTQTPTTTPITTTTTVTPTPTPTGTQTPTTTPITTTTTVTPTPTPTGTQTPTTTPITTTTTVTPTPTPTGTQTPTTTPITTTTTVTPTPTPTGTQTPTTTPITTTTTVTPTPTPTGTQTPTTTPITTTTTVTPTPTPTGTQTPTTTPITTTTTVTPTPTPTGTQTPTTTPITTTTTVTPTPTPTGTQTPTTTPITTTTTVTPTPTPTGTQTPTTTPITTTTTVTPTPTPTGTQTPTTTPITTTTTVTPTPTPTGTQTPTTTPITTTTTVTPTPTPTGTQTPTTTPITTTTTVTPTPTPTGTQTPTTTPITTTTTVTPTPTPTGTQTPTTTPITTTTTVTPTPTPTGTQTPTTTPITTTTTVTPTPTPTGTQTPTTTPITTTTTVTPTPTPTGTQTPTTTPITTTTTVTPTPTPTGTQTPTTTPITTTTTVTPTPTPTGTQTPTTTPITTTTTVTPTPTPTGTQTPTTTPITTTTTVTPTPTPTGTQTPTTTPITTTTTVTPTPTPTGTQTPTTTPITTTTTVTPTPTPTGTQTPTTTPITTTTTVTPTPTPTGTQTPTTTPITTTTTVTPTPTPTGTQTPTTTPITTTTTVTPTPTPTGTQTPTTTPITTTTTVTPTPTPTGTQTPTTTPITTTTTVTPTPTPTGTQTPTTTPITTTTTVTPTPTPTGTQTPTTTPITTTTTVTPTPTPTGTQTPTTTPITTTTTVTPTPTPTGTQTPTTTPITTTTTVTPTPTPTGTQTPTTTPITTTTTVTPTPTPTGTQTPTTTPITTTTTVTPTPTPTGTQTPTTTPITTTTTVTPTPTPTGTQTPTTTPITTTTTVTPTPTPTGTQTPTTTPITTTTTVTPTPTPTGTQTPTTTPITTTTTVTPTPTPTGTQTPTTTPITTTTTVTPTPTPTGTQTPTTTPITTTTTVTPTPTPTGTQTPTTTPITTTTTVTPTPTPTGTQTPTTTPITTTTTVTPTPTPTGTQTPTTTPITTTTTVTPTPTPTGTQTPTTTPITTTTTVTPTPTPTGTQTPTTTPITTTTTVTPTPTPTGTQTPTTTPITTTTTVTPTPTPTGTQTPTTTPITTTTTVTPTPTPTGTQTPTTTPITTTTTVTPTPTPTGTQTPTTTPITTTTTVTPTPTPTGTQTPTTTPITTTTTVTPTPTPTGTQTPTTTPITTTTTVTPTPTPTGTQTPTTTPITTTTTVTPTPTPTGTQTPTTTPITTTTTVTPTPTPTGTQTPTTTPITTTTTVTPTPTPTGTQTPTTTPITTTTTVTPTPTPTGTQTPTTTPITTTTTVTPTPTPTGTQTPTTTPITTTTTVTPTPTPTGTQTPTTTPITTTTTVTPTPTPTGTQTPTTTPITTTTTVTPTPTPTGTQTPTTTPITTTTTVTPTPTPTGTQTPTTTPITTTTTVTPTPTPTGTQTPTTTPITTTTTVTPTPTPTGTQTPTTTPITTTTTVTPTPTPTGTQTPTTTPITTTTTVTPTPTPTGTQTPTTTPITTTTTVTPTPTPTGTQTPTTTPITTTTTVTPTPTPTGTQTPTTTPITTTTTVTPTPTPTGTQTPTTTPITTTTTVTPTPTPTGTQTPTTTPITTTTTVTPTPTPTGTQTPTTTPITTTTTVTPTPTPTGTQTPTTTPITTTTTVTPTPTPTGTQTPTTTPITTTTTVTPTPTPTGTQTPTTTPITTTTTVTPTPTPTGTQTPTTTPITTTTTVTPTPTPTGTQTPTTTPITTTTTVTPTPTPTGTQTPTTTPITTTTTVTPTPTPTGTQTGPPTHTSTAPIAELTTSNPPPESSTPQTSRSTSSPLTESTTLLSTLPPAIEMTSTAPPSTPTAPTTTSGGHTLSPPPSTTTSPPGTPTRGTTTGSSSAPTPSTVQTTTTSAWTPTPTPLSTPSIIRTTGLRPYPSSVLICCVLNDTYYAPGEEVYNGTYGDTCYFVNCSLSCTLEFYNWSCPSTPSPTPTPSKSTPTPSKPSSTPSKPTPGTKPPECPDFDPPRQENETWWLCDCFMATCKYNNTVEIVKVECEPPPMPTCSNGLQPVRVEDPDGCCWHWECDCYCTGWGDPHYVTFDGLYYSYQGNCTYVLVEEISPSVDNFGVYIDNYHCDPNDKVSCPRTLIVRHETQEVLIKTVHMMPMQVQVQVNRQAVALPYKKYGLEVYQSGINYVVDIPELGVLVSYNGLSFSVRLPYHRFGNNTKGQCGTCTNTTSDDCILPSGEIVSNCEAAADQWLVNDPSKPHCPHSSSTTKRPAVTVPGGGKTTPHKDCTPSPLCQLIKDSLFAQCHALVPPQHYYDACVFDSCFMPGSSLECASLQAYAALCAQQNICLDWRNHTHGACLVECPSHREYQACGPAEEPTCKSSSSQQNNTVLVEGCFCPEGTMNYAPGFDVCVKTCGCVGPDNVPREFGEHFEFDCKNCVCLEGGSGIICQPKRCSQKPVTHCVEDGTYLATEVNPADTCCNITVCKCNTSLCKEKPSVCPLGFEVKSKMVPGRCCPFYWCESKGVCVHGNAEYQPGSPVYSSKCQDCVCTDKVDNNTLLNVIACTHVPCNTSCSPGFELMEAPGECCKKCEQTHCIIKRPDNQHVILKPGDFKSDPKNNCTFFSCVKIHNQLISSVSNITCPNFDASICIPGSITFMPNGCCKTCTPRNETRVPCSTVPVTTEVSYAGCTKTVLMNHCSGSCGTFVMYSAKAQALDHSCSCCKEEKTSQREVVLSCPNGGSLTHTYTHIESCQCQDTVCGLPTGTSRRARRSPRHLGSG

SEQ ID NO: 1030982 - protein, 3292 aa, Homo sapiens
QPTPPLPATMGLPLARLAAVCLALSLAGGSELQTEGRTRYHGRNVCSTWGNFHYKTFDGDVFRFPGLCDYNFASDCRGSYKEFAVHLKRGPGQAEAPAGVESILLTIKDDTIYLTRHLAVLNGAVVSTPHYSPGLLIEKSDAYTKVYSRAGLTLMWNREDALMLELDTKFRNHTCGLCGDYNGLQSYSEFLSDGVLFSPLEFGNMQKINQPDVVCEDPEEEVAPASCSEHRAECERLLTAEAFADCQDLVPLEPYLRACQQDRCRCPGGDTCVCSTVAEFSRQCSHAGGRPGNWRTATLCPKTCPGNLVYLESGSPCMDTCSHLEVSSLCEEHRMDGCFCPEGTVYDDIGDSGCVPVSQCHCRLHGHLYTPGQEITNDCEQCVCNAGRWVCKDLPCPGTCALDGGSHITTFDGKTYTFHGDCYYVLAKGDHNDSYALLGELAPCGSTDKQTCLKTVVLLADKKKNVVVFKSDGSVLLNELQVNLPHVTASFSVFRPSSYHIMVSMAIGVRLQVQLAPVMQLFVTLDQASQGQVQGLCGNFNGLEGDDFKTASGLVEATGAGFANTWKAQSSCHDKLDWLDDPCSLNIESANYAEHWCSLLKKTETPFGRCHSAVDPAEYYKRCKYDTCNCQNNEDCLCAALSSYARACTAKGVMLWGWREHVCNKDVGSCPNSQVFLYNLTTCQQTCRSLSEADSHCLEGFAPVDGCGCPDHTFLDEKGRCVPLAKCSCYHRGLYLEAGDVVVRQEERCVCRDGRLHCRQIRLIGQSCTAPKIHMDCSNLTALATSKPRALSCQTLAAGYYHTECVSGCVCPDGLMDDGRGGCVVEKECPCVHNNDLYSSGAKIKVDCNTCTCKRGRWVCTQAVCHGTCSIYGSGHYITFDGKYYDFDGHCSYVAVQDYCGQNSSLGSFSIITENVPCGTTGVTCSKAIKIFMGRTELKLEDKHRVVIQRDEGHHVAYTTREVGQYLVVESSTGIIVIWDKRTTVFIKLAPSYKGTVCGLCGNFDHRSNNDFTTRDHMVVSSELDFGNSWKEAPTCPDVSTNPEPCSLNPHRRSWAEKQCSILKSSVFSICHSKVDPKPFYEACVHDSCSCDTGGDCECFCSAVASYAQECTKEGACVFWRTPDLCPIFCDYYNPPHECEWHYEPCGNRSFETCRTINGIHSNISVSYLEGCYPRCPKDRPIYEEDLKKCVTADKCGCYVEDTHYPPGASVPTEETCKSCVCTNSSQVVCRPEEGKILNQTQDGAFCYWEICGPNGTVEKHFNICSITTRPSTLTTFTTITLPTTPTSFTTTTTTTTPTSSTVLSTTPKLCCLWSDWINEDHPSSGSDDGDREPFDGVCGAPEDIECRSVKDPHLSLEQHGQKVQCDVSVGFICKNEDQFGNGPFGLCYDYKIRVNCCWPMDKCITTPSPPTTTPSPPPTTTTTLPPTTTPSPPTTTTTTPPPTTTPSPPITTTTTPLPTTTPSPPISTTTTPPPTTTPSPPTTTPSPPTTTPSPPTTTTTTPPPTTTPSPPMTTPITPPASTTTLPPTTTPSPPTTTTTTPPPTTTPSPPTTTPITPPTSTTTLPPTTTPSPPPTTTTTPPPTTTPSPPTTTTPSPPTITTTTPPPTTTPSPPTTTTTTPPPTTTPSPPTTTPITPPTSTTTLPPTTTPSPPPTTTTTPPPTTTPSPPTTTTPSPPITTTTTPPPTTTPSSPITTTPSPPTTTMTTPSPTTTPSSPITTTTTPSSTTTPSPPPTTMTTPSPTTTPSPPTTTMTTLPPTTTSSPLTTTPLPPSITPPTFSPFSTTTPTTPCVPLCNWTGWLDSGKPNFHKPGGDTELIGDVCGPGWAANISCRATMYPDVPIGQLGQTVVCDVSVGLICKNEDQKPGGVIPMAFCLNYEINVQCCECVTQPTTMTTTTTENPTPPTTTPITTTTTVTPTPTPTGTQTPTTTPITTTTTVTPTPTPTGTQTPTTTPITTTTTVTPTPTPTGTQTPTTTPITTTTTVTPTPTPTGTQTPTTTPITTTTTVTPTPTPITTTTTVTPTPTPTGTQTPTTTPITTTTTVTPTPTPTGTQTPTTTPITTTTTVTPTPTPTGTQTPTTTPITTTTTVTPTPTPTGTQTPTTTPITTTTTVTPTPTPTGTQTPTTTPITTTTTVTPTPTPTGTQTPTTTPITTTTTVTPTPTPTGTQTPTTTPITTTTTVTPTPTPTGTQTPTTTPITTTTTVTPTPTPTGTQTPTTTPITTTTTVTPTPTPTGTQTPTTTPITTTTTVTPTPTPTGTQTPTTTPITTTTTVTPTPTPTGTQTPTMIPISTTTTVTPTPTPTTGSTGPPTHTSTAPIAELTTSNPPPESSTPQTSRSTSSPLTESTTLLSTLPPAIEMTSTAPPSTPTAPTTTSGGHTLSPPPSTTTSPPGTPTRGTTTGSSSAPTPSTVQTTTTSAWTPTPTPLSTPSIIRTTGLRPYPSSVLICCVLNDTYYAPGEEVYNGTYGDTCYFVNCSLSCTLEFYNWSCPSTPSPTPTPSKSTPTPSKPSSTPSKPTPGTKPPECPDFDPPRQENETWWLCDCFMATCKYNNTVEIVKVECEPPPMPTCSNGLQPVRVEDPDGCCWHWECDCYCTGWGDPHYVTFDGLYYSYQGNCTYVLVEEISPSVDNFGVYIDNYHCDPNDKVSCPRTLIVRHETQEVLIKTVHMMPMQVQVQVNRQAVALPYKKYGLEVYQSGINYVVDIPELGVLVSYNGLSFSVRLPYHRFGNNTKGQCGTCTNTTSDDCILPSGEIVSNCEAAADQWLVNDPSKPHCPHSSSTTKRPAVTVPGGGKTTPHKDCTPSPLCQLIKDSLFAQCHALVPPQHYYDACVFDSCFMPGSSLECASLQAYAALCAQQNICLDWRNHTHGACLVECPSHREYQACGPAEEPTCKSSSSQQNNTVLVEGCFCPEGTMNYAPGFDVCVKTCGCVGPDNVPREFGEHFEFDCKNCVCLEGGSGIICQPKRCSQKPVTHCVEDGTYLATEVNPADTCCNITVCKCNTSLCKEKPSVCPLGFEVKSKMVPGRCCPFYWCESKGVCVHGNAEYQPGSPVYSSKCQDCVCTDKVDNNTLLNVIACTHVPCNTSCSPGFELMEAPGECCKKCEQTHCIIKRPDNQHVILKPGDFKSDPKNNCTFFSCVKIHNQLISSVSNITCPNFDASICIPGSITFMPNGCCKTCTPRNETRVPCSTVPVTTEVSYAGCTKTVLMNHCSGSCGTFVMYSAKAQALDHSCSCCKEEKTSQREVVLSCPNGGSLTHTYTHIESCQCQDTVCGLPTGTSRRARRSPRHLGSG

SEQ ID NO: 1030983 - protein, 1575 aa, Homo sapiens
THHLNLLLFYDFPLMSLITTMNPLTITTPSPPTTTMTTLPPTTTSSPLTTTPLPPSITPPTFSPFSTTTPTTPCVPLCNWTGWLDSGKPNFHKPGGDTELIGDVCGPGWAANISCRATMYPDVPIGQLGQTVVCDVSVGLICKNEDQKPGGVIPMAFCLNYEINVQCCECVTQPTTMTTTTTENPTPPTTTPITTTTTVTPTPTPTGTQTPTTTPITTTTTVTPTPTPTGTQTPTTTPITTTTTVTPTPTPTGTQTPTTTPITTTTTVTPTPTPTGTQTPTTTPITTTTTVTPTPTPITTTTTVTPTPTPTGTQTPTTTPITTTTTVTPTPTPTGTQTPTTTPITTTTTVTPTPTPTGTQTPTTTPITTTTTVTPTPTPTGTQTPTTTPITTTTTVTPTPTPTGTQTPTTTPITTTTTVTPTPTPTGTQTPTTTPITTTTTVTPTPTPTGTQTPTTTPITTTTTVTPTPTPTGTQTPTTTPITTTTTVTPTPTPTGTQTPTTTPITTTTTVTPTPTPTGTQTPTTTPITTTTTVTPTPTPTGTQTPTTTPITTTTTVTPTPTPTGTQTPTMIPISTTTTVTPTPTPTTGSTGPPTHTSTAPIAELTTSNPPPESSTPQTSRSTSSPLTESTTLLSTLPPAIEMTSTAPPSTPTAPTTTSGGHTLSPPPSTTTSPPGTPTRGTTTGSSSAPTPSTVQTTTTSAWTPTPTPLSTPSIIRTTGLRPYPSSVLICCVLNDTYYAPGEEVYNGTYGDTCYFVNCSLSCTLEFYNWSCPSTPSPTPTPSKSTPTPSKPSSTPSKPTPGTKPPECPDFDPPRQENETWWLCDCFMATCKYNNTVEIVKVECEPPPMPTCSNGLQPVRVEDPDGCCWHWECDCYCTGWGDPHYVTFDGLYYSYQGNCTYVLVEEISPSVDNFGVYIDNYHCDPNDKVSCPRTLIVRHETQEVLIKTVHMMPMQVQVQVNRQAVALPYKKYGLEVYQSGINYVVDIPELGVLVSYNGLSFSVRLPYHRFGNNTKGQCGTCTNTTSDDCILPSGEIVSNCEAAADQWLVNDPSKPHCPHSSSTTKRPAVTVPGGGKTTPHKDCTPSPLCQLIKDSLFAQCHALVPPQHYYDACVFDSCFMPGSSLECASLQAYAALCAQQNICLDWRNHTHGACLVECPSHREYQACGPAEEPTCKSSSSQQNNTVLVEGCFCPEGTMNYAPGFDVCVKTCGCVGPDNVPREFGEHFEFDCKNCVCLEGGSGIICQPKRCSQKPVTHCVEDGTYLATEVNPADTCCNITVCKCNTSLCKEKPSVCPLGFEVKSKMVPGRCCPFYWCESKGVCVHGNAEYQPGSPVYSSKCQDCVCTDKVDNNTLLNVIACTHVPCNTSCSPGFELMEAPGECCKKCEQTHCIIKRPDNQHVILKPGDFKSDPKNNCTFFSCVKIHNQLISSVSNITCPNFDASICIPGSITFMPNGCCKTCTPRNETRVPCSTVPVTTEVSYAGCTKTVLMNHCSGSCGTFVMYSAKAQALDHSCSCCKEEKTSQREVVLSCPNGGSLTHTYTHIESCQCQDTVCGLPTGTSRRARRSPRHLGSG

SEQ ID NO: 1030984 - protein, 3208 aa, Homo sapiens
QPTPPLPATMGLPLARLAAVCLALSLAGGSELQTEGRTRYHGRNVCSTWGNFHYKTFDGDVFRFPGLCDYNFASDCRGSYKEFAVHLKRGPGQAEAPAGVESILLTIKDDTIYLTRHLAVLNGAVVSTPHYSPGLLIEKSDAYTKVYSRAGLTLMWNREDALMLELDTKFRNHTCGLCGDYNGLQSYSEFLSDGVLFSPLEFGNMQKINQPDVVCEDPEEEVAPASCSEHRAECERLLTAEAFADCQDLVPLEPYLRACQQDRCRCPGGDTCVCSTVAEFSRQCSHAGGRPGNWRTATLCPKTCPGNLVYLESGSPCMDTCSHLEVSSLCEEHRMDGCFCPEGTVYDDIGDSGCVPVSQCHCRLHGHLYTPGQEITNDCEQCVCNAGRWVCKDLPCPGTCALDGGSHITTFDGKTYTFHGDCYYVLAKGDHNDSYALLGELAPCGSTDKQTCLKTVVLLADKKKNVVVFKSDGSVLLNELQVNLPHVTASFSVFRPSSYHIMVSMAIGVRLQVQLAPVMQLFVTLDQASQGQVQGLCGNFNGLEGDDFKTASGLVEATGAGFANTWKAQSSCHDKLDWLDDPCSLNIESANYAEHWCSLLKKTETPFGRCHSAVDPAEYYKRCKYDTCNCQNNEDCLCAALSSYARACTAKGVMLWGWREHVCNKDVGSCPNSQVFLYNLTTCQQTCRSLSEADSHCLEGFAPVDGCGCPDHTFLDEKGRCVPLAKCSCYHRGLYLEAGDVVVRQEERCVCRDGRLHCRQIRLIGQSCTAPKIHMDCSNLTALATSKPRALSCQTLAAGYYHTECVSGCVCPDGLMDDGRGGCVVEKECPCVHNNDLYSSGAKIKVDCNTCTCKRGRWVCTQAVCHGTCSIYGSGHYITFDGKYYDFDGHCSYVAVQDYCGQNSSLGSFSIITENVPCGTTGVTCSKAIKIFMGRTELKLEDKHRVVIQRDEGHHVAYTTREVGQYLVVESSTGIIVIWDKRTTVFIKLAPSYKGTVCGLCGNFDHRSNNDFTTRDHMVVSSELDFGNSWKEAPTCPDVSTNPEPCSLNPHRRSWAEKQCSILKSSVFSICHSKVDPKPFYEACVHDSCSCDTGGDCECFCSAVASYAQECTKEGACVFWRTPDLCPIFCDYYNPPHECEWHYEPCGNRSFETCRTINGIHSNISVSYLEGCYPRCPKDRPIYEEDLKKCVTADKCGCYVEDTHYPPGASVPTEETCKSCVCTNSSQVVCRPEEGKILNQTQDGAFCYWEICGPNGTVEKHFNICSITTRPSTLTTFTTITLPTTPTSFTTTTTTTTPTSSTVLSTTPKLCCLWSDWINEDHPSSGSDDGDREPFDGVCGAPEDIECRSVKDPHLSLEQHGQKVQCDVSVGFICKNEDQFGNGPFGLCYDYKIRVNCCWPMDKCITTPSPPTTTPSPPPTTTTTLPPTTTPSPPTTTTTTPPPTTTPSPPITTTTTPLPTTTPSPPISTTTTPPPTTTPSPPTTTPSPPTTTPSPPTTTTTTPPPTTTPSPPMTTPITPPASTTTLPPTTTPSPPTTTTTTPPPTTTPSPPTTTPITPPTSTTTLPPTTTPSPPPTTTTTPPPTTTPSPPTTTTPSPPTITTTTPPPTTTPSPPTTTTTTPPPTTTPSPPTTTPITPPTSTTTLPPTTTPSPPPTTTTTPPPTTTPSPPTTTTPSPPITTTTTPPPTTTPSSPITTTPSPPTTTMTTPSPTTTPSSPITTTTTPSSTTTPSPPPTTMTTPSPTTTPSPPTTTMTTLPPTTTSSPLTTTPLPPSITPPTFSPFSTTTPTTPCVPLCNWTGWLDSGKPNFHKPGGDTELIGDVCGPGWAANISCRATMYPDVPIGQLGQTVVCDVSVGLICKNEDQKPGGVIPMAFCLNYEINVQCCECVTQPTTMTTTTTENPTPPTTTPITTTTTVTPTPTPTGTQTPTTTPITTTTTVTPTPTPTGTQTPTTTPITTTTTVTPTPTPTGTQTPTTTPITTTTTVTPTPTPTGTQTPTTTPITTTTTVTPTPTPITTTTTVTPTPTPTGTQTPTTTPITTTTTVTPTPTPTGTQTPTTTPITTTTTVTPTPTPTGTQTPTTTPITTTTTVTPTPTPTGTQTPTTTPITTTTTVTPTPTPTGTQTPTTTPITTTTTVTPTPTPTGTQTPTTTPITTTTTVTPTPTPTGTQTPTTTPITTTTTVTPTPTPTGTQTPTTTPITTTTTVTPTPTPTGTQTPTTTPITTTTTVTPTPTPTGTQTPTTTPITTTTTVTPTPTPTGTQTPTTTPITTTTTVTPTPTPTGTQTPTMIPISTTTTVTPTPTPTTGSTGPPTHTSTAPIAELTTSNPPPESSTPQTSRSTSSPLTESTTLLSTLPPAIEMTSTAPPSTPTAPTTTSGGHTLSPPPSTTTSPPGTPTRGTTTGSSSAPTPSTVQTTTTSAWTPTPTPLSTPSIIRTTGLRPYPSSVLICCVLNDTYYAPGEEVYNGTYGDTCYFVNCSLSCTLEFYNWSCPSTPSPTPTPSKSTPTPSKPSSTPSKPTPGTKPPECPDFDPPRQENETWWLCDCFMATCKYNNTVEIVKVECEPPPMPTCSNGLQPVRVEDPDGCCWHWECDCYCTGWGDPHYVTFDGLYYSYQGNCTYVLVEEISPSVDNFGVYIDNYHCDPNDKVSCPRTLIVRHETQEVLIKTVHMMPMQVQVQVNRQAVALPYKKYGLEVYQSGINYVVDIPELGVLVSYNGLSFSVRLPYHRFGNNTKGQCGTCTNTTSDDCILPSGEIVSNCEAAADQWLVNDPSKPHCPHSSSTTKRPAVTVPGGGKTTPHKDCTPSPLCQLIKDSLFAQCHALVPPQHYYDACVFDSCFMPGSSLECASLQAYAALCAQQNICLDWRNHTHGACLVECPSHREYQACGPAEEPTCKSSSSQQNNTVLVEGCFCPEGTMNYAPGFDVCVKTCGCVGPDNVPREFGEHFEFDCKNCVCLEGGSGIICQPKRCSQKPVTHCVEDGTYLATEVNPADTCCNITVCKCNTSLCKEKPSVCPLGFEVKSKMVPGRCCPFYWCESKGVCVHGNAEYQPGSPVYSSKCQDCVCTDKVDNNTLLNVIACTHVPCNTSCSPGFELMEAPGECCKKCEQTHCIIKRPDNQHVILKPGDFKSDPKNNCTFFSCVKIHNQLISSVSNITCPNFDASICIPGSITFMPNGCCKTCTPRNETRCLLYKSPSPESLFPLHHGPVMRI

SEQ ID NO: 1030985 - protein, 2785 aa, Homo sapiens
QPTPPLPATMGLPLARLAAVCLALSLAGGSELQTEGRTRYHGRNVCSTWGNFHYKTFDGDVFRFPGLCDYNFASDCRGSYKEFAVHLKRGPGQAEAPAGVESILLTIKDDTIYLTRHLAVLNGAVVSTPHYSPGLLIEKSDAYTKVYSRAGLTLMWNREDALMLELDTKFRNHTCGLCGDYNGLQSYSEFLSDGVLFSPLEFGNMQKINQPDVVCEDPEEEVAPASCSEHRAECERLLTAEAFADCQDLVPLEPYLRACQQDRCRCPGGDTCVCSTVAEFSRQCSHAGGRPGNWRTATLCPKTCPGNLVYLESGSPCMDTCSHLEVSSLCEEHRMDGCFCPEGTVYDDIGDSGCVPVSQCHCRLHGHLYTPGQEITNDCEQCVCNAGRWVCKDLPCPGTCALDGGSHITTFDGKTYTFHGDCYYVLAKGDHNDSYALLGELAPCGSTDKQTCLKTVVLLADKKKNVVVFKSDGSVLLNELQVNLPHVTASFSVFRPSSYHIMVSMAIGVRLQVQLAPVMQLFVTLDQASQGQVQGLCGNFNGLEGDDFKTASGLVEATGAGFANTWKAQSSCHDKLDWLDDPCSLNIESANYAEHWCSLLKKTETPFGRCHSAVDPAEYYKRCKYDTCNCQNNEDCLCAALSSYARACTAKGVMLWGWREHVCNKDVGSCPNSQVFLYNLTTCQQTCRSLSEADSHCLEGFAPVDGCGCPDHTFLDEKGRCVPLAKCSCYHRGLYLEAGDVVVRQEERCVCRDGRLHCRQIRLIGQSCTAPKIHMDCSNLTALATSKPRALSCQTLAAGYYHTECVSGCVCPDGLMDDGRGGCVVEKECPCVHNNDLYSSGAKIKVDCNTCTCKRGRWVCTQAVCHGTCSIYGSGHYITFDGKYYDFDGHCSYVAVQDYCGQNSSLGSFSIITENVPCGTTGVTCSKAIKIFMGRTELKLEDKHRVVIQRDEGHHVAYTTREVGQYLVVESSTGIIVIWDKRTTVFIKLAPSYKGTVCGLCGNFDHRSNNDFTTRDHMVVSSELDFGNSWKEAPTCPDVSTNPEPCSLNPHRRSWAEKQCSILKSSVFSICHSKVDPKPFYEACVHDSCSCDTGGDCECFCSAVASYAQECTKEGACVFWRTPDLCPIFCDYYNPPHECEWHYEPCGNRSFETCRTINGIHSNISVSYLEGCYPRCPKDRPIYEEDLKKCVTADKCGCYVEDTHYPPGASVPTEETCKSCVCTNSSQVVCRPEEGKILNQTQDGAFCYWEICGPNGTVEKHFNICSITTRPSTLTTFTTITLPTTPTSFTTTTTTTTPTSSTVLSTTPKLCCLWSDWINEDHPSSGSDDGDREPFDGVCGAPEDIECRSVKDPHLSLEQHGQKVQCDVSVGFICKNEDQFGNGPFGLCYDYKIRVNCCWPMDKCITTPSPPTTTPSPPPTTTTTLPPTTTPSPPTTTTTTPPPTTTPSPPITTTTTPLPTTTPSPPISTTTTPPPTTTPSPPTTTPSPPTTTPSPPTTTTTTPPPTTTPSPPMTTPITPPASTTTLPPTTTPSPPTTTTTTPPPTTTPSPPTTTPITPPTSTTTLPPTTTPSPPPTTTTTPPPTTTPSPPTTTTPSPPTITTTTPPPTTTPSPPTTTTTTPPPTTTPSPPTTTPITPPTSTTTLPPTTTPSPPPTTTTTPPPTTTPSPPTTTTPSPPITTTTTPPPTTTPSSPITTTPSPPTTTMTTPSPTTTPSSPITTTTTPSSTTTPSPPPTTMTTPSPTTTPSPPTTTMTTLPPTTTSSPLTTTPLPPSITPPTFSPFSTTTPTTPCVPLCNWTGWLDSGKPNFHKPGGDTELIGDVCGPGWAANISCRATMYPDVPIGQLGQTVVCDVSVGLICKNEDQKPGGVIPMAFCLNYEINVQCCAPPTRGTTTGSSSAPTPSTVQTTTTSAWTPTPTPLSTPSIIRTTGLRPYPSSVLICCVLNDTYYAPGEEVYNGTYGDTCYFVNCSLSCTLEFYNWSCPSTPSPTPTPSKSTPTPSKPSSTPSKPTPGTKPPECPDFDPPRQENETWWLCDCFMATCKYNNTVEIVKVECEPPPMPTCSNGLQPVRVEDPDGCCWHWECDCYCTGWGDPHYVTFDGLYYSYQGNCTYVLVEEISPSVDNFGVYIDNYHCDPNDKVSCPRTLIVRHETQEVLIKTVHMMPMQVQVQVNRQAVALPYKKYGLEVYQSGINYVVDIPELGVLVSYNGLSFSVRLPYHRFGNNTKGQCGTCTNTTSDDCILPSGEIVSNCEAAADQWLVNDPSKPHCPHSSSTTKRPAVTVPGGGKTTPHKDCTPSPLCQLIKDSLFAQCHALVPPQHYYDACVFDSCFMPGSSLECASLQAYAALCAQQNICLDWRNHTHGACLVECPSHREYQACGPAEEPTCKSSSSQQNNTVLVEGCFCPEGTMNYAPGFDVCVKTCGCVGPDNVPREFGEHFEFDCKNCVCLEGGSGIICQPKRCSQKPVTHCVEDGTYLATEVNPADTCCNITVCKCNTSLCKEKPSVCPLGFEVKSKMVPGRCCPFYWCESKGVCVHGNAEYQPGSPVYSSKCQDCVCTDKVDNNTLLNVIACTHVPCNTSCSPGFELMEAPGECCKKCEQTHCIIKRPDNQHVILKPGDFKSDPKNNCTFFSCVKIHNQLISSVSNITCPNFDASICIPGSITFMPNGCCKTCTPRNETRVPCSTVPVTTEVSYAGCTKTVLMNHCSGSCGTFVMYSAKAQALDHSCSCCKEEKTSQREVVLSCPNGGSLTHTYTHIESCQCQDTVCGLPTGTSRRARRSPRHLGSG

SEQ ID NO: 1030986 - protein, 2529 aa, Homo sapiens
QPTPPLPATMGLPLARLAAVCLALSLAGGSELQTEGRTRYHGRNVCSTWGNFHYKTFDGDVFRFPGLCDYNFASDCRGSYKEFAVHLKRGPGQAEAPAGVESILLTIKDDTIYLTRHLAVLNGAVVSTPHYSPGLLIEKSDAYTKVYSRAGLTLMWNREDALMLELDTKFRNHTCGLCGDYNGLQSYSEFLSDGVLFSPLEFGNMQKINQPDVVCEDPEEEVAPASCSEHRAECERLLTAEAFADCQDLVPLEPYLRACQQDRCRCPGGDTCVCSTVAEFSRQCSHAGGRPGNWRTATLCPKTCPGNLVYLESGSPCMDTCSHLEVSSLCEEHRMDGCFCPEGTVYDDIGDSGCVPVSQCHCRLHGHLYTPGQEITNDCEQCVCNAGRWVCKDLPCPGTCALDGGSHITTFDGKTYTFHGDCYYVLAKGDHNDSYALLGELAPCGSTDKQTCLKTVVLLADKKKNVVVFKSDGSVLLNELQVNLPHVTASFSVFRPSSYHIMVSMAIGVRLQVQLAPVMQLFVTLDQASQGQVQGLCGNFNGLEGDDFKTASGLVEATGAGFANTWKAQSSCHDKLDWLDDPCSLNIESANYAEHWCSLLKKTETPFGRCHSAVDPAEYYKRCKYDTCNCQNNEDCLCAALSSYARACTAKGVMLWGWREHVCNKDVGSCPNSQVFLYNLTTCQQTCRSLSEADSHCLEGFAPVDGCGCPDHTFLDEKGRCVPLAKCSCYHRGLYLEAGDVVVRQEERCVCRDGRLHCRQIRLIGQSCTAPKIHMDCSNLTALATSKPRALSCQTLAAGYYHTECVSGCVCPDGLMDDGRGGCVVEKECPCVHNNDLYSSGAKIKVDCNTCTCKRGRWVCTQAVCHGTCSIYGSGHYITFDGKYYDFDGHCSYVAVQDYCGQNSSLGSFSIITENVPCGTTGVTCSKAIKIFMGRTELKLEDKHRVVIQRDEGHHVAYTTREVGQYLVVESSTGIIVIWDKRTTVFIKLAPSYKGTVCGLCGNFDHRSNNDFTTRDHMVVSSELDFGNSWKEAPTCPDVSTNPEPCSLNPHRRSWAEKQCSILKSSVFSICHSKVDPKPFYEACVHDSCSCDTGGDCECFCSAVASYAQECTKEGACVFWRTPDLCPIFCDYYNPPHECEWHYEPCGNRSFETCRTINGIHSNISVSYLEGCYPRCPKDRPIYEEDLKKCVTADKCGCYVEDTHYPPGASVPTEETCKSCVCTNSSQVVCRPEEGKILNQTQDGAFCYWEICGPNGTVEKHFNICSITTRPSTLTTFTTITLPTTPTSFTTTTTTTTPTSSTVLSTTPKLCCLWSDWINEDHPSSGSDDGDREPFDGVCGAPEDIECRSVKDPHLSLEQHGQKVQCDVSVGFICKNEDQFGNGPFGLCYDYKIRVNCCWPMDKCITTPSPPTTTPSPPPTTTTTLPPTTTPSPPTTTTTTPPPTTTPSPPITTTTTPLPTTTPSPPISTTTTPPPTTTPSPPTTTPSPPTTTPSPPTTTTTTPPPTTTPSPPMTTPITPPASTTTLPPTTTPSPPTTTTTTPPPTTTPSPPTTTPITPPTSTTTLPPTTTPSPPPTTTTTPPPTTTPSPPTTTTPSPPTITTTTPPPTTTPSPPTTTTTTPPPTTTPSPPTTTPITPPTSTTTLPPTTTPSPPPTTTTTPPPTTTPSPPTTTTPSPPITTTTTPPPTTTPSSPITTTPSPPTTTMTTPSPTTTPSSPITTTTTPSSTTTPSPPPTTMTTPSPTTTPSPPTTTMTTLPPTTTSSPLTTTPLPPSITPPTFSPFSTTTPTTPCVPLCNWTGWLDSGKPNFHKPGGDTELIGDVCGPGWAANISCRATMYPDVPIGQLGQTVVCDVSVGLICKNEDQKPGGVIPMAFCLNYEINVQCCECVTQPTTMTTTTTENPTPPTTTPITTTTTVTPTPTPTGTQTPTTTPITTTTTVTPTPTPTGTQTPTTTPITTTTTVTPTPTPTGTQTPTTTPITTTTTVTPTPTPTGTQTPTTTPITTTTTVTPTPTPITTTTTVTPTPTPTGTQTPTTTPITTTTTVTPTPTPTGTQTPTTTPITTTTTVTPTPTPTGTQTPTTTPITTTTTVTPTPTPTGTQTPTTTPITTTTTVTPTPTPTGTQTPTTTPITTTTTVTPTPTPTGTQTPTTTPITTTTTVTPTPTPTGTQTPTTTPITTTTTVTPTPTPTGTQTPTTTPITTTTTVTPTPTPTGTQTPTTTPITTTTTVTPTPTPTGTQTPTTTPITTTTTVTPTPTPTGTQTPTTTPITTTTTVTPTPTPTGTQTPTMIPISTTTTVTPTPTPTTGSTGPPTHTSTAPIAELTTSNPPPESSTPQTSRSTSSPLTESTTLLSTLPPAIEMTSTAPPSTPTAPTTTSGGHTLSPPPSTTTSPPGTPTRGTTTGSSSAPTPSTVQTTTTSAWTPTPTPLSTPSIIRTTGLRPYPSSVLICCVLNDTYYAPGEEVYNGTYGDTCYFVNCSLSCTLEFYNWSCPSTPSPTPTPTLGLTVASPSSAPALQWHLQAPNGLQSWIS

SEQ ID NO: 1030987 - protein, 2931 aa, Homo sapiens
QPTPPLPATMGLPLARLAAVCLALSLAGGSELQTEGRTRYHGRNVCSTWGNFHYKTFDGDVFRFPGLCDYNFASDCRGSYKEFAVHLKRGPGQAEAPAGVESILLTIKDDTIYLTRHLAVLNGAVVSTPHYSPGLLIEKSDAYTKVYSRAGLTLMWNREDALMLELDTKFRNHTCGLCGDYNGLQSYSEFLSDGVLFSPLEFGNMQKINQPDVVCEDPEEEVAPASCSEHRAECERLLTAEAFADCQDLVPLEPYLRACQQDRCRCPGGDTCVCSTVAEFSRQCSHAGGRPGNWRTATLCPKTCPGNLVYLESGSPCMDTCSHLEVSSLCEEHRMDGCFCPEGTVYDDIGDSGCVPVSQCHCRLHGHLYTPGQEITNDCEQCVCNAGRWVCKDLPCPGTCALDGGSHITTFDGKTYTFHGDCYYVLAKGDHNDSYALLGELAPCGSTDKQTCLKTVVLLADKKKNVVVFKSDGSVLLNELQVNLPHVTASFSVFRPSSYHIMVSMAIGVRLQVQLAPVMQLFVTLDQASQGQVQGLCGNFNGLEGDDFKTASGLVEATGAGFANTWKAQSSCHDKLDWLDDPCSLNIESANYAEHWCSLLKKTETPFGRCHSAVDPAEYYKRCKYDTCNCQNNEDCLCAALSSYARACTAKGVMLWGWREHVCNKDVGSCPNSQVFLYNLTTCQQTCRSLSEADSHCLEGFAPVDGCGCPDHTFLDEKGRCVPLAKCSCYHRGLYLEAGDVVVRQEERCVCRDGRLHCRQIRLIGQSCTAPKIHMDCSNLTALATSKPRALSCQTLAAGYYHTECVSGCVCPDGLMDDGRGGCVVEKECPCVHNNDLYSSGAKIKVDCNTCTCKRGRWVCTQAVCHGTCSIYGSGHYITFDGKYYDFDGHCSYVAVQDYCGQNSSLGSFSIITENVPCGTTGVTCSKAIKIFMGRTELKLEDKHRVVIQRDEGHHVAYTTREVGQYLVVESSTGIIVIWDKRTTVFIKLAPSYKGTVCGLCGNFDHRSNNDFTTRDHMVVSSELDFGNSWKEAPTCPDVSTNPEPCSLNPHRRSWAEKQCSILKSSVFSICHSKVDPKPFYEACVHDSCSCDTGGDCECFCSAVASYAQECTKEGACVFWRTPDLCPIFCDYYNPPHECEWHYEPCGNRSFETCRTINGIHSNISVSYLEGCYPRCPKDRPIYEEDLKKCVTADKCGCYVEDTHYPPGASVPTEETCKSCVCTNSSQVVCRPEEGKILNQTQDGAFCYWEICGPNGTVEKHFNICSITTRPSTLTTFTTITLPTTPTSFTTTTTTTTPTSSTVLSTTPKLCCLWSDWINEDHPSSGSDDGDREPFDGVCGAPEDIECRSVKDPHLSLEQHGQKVQCDVSVGFICKNEDQFGNGPFGLCYDYKIRVNCCWPMDKCITTPSPPTTTPSPPPTTTTTLPPTTTPSPPTTTTTTPPPTTTPSPPITTTTTPLPTTTPSPPISTTTTPPPTTTPSPPTTTPSPPTTTPSPPTTTTTTPPPTTTPSPPMTTPITPPASTTTLPPTTTPSPPTTTTTTPPPTTTPSPPTTTPITPPTSTTTLPPTTTPSPPPTTTTTPPPTTTPSPPTTTTPSPPTITTTTPPPTTTPSPPTTTTTTPPPTTTPSPPTTTPITPPTSTTTLPPTTTPSPPPTTTTTPPPTTTPSPPTTTTPSPPITTTTTPPPTTTPSSPITTTPSPPTTTMTTPSPTTTPSSPITTTTTPSSTTTPSPPPTTMTTPSPTTTPSPPTTTMTTLPPTTTSSPLTTTPLPPSITPPTFSPFSTTTPTTPCVPLCNWTGWLDSGKPNFHKPGGDTELIGDVCGPGWAANISCRATMYPDVPIGQLGQTVVCDVSVGLICKNEDQKPGGVIPMAFCLNYEINVQCCECVTQPTTMTTTTTENPTPTPITTTTTVTPTPTPTGTQTPTMIPISTTTTVTPTPTPTTGSTGPPTHTSTAPIAELTTSNPPPESSTPQTSRSTSSPLTESTTLLSTLPPAIEMTSTAPPSTPTAPTTTSGGHTLSPPPSTTTSPPGTPTRGTTTGSSSAPTPSTVQTTTTSAWTPTPTPLSTPSIIRTTGLRPYPSSVLICCVLNDTYYAPGEEVYNGTYGDTCYFVNCSLSCTLEFYNWSCPSTPSPTPTPSKSTPTPSKPSSTPSKPTPGTKPPECPDFDPPRQENETWWLCDCFMATCKYNNTVEIVKVECEPPPMPTCSNGLQPVRVEDPDGCCWHWECDCYCTGWGDPHYVTFDGLYYSYQGNCTYVLVEEISPSVDNFGVYIDNYHCDPNDKVSCPRTLIVRHETQEVLIKTVHMMPMQVQVQVNRQAVALPYKKYGLEVYQSGINYVVDIPELGVLVSYNGLSFSVRLPYHRFGNNTKGQCGTCTNTTSDDCILPSGEIVSNCEAAADQWLVNDPSKPHCPHSSSTTKRPAVTVPGGGKTTPHKDCTPSPLCQLIKDSLFAQCHALVPPQHYYDACVFDSCFMPGSSLECASLQAYAALCAQQNICLDWRNHTHGACLVECPSHREYQACGPAEEPTCKSSSSQQNNTVLVEGCFCPEGTMNYAPGFDVCVKTCGCVGPDNVPREFGEHFEFDCKNCVCLEGGSGIICQPKRCSQKPVTHCVEDGTYLATEVNPADTCCNITVCKCNTSLCKEKPSVCPLGFEVKSKMVPGRCCPFYWCESKGVCVHGNAEYQPGSPVYSSKCQDCVCTDKVDNNTLLNVIACTHVPCNTSCSPGFELMEAPGECCKKCEQTHCIIKRPDNQHVILKPGDFKSDPKNNCTFFSCVKIHNQLISSVSNITCPNFDASICIPGSITFMPNGCCKTCTPRNETRVPCSTVPVTTEVSYAGCTKTVLMNHCSGSCGTFVMYSAKAQALDHSCSCCKEEKTSQREVVLSCPNGGSLTHTYTHIESCQCQDTVCGLPTGTSRRARRSPRHLGSG

SEQ ID NO: 1030988 - protein, 3215 aa, Homo sapiens
QPTPPLPATMGLPLARLAAVCLALSLAGGSELQTEGRTRYHGRNVCSTWGNFHYKTFDGDVFRFPGLCDYNFASDCRGSYKEFAVHLKRGPGQAEAPAGVESILLTIKDDTIYLTRHLAVLNGAVVSTPHYSPGLLIEKSDAYTKVYSRAGLTLMWNREDALMLELDTKFRNHTCGLCGDYNGLQSYSEFLSDGVLFSPLEFGNMQKINQPDVVCEDPEEEVAPASCSEHRAECERLLTAEAFADCQDLVPLEPYLRACQQDRCRCPGGDTCVCSTVAEFSRQCSHAGGRPGNWRTATLCPKTCPGNLVYLESGSPCMDTCSHLEVSSLCEEHRMDGCFCPEGTVYDDIGDSGCVPVSQCHCRLHGHLYTPGQEITNDCEQCVCNAGRWVCKDLPCPGTCALDGGSHITTFDGKTYTFHGDCYYVLAKGDHNDSYALLGELAPCGSTDKQTCLKTVVLLADKKKNVVVFKSDGSVLLNELQVNLPHVTASFSVFRPSSYHIMVSMAIGVRLQVQLAPVMQLFVTLDQASQGQVQGLCGNFNGLEGDDFKTASGLVEATGAGFANTWKAQSSCHDKLDWLDDPCSLNIESANYAEHWCSLLKKTETPFGRCHSAVDPAEYYKRCKYDTCNCQNNEDCLCAALSSYARACTAKGVMLWGWREHVCNKDVGSCPNSQVFLYNLTTCQQTCRSLSEADSHCLEGFAPVDGCGCPDHTFLDEKGRCVPLAKCSCYHRGLYLEAGDVVVRQEERCVCRDGRLHCRQIRLIGQSCTAPKIHMDCSNLTALATSKPRALSCQTLAAGYYHTECVSGCVCPDGLMDDGRGGCVVEKECPCVHNNDLYSSGAKIKVDCNTCTCKRGRWVCTQAVCHGTCSIYGSGHYITFDGKYYDFDGHCSYVAVQDYCGQNSSLGSFSIITENVPCGTTGVTCSKAIKIFMGRTELKLEDKHRVVIQRDEGHHVAYTTREVGQYLVVESSTGIIVIWDKRTTVFIKLAPSYKGTVCGLCGNFDHRSNNDFTTRDHMVVSSELDFGNSWKEAPTCPDVSTNPEPCSLNPHRRSWAEKQCSILKSSVFSICHSKVDPKPFYEACVHDSCSCDTGGDCECFCSAVASYAQECTKEGACVFWRTPDLCPIFCDYYNPPHECEWHYEPCGNRSFETCRTINGIHSNISVSYLEGCYPRCPKDRPIYEEDLKKCVTADKCGCYVEDTHYPPGASVPTEETCKSCVCTNSSQVVCRPEEGKILNQTQDGAFCYWEICGPNGTVEKHFNICSITTRPSTLTTFTTITLPTTPTSFTTTTTTTTPTSSTVLSTTPKLCCLWSDWINEDHPSSGSDDGDREPFDGVCGAPEDIECRSVKDPHLSLEQHGQKVQCDVSVGFICKNEDQFGNGPFGLCYDYKIRVNCCWPMDKCITTPSPPTTTPSPPPTTTTTLPPTTTPSPPTTTTTTPPPTTTPSPPITTTTTPLPTTTPSPPISTTTTPPPTTTPSPPTTTPSPPTTTPSPPTTTTTTPPPTTTPSPPMTTPITPPASTTTLPPTTTPSPPTTTTTTPPPTTTPSPPTTTPITPPTSTTTLPPTTTPSPPPTTTTTPPPTTTPSPPTTTTPSPPTITTTTPPPTTTPSPPTTTTTTPPPTTTPSPPTTTPITPPTSTTTLPPTTTPSPPPTTTTTPPPTTTPSPPTTTTPSPPITTTTTPPPTTTPSSPITTTPSPPTTTMTTPSPTTTPSSPITTTTTPSSTTTPSPPPTTMTTPSPTTTPSPPTTTMTTLPPTTTSSPLTTTPLPPSITPPTFSPFSTTTPTTPCVPLCNWTGWLDSGKPNFHKPGGDTELIGDVCGPGWAANISCRATMYPDVPIGQLGQTVVCDVSVGLICKNEDQKPGGVIPMAFCLNYEINVQCCECVTQPTTMTTTTTENPTPPTTTPITTTTTVTPTPTPTGTQTPTTTPITTTTTVTPTPTPTGTQTPTTTPITTTTTVTPTPTPTGTQTPTTTPITTTTTVTPTPTPTGTQTPTTTPITTTTTVTPTPTPITTTTTVTPTPTPTGTQTPTTTPITTTTTVTPTPTPTGTQTPTTTPITTTTTVTPTPTPTGTQTPTTTPITTTTTVTPTPTPTGTQTPTTTPITTTTTVTPTPTPTGTQTPTTTPITTTTTVTPTPTPTGTQTPTTTPITTTTTVTPTPTPTGTQTPTTTPITTTTTVTPTPTPTGTQTPTTTPITTTTTVTPTPTPTGTQTPTTTPITTTTTVTPTPTPTGTQTPTTTPITTTTTVTPTPTPTGTQTPTTTPITTTTTVTPTPTPTGTQTPTMIPISTTTTVTPTPTPTTGSTGPPTHTSTAPIAELTTSNPPPESSTPQTSRSTSSPLTESTTLLSTLPPAIEMTSTAPPSTPTAPTTTSGGHTLSPPPSTTTSPPGTPTRGTTTGSSSAPTPSTVQTTTTSAWTPTPTPLSTPSIIRTTGLRPYPSSVLICCVLNDTYYAPGEEVYNGTYGDTCYFVNCSLSCTLEFYNWSCPSTPSPTPTPSKSTPTPSKPSSTPSKPTPGTKPPECPDFDPPRQENETWWLCDCFMATCKYNNTVEIVKVECEPPPMPTCSNGLQPVRVEDPDGCCWHWECDCYCTGWGDPHYVTFDGLYYSYQGNCTYVLVEEISPSVDNFGVYIDNYHCDPNDKVSCPRTLIVRHETQEVLIKTVHMMPMQVQVQVNRQAVALPYKKYGLEVYQSGINYVVDIPELGVLVSYNGLSFSVRLPYHRFGNNTKGQCGTCTNTTSDDCILPSGEIVSNCEAAADQWLVNDPSKPHCPHSSSTTKRPAVTVPGGGKTTPHKDCTPSPLCQLIKDSLFAQCHALVPPQHYYDACVFDSCFMPGSSLECASLQAYAALCAQQNICLDWRNHTHGACLVECPSHREYQACGPAEEPTCKSSSSQQNNTVLVEGCFCPEGTMNYAPGFDVCVKTCGCVGPDNVPREFGEHFEFDCKNCVCLEGGSGIICQPKRCSQKPVTHCVEDGTYLATEVNPADTCCNITVCKCNTSLCKEKPSVCPLGFEVKSKMVPGRCCPFYWCESKGVCVHGNAEYQPGSPVYSSKCQDCVCTDKVDNNTLLNVIACTHVPCNTSCSPGFELMEAPGECCKKCEQTHCIIKRPDNQHVILKPGDFKSDPKNNCTFFSCGTFVMYSAKAQALDHSCSCCKEEKTSQREVVLSCPNGGSLTHTYTHIESCQCQDTVCGLPTGTSRRARRSPRHLGSG

SEQ ID NO: 1030989 - protein, 2892 aa, Homo sapiens
QPTPPLPATMGLPLARLAAVCLALSLAGGSELQTEGRTRYHGRNVCSTWGNFHYKTFDGDVFRFPGLCDYNFASDCRGSYKEFAVHLKRGPGQAEAPAGVESILLTIKDDTIYLTRHLAVLNGAVVSTPHYSPGLLIEKSDAYTKVYSRAGLTLMWNREDALMLELDTKFRNHTCGLCGDYNGLQSYSEFLSDGVLFSPLEFGNMQKINQPDVVCEDPEEEVAPASCSEHRAECERLLTAEAFADCQDLVPLEPYLRACQQDRCRCPGGDTCVCSTVAEFSRQCSHAGGRPGNWRTATLCPKTCPGNLVYLESGSPCMDTCSHLEVSSLCEEHRMDGCFCPEGTVYDDIGDSGCVPVSQCHCRLHGHLYTPGQEITNDCEQCVCNAGRWVCKDLPCPGTCALDGGSHITTFDGKTYTFHGDCYYVLAKGDHNDSYALLGELAPCGSTDKQTCLKTVVLLADKKKNVVVFKSDGSVLLNELQVNLPHVTASFSVFRPSSYHIMVSMAIGVRLQVQLAPVMQLFVTLDQASQGQVQGLCGNFNGLEGDDFKTASGLVEATGAGFANTWKAQSSCHDKLDWLDDPCSLNIESANYAEHWCSLLKKTETPFGRCHSAVDPAEYYKRCKYDTCNCQNNEDCLCAALSSYARACTAKGVMLWGWREHVCNKDVGSCPNSQVFLYNLTTCQQTCRSLSEADSHCLEGFAPVDGCGCPDHTFLDEKGRCVPLAKCSCYHRGLYLEAGDVVVRQEERCVCRDGRLHCRQIRLIGQSCTAPKIHMDCSNLTALATSKPRALSCQTLAAGYYHTECVSGCVCPDGLMDDGRGGCVVEKECPCVHNNDLYSSGAKIKVDCNTCTCKRGRWVCTQAVCHGTCSIYGSGHYITFDGKYYDFDGHCSYVAVQDYCGQNSSLGSFSIITENVPCGTTGVTCSKAIKIFMGRTELKLEDKHRVVIQRDEGHHVAYTTREVGQYLVVESSTGIIVIWDKRTTVFIKLAPSYKGTVCGLCGNFDHRSNNDFTTRDHMVVSSELDFGNSWKEAPTCPDVSTNPEPCSLNPHRRSWAEKQCSILKSSVFSICHSKVDPKPFYEACVHDSCSCDTGGDCECFCSAVASYAQECTKEGACVFWRTPDLCPIFCDYYNPPHECEWHYEPCGNRSFETCRTINGIHSNISVSYLEGCYPRCPKDRPIYEEDLKKCVTADKCGCYVEDTHYPPGASVPTEETCKSCVCTNSSQVVCRPEEGKILNQTQDGAFCYWEICGPNGTVEKHFNICSITTRPSTLTTFTTITLPTTPTSFTTTTTTTTPTSSTVLSTTPKLCCLWSDWINEDHPSSGSDDGDREPFDGVCGAPEDIECRSVKDPHLSLEQHGQKVQCDVSVGFICKNEDQFGNGPFGLCYDYKIRVNCCWPMDKCITTPSPPTTTPSPPPTTTTTLPPTTTPSPPTTTTTTPPPTTTPSPPITTTTTPLPTTTPSPPISTTTTPPPTTTPSPPTTTPSPPTTTPSPPTTTTTTPPPTTTPSPPMTTPITPPASTTTLPPTTTPSPPTTTTTTPPPTTTPSPPTTTPITPPTSTTTLPPTTTPSPPPTTTTTPPPTTTPSPPTTTTPSPPTITTTTPPPTTTPSPPTTTTTTPPPTTTPSPPTTTPITPPTSTTTLPPTTTPSPPPTTTTTPPPTTTPSPPTTTTPSPPITTTTTPPPTTTPSSPITTTPSPPTTTMTTPSPTTTPSSPITTTTTPSSTTTPSPPPTTMTTPSPTTTPSPPTTTMTTLPPTTTSSPLTTTPLPPSITPPTFSPFSTTTPTTPCVPLCNWTGWLDSGKPNFHKPGGDTELIGDVCGPGWAANISCRATMYPDVPIGQLGQTVVCDVSVGLICKNEDQKPGGVIPMAFCLNYEINVQCCECVTQPTTMTTTTTENPTPPTTTPITTTTTVTPTPTPTGTQTPTTTPITTTTTVTPTPTPTGTQTPTTTPITTTTTVTPTPTPTGTQTPTTTPITTTTTVTPTPTPTGTQTPTTTPITTTTTVTPTPTPITTTTTVTPTPTPTGTQTPTTTPITTTTTVTPTPTPTGTQTPTTTPITTTTTVTPTPTPTGTQTPTTTPITTTTTVTPTPTPTGTQTPTTTPITTTTTVTPTPTPTGTQTPTTTPITTTTTVTPTPTPTGTQTPTTTPITTTTTVTPTPTPTGTQTPTTTPITTTTTVTPTPTPTGTQTPTTTPITTTTTVTPTPTPTGTQTPTTTPITTTTTVTPTPTPTGTQTPTTTPITTTTTVTPTPTPTGTQTPTTTPITTTTTVTPTPTPTGTQTPTMIPISTTTTVTPTPTPTTGSTGPPTHTSTAPIAELTTSNPPPESSTPQTSRSTSSPLTESTTLLSTLPPAIEMTSTAPPSTPTAPTTTSGGHTLSPPPSTTTSPPGTPTRGTTTGSSSAPTPSTVQTTTTSAWTPTPTPLSTPSIIRTTGLRPYPSSVLICCVLNDTYYAPGEEVYNGTYGDTCYFVNCSLSCTLEFYNWSCPSTPSPTPTPSKSTPTPSKPSSTPSKPTPGTKPPECPDFDPPRQENETWWLCDCFMATCKYNNTVEIVKVECEPPPMPTCSNGLQPVRVEDPDGCCWHWECDCYCTGWGDPHYVTFDGLYYSYQGNCTYVLVEEISPSVDNFGVYIDNYHCDPNDKVSCPRTLIVRHETQEVLIKTVHMMPMQVQVQVNRQAVALPYKKYGLEVYQSGINYVVDIPELGVLVSYNGLSFSVRLPYHRFGNNTKGQCGTCTNTTSDDCILPSGEIVSNCEAAADQWLVNDPSKPHCPHSSSTTKRPAVTVPGGGKTTPHKDCTPSPLCQLIKDSLFAQCHALVPPQHYYDACVFDSCFMPGSSLECASLQAYAALCAQQNICLDWRNHTKTTASRPAAAGVGAQPSGEPAVPKH

SEQ ID NO: 1030990 - protein, 720 aa, Homo sapiens
  misc_feature (27)..(27): Xaa can be any naturally occurring amino acid
  misc_feature (32)..(32): Xaa can be any naturally occurring amino acid
  misc_feature (49)..(49): Xaa can be any naturally occurring amino acid
VVALVQDTADKHRGRLGPQACGPDDVXVKSGXGVGIQAPVVVVCTVLGXGAEDDPVVYREWDIDNYHCDPNDKVSCPRTLIVRHETQEVLIKTVHMMPMQVQVQVNRQAVALPYKKYGLEVYQSGINYVVDIPELGVLVSYNGLSFSVRLPYHRFGNNTKGQCGTCTNTTSDDCILPSGEIVSNCEAAADQWLVNDPSKPHCPHSSSTTKRPAVTVPGGGKTTPHKDCTPSPLCQLIKDSLFAQCHALVPPQHYYDACVFDSCFMPGSSLECASLQAYAALCAQQNICLDWRNHTHGACLVECPSHREYQACGPAEEPTCKSSSSQQNNTVLVEGCFCPEGTMNYAPGFDVCVKTCGCVGPDNVPREFGEHFEFDCKNCVCLEGGSGIICQPKRCSQKPVTHCVEDGTYLATEVNPADTCCNITVCKCNTSLCKEKPSVCPLGFEVKSKMVPGRCCPFYWCESKGVCVHGNAEYQPGSPVYSSKCQDCVCTDKVDNNTLLNVIACTHVPCNTSCSPGFELMEAPGECCKKCEQTHCIIKRPDNQHVILKPGDFKSDPKNNCTFFSCVKIHNQLISSVSNITCPNFDASICIPGSITFMPNGCCKTCTPRNETRVPCSTVPVTTEVSYAGCTKTVLMNHCSGSCGTFVMYSAKAQALDHSCSCCKEEKTSQREVVLSCPNGGSLTHTYTHIESCQCQDTVCGLPTGTSRRARRSPRHLGSG

SEQ ID NO: 1030991 - protein, 143 aa, Homo sapiens
MGQCRGLRTARKLRSHRRDQKWHDKQYKKAHLGTALKANPFGGASHAKGIVLEKVGVEAKQPNSAIRKCVRVQLIKNGKKITAFVPNDGCLNFIEENDEVLVAGFGRKGHAVGDIPGVRFKVVKVANVSLLALYKGKKERPRS

SEQ ID NO: 1030992 - protein, 229 aa, Homo sapiens
GTIRAVFGSRHSWAGFWVIEFFVRPTAHFWEGPHIFSRLWRLRSLLGFAWAALGPFLRQHRHRSPSLSALAGEYERPFGGPWGPTRMGKCRGLRTARKLRSHRRDQKWHDKQYKKAHLGTALKANPFGGASHAKGIVLEKVGVEAKQPNSAIRKCVRVQLIKNGKKITAFVPNDGCLNFIEENDEVLVAGFGRKGHAVGDIPGVRFKVVKVANVSLLALYKGKKERPRS

SEQ ID NO: 1030993 - protein, 239 aa, Homo sapiens
GTIRAVFGSRHSWAGFWVIEFFVRPTAHFWEGPHIFSRLWRLRSLLGFAWAALGPFLRQHRHRSPSLSALAGEYERPFGGPWGPTRMGKCRGLRTARKLRSHRRDQKWHDKQYKKAHLGTALKANPFGGASHAKGIVLEKVGVEAKQPNSAIRKCVRVQLIKNGKKITAFVPNDGCLNFIEENDEVLVAGFGRKGHAVGDIPGVRFKVVKVANVSLLALYKGKKERPRSYRYDLVYTRL

SEQ ID NO: 1030994 - protein, 158 aa, Homo sapiens
PAVLLSFAQARGADRMGKCRGLRTARKLRSHRRDQKWHDKQYKKAHLGTALKANPFGGASHAKGIVLEKVGVEAKQPNSAIRKCVRVQLIKNGKKITAFVPNDGCLNFIEENDEVLVAGFGRKGHAVGDIPGVRFKVVKVANVSLLALYKGKKERPRS

SEQ ID NO: 1030995 - protein, 41 aa, Homo sapiens
MEPRGTSTRGGRRKDPLVINHPRAYHRGAEEITDTQGGYDE

SEQ ID NO: 1030996 - protein, 110 aa, Homo sapiens
PAVLLSFAQARGADRMGKCRGLRTARKLRSHRRDQKWHDKQYKKAHLGTALKANPFGGASHAKGIVLEKVGVEAKQPNSAIRKCVRVQLSGYSGDLVGALLCLQAPSASG

SEQ ID NO: 1030997 - protein, 98 aa, Homo sapiens
SSSPPSLPTNSDPSEPTQPPPYYVSTTPSSIQKNKLDTYRQRPPPPQSWSCTCRSVLVPIVCFSRLAPRPPRAVDIWAHSLPLQAPGAPPPRVLCVCG

SEQ ID NO: 1030998 - protein, 290 aa, Homo sapiens
DRKGTATGKQALHCTRMSVKWTSVILLIQLSFCFSSGNCGKVLVWAAEYSHWMNIKTILDELIQRGHEVTVLASSASILFDPNNSSALKIEIYPTSLTKTELENFIMQQIKRWSDLPKDTFWLYFSQVQEIMSIFGDITRKFCKDVVSNKKFMKKVQESRFDVIFADAIFPCSELLAELFNIPFVYSLSFSPGYTFEKHSGGFIFPPSYVPVVMSELTDQMTFMERVKNMIYVLYFDFWFEIFDMKKWDQFYSEVLGRPTTLSETMGKADVWLIRNSWNFQFPSSTLTKC

SEQ ID NO: 1030999 - protein, 529 aa, Homo sapiens
MSVKWTSVILLIQLSFCFSSGNCGKVLVWAAEYSHWMNIKTILDELIQRGHEVTVLASSASILFDPNNSSALKIEIYPTSLTKTELENFIMQQIKRWSDLPKDTFWLYFSQVQEIMSIFGDITRKFCKDVVSNKKFMKKVQESRFDVIFADAIFPCSELLAELFNIPFVYSLSFSPGYTFEKHSGGFIFPPSYVPVVMSELTDQMTFMERVKNMIYVLYFDFWFEIFDMKKWDQFYSEVLGRPTTLSETMGKADVWLIRNSWNFQFPHPLLPNVDFVGGLHCKPAKPLPKEMEDFVQSSGENGVVVFSLGSMVSNMTEERANVIASALAQIPQKVLWRFDGNKPDTLGLNTRLYKWIPQNDLLGHPKTRAFITHGGANGIYEAIYHGIPMVGIPLFADQPDNIAHMKARGAAVRVDFNTMSSTDLLNALKRVINDPSYKENVMKLSRIQHDQPVKPLDRAVFWIEFVMRHKGAKHLRVAAHDLTWFQYHSLDVIGFLLVCVATVIFIVTKCCLFCFWKFARKAKKGKND

SEQ ID NO: 1031000 - protein, 280 aa, Homo sapiens
MGKADVWLIRNSWNFQFPYPLLPNVDFVGGLHCKPAKPLPKEMEDFVQSSGENGVVVFSLGSMVSNMTEERANVIASALAQIPQKVLWRFDGNKPDTLGLNTRLYKWIPQNDLLGHPKTRAFITHGGANGIYEAIYHGIPMVGIPLFADQPDNIAHMKARGAAVRVDFNTMSSTDLLNALKRVINDPSYKENVMKLSRIQHDQPVKPLDRAVFWIEFVMRHKGAKHLRVAAHDLTWFQYHSLDVIGFLLVCVATVIFIVTKCCLFCFWKFARKAKKGKND

SEQ ID NO: 1031001 - protein, 545 aa, Homo sapiens
DRKGTATGKQALHCTRMSVKWTSVILLIQLSFCFSSGNCGKVLVWAAEYSHWMNIKTILDELIQRGHEVTVLASSASILFDPNNSSALKIEIYPTSLTKTELENFIMQQIKRWSDLPKDTFWLYFSQVQEIMSIFGDITRKFCKDVVSNKKFMKKVQESRFDVIFADAIFPCSELLAELFNIPFVYSLSFSPGYTFEKHSGGFIFPPSYVPVVMSELTDQMTFMERVKNMIYVLYFDFWFEIFDMKKWDQFYSEVLGRPTTLSETMGKADVWLIRNSWNFQFPYPLLPNVDFVGGLHCKPAKPLPKEMEDFVQSSGENGVVVFSLGSMVSNMTEERANVIASALAQIPQKVLWRFDGNKPDTLGLNTRLYKWIPQNDLLGHPKTRAFITHGGANGIYEAIYHGIPMVGIPLFADQPDNIAHMKARGAAVRVDFNTMSSTDLLNALKRVINDPSYKENVMKLSRIQHDQPVKPLDRAVFWIEFVMRHKGAKHLRVAAHDLTWFQYHSLDVIGFLLVCVFFMMFMITKCCLFCFRKLAKTGKKKKRD

SEQ ID NO: 1031002 - protein, 109 aa, Homo sapiens
MSVPAVSESICAPTNTVSISTCYDISRIQHDQPVKPLDRAVFWIEFVMRHKGAKHLRVAAHDLTWFQYHSLDVIGFLLVCVATVIFIVTKCCLFCFWKFARKAKKGKND

SEQ ID NO: 1031003 - protein, 332 aa, Homo sapiens
MKAFVQISGKDGTVVFSLGPVVQNLIEEKADLIASDLAQIPQKEDPLHYLRQWGKLTYGLFETPGIFSFHHPLLPNVDFVGGLHCKPAKPLPKEMEDFVQSSGENGVVVFSLGSMVSNMTEERANVIASALAQIPQKVLWRFDGNKPDTLGLNTRLYKWIPQNDLLGHPKTRAFITHGGANGIYEAIYHGIPMVGIPLFADQPDNIAHMKARGAAVRVDFNTMSSTDLLNALKRVINDPSYKENVMKLSRIQHDQPVKPLDRAVFWIEFVMRHKGAKHLRVAAHDLTWFQYHSLDVIGFLLVCVATVIFIVTKCCLFCFWKFARKAKKGKND

SEQ ID NO: 1031004 - protein, 529 aa, Homo sapiens; identical to SEQ ID NO: 1030999

SEQ ID NO: 1031005 - protein, 180 aa, Homo sapiens
MPALEGAPHTPPLPRRPRKGSSELGFPRVAPEDEVIVNQYVIRPGPSASAASSAAAGEPLECPTCGHSYNVTQRRPRVLSCLHSVCEQCLQILYESCPKYKFISCPTCRRETVLFTDYGLAALAVNTSILSRLPPEALTAPSGGQWGAEPEGSCYQTFRQYCGAACTCHVRNPLSACSIM

SEQ ID NO: 1031006 - protein, 234 aa, Homo sapiens
MAPSRNGMVLKPHFHKDWQRRVATWFNQPARKIRRRKARQAKARRIAPRPASGPIRPIVRCPTVRYHTKVRAGRGFSLGGAQGWPGIHKKVARTIGISVDPRRRNKSTESLQANVQRLKEYRSKLILFPRKPSAPKKGDSSAEELKLATQLTGPVMPVRNVYKKEKARVITEEEKNFKAFASLRMARANARLFGIRAKRARKPQNRMLNRTISLLGTWINNTRQVPQKKTRGLS

SEQ ID NO: 1031007 - protein, 155 aa, Homo sapiens
MAPSRNGMVLKPHFHKDWQRRVATWFNQPARKIRRRKARQAKARRIAPRPASGPIRPIVRCPTVRYHTKVRAGRGFSLGGAQGWPGIHKKVARTIGISVDPRRRNKSTESLQANVQRLKEYRSKNSFLLFPQRKPLSGPPKGKGGRTRVSLPWTR

SEQ ID NO: 1031008 - protein, 75 aa, Homo sapiens
GLLHARPRKPKRHRKVQKGSKDEHPKSHPKITTAAYYSVLKLGKQHSKLLSMHRPGAVAHTCNPSILGGQGGRIT

SEQ ID NO: 1031009 - protein, 644 aa, Homo sapiens [sequence omitted]

SEQ ID NO: 1031010 - protein, 644 aa, Homo sapiens [sequence omitted]

SEQ ID NO: 1031011 - protein, 432 aa, Homo sapiens
MKRLEVDIDIKIRSCRGSCSRALAREVDLKDYEDQQKQLEQVIAKDLLPSRDRQHLPLIKMKPVPDLVPGNFKSQLQKVPPEWKALTDMPQMRMELERPGGNEITRGGSTSYGTGSETESPRNPSSAGSWNSGSSGPGSTGNRNPGSSGTGGTATWKPGSSGPGSTGSWNSGSSGTGSTGNQNPGSPRPGSTGTWNPGSSERGSAGHWTSESSVSGSTGQWHSESGSFRPDSPGSGNARPNNPDWGTFEEVSGNVSPGTRREYHTEKLVTSKGDKELRTGKEKVTSGSTTTTRRSCSKTVTKTVIGPDGHKEVTKEVVTSEDGSDCPEAMDLGTLSGIGTLDGFRHRHPDEAAFFDTASTGKTFPGFFSPMLGEFVSETESRGSESGIFTNTKESSSHHPGIAEFPFPVVNLQVTANNLPSSTSYNRGDSHI

SEQ ID NO: 1031012 - protein, 644 aa, Homo sapiens [sequence omitted]

SEQ ID NO: 1031013 - protein, 644 aa, Homo sapiens [sequence omitted]

SEQ ID NO: 1031014 - protein, 644 aa, Homo sapiens [sequence omitted]

SEQ ID NO: 1031015 - protein, 644 aa, Homo sapiens [sequence omitted]

SEQ ID NO: 1031016 - protein, 644 aa, Homo sapiens [sequence omitted]

SEQ ID NO: 1031017 - protein, 644 aa, Homo sapiens [sequence omitted]

SEQ ID NO: 1031018 - protein, 644 aa, Homo sapiens [sequence omitted]

SEQ ID NO: 1031019 - protein, 644 aa, Homo sapiens [sequence omitted]

SEQ ID NO: 1031020 - protein, 644 aa, Homo sapiens [sequence omitted]

SEQ ID NO: 1031021 - protein, 414 aa, Homo sapiens
MKRLEVDIDIKIRSCRGSCSRALAREVDLKDYEDQQKQLEQVIAKDLLPSRDRQHLPLIKMKPVPDLVPGNFKSQLQKVPPEWKALTDMPQMRMELERPGGNEITRGGSTSYGTGSETESPRNPSSAGSWNSGSSGPGSTGNRNPGSSGTGGTATWKPGSSGPGSTGSWNSGSSGTGSTGNQNPGSPRPGSTGTWNPGSSERGSAGHWTSESSVSGSTGQWHSESGSFRPDSPGSGNARPNNPDWGTFEEVSGNVSPGTRREYHTEKLVTSKGDKELRTGKEKVTSGSTTTTRRSCSEVVTSEDGSDCPEAMDLGTLSGIGTLDGFRHRHPDEAAFFDTASTGKTFPGFFSPMLGEFVSETESRGSESGIFTNTKESSSHHPGIAEFPFPVVNLQVTANNLPSSTSYNRGDSHI

SEQ ID NO: 1031022 - protein, 414 aa, Homo sapiens
MKRLEVDIDIKIRSCRGSCSRALAREVDLKDYEDQQKQLEQVIAKDLLPSRDRQHLPLIKMKPVPDLVPGNFKSQLQKVPPEWKALTDMPQMRMELERPGGNEITRGGSTSYGTGSETESPRNPSSAGSWNSGSSGPGSTGNRNPGSSGTGGTATWKPGSSGPGSTGSWNSGSSGTGSTGNQNPGSPRPGSTGTWNPGSSERGSAGHWTSESSVSGSTGQWHSESGSFRPDSPGSGNARPNNPDWGTFEEVSGNVSPGTRREYHTEKLVTSKGDKELRTGKEKVTSGSTTTTRRSCSKTVTKTVIGPDGHKEVTKEVVTSEDGSDCPEAMDLGTLSGIGTLDGFRHRHPDEAAFFDTASTGESRGSESGIFTNTKESSSHHPGIAEFPFPVVNLQVTANNLPSSTSYNRGDSHI

SEQ ID NO: 1031023 - protein, 432 aa, Homo sapiens; identical to SEQ ID NO: 1031011

SEQ ID NO: 1031024 - protein, 363 aa, Homo sapiens
MKRLEVDIDIKIRSCRGSCSRALAREVDLKDYEDQQKQLEQVIAKDLLPSRDRQHLPLIKMKPVPDLVPGNFKSQLQKVPPEWKALTDMPQMRMELERPGGNEITRGGSTSYGTGSETESPRNPSSAGSWNSGSSGPGSTGNRNPGSSGTGGTATWKPGSSGPGSTGSWNSGSSGTGSTGNQNPGSPRPGSTGTWNPGSSERGSAGHWTSESSVSGSTGQWHSESGSFRPDSPGSGNARPNNPDWGTFEEVSGNVSPGTRREYHTEKLVTSKGDKELRTGKEKVTSGSTTTTRRSCSKTVTKTVIGPDGHKEVTKEVVTSEDGSDCPEAMDLGTLSGIGTLMKLPSSTLPQLEKHSQVSSHLC

SEQ ID NO: 1031025 - protein, 432 aa, Homo sapiens; identical to SEQ ID NO: 1031011

SEQ ID NO: 1031026 - protein, 432 aa, Homo sapiens; identical to SEQ ID NO: 1031011

SEQ ID NO: 1031027 - protein, 644 aa, Homo sapiens [sequence omitted]

SEQ ID NO: 1031028 - protein, 644 aa, Homo sapiens [sequence omitted]

SEQ ID NO: 1031029 - protein, 644 aa, Homo sapiens [sequence omitted]

SEQ ID NO: 1031030 - protein, 644 aa, Homo sapiens [sequence omitted]

SEQ ID NO: 1031031 - protein, 644 aa, Homo sapiens [sequence omitted]

SEQ ID NO: 1031032 - protein, 644 aa, Homo sapiens [sequence omitted]

SEQ ID NO: 1031033 - protein, 3084 aa, Homo sapiens
QRLLRDRALFPAVHTMSVGRRKLALLWALALALACTRHTGHAQDGSSESSYKHHPALSPIARGPSGVPLRGATVFPSLRTIPVVRASNPAHNGRVCSTWGSFHYKTFDGDVFRFPGLCNYVFSEHCGAAYEDFNIQLRRSQESAAPTLSRVLMKVDGVVIQLTKGSVLVNGHPVLLPFSQSGVLIQQSSSYTKVEPGWALSSCGTTMTACCWKLDTKYANKTCGLCGDFNGMPVVSELLSHNTKLTPMEFGNLQKMDDPTEQCQDPVPEPPRNCSTGFGICEELLHGQLFSGCVALVDVGSYLEACRQDLCFCEDTDLLSCVCHTLAEYSRQCTHAGGLPQDWRGPDFCPQKCPNNMQYHECRSPCADTCSNQEHSRACEDHCVAGCFCPEGTVLDDIGQTGCVPVSKCACVYNGAAYAPGATYSTDCTNCTCSGGRWSCQEVPCPGTCSVLGGAHFSTFDGKQYTVHGDCSYVLTKPCDSSAFTVLAELRRCGLTDSETCLKSVTLSLDGAQTVVVIKASGEVFLNQIYTQLPISAANVTIFRPSTFFIIAQTSLGLQLNLQLVPTMQLFMQLAPKLRGQTCGLCGNFNSIQADDFRTLSGVVEATAAAFFNTFKTQAACPNIRNSFEDPCSLSVENEKYAQHWCSQLTDADGPFGRCHAAVKPGTYYSNCMFDTCNCERSEDCLCAALSSYVHACAAKGVQLGGWRDGVCTKPMTTCPKSMTYHYHVSTCQPTCRSLSEGDITCSVGFIPVDGCICPKGTFLDDTGKCVQASNCPCYHRGSMIPNGESVHDSGAICTCTHGKLSCIGGQAPAPVCAAPMVFFDCRNATPGDTGAGCQKSCHTLDMTCYSPQCVPGCVCPDGLVADGEGGCITAEDCPCVHNEASYRAGQTIRVGCNTCTCDSRMWRCTDDPCLATCAVYGDGHYLTFDGQSYSFNGDCEYTLVQNRCGGKDSTQDSFRVVTENVPCGTTGTTCSKAIKIFLGGFELKLSHGKVEVIGTDESQEVPYTIRQMGIYLVVDTDIGLVLLWDKKTSIFINLSPEFKGRVCGLCGNFDDIAVNDFATRSRSVVGDVLEFGNSWKLSPSCPDALAPKDPCTANPFRKSWAQKQCSILHGPTFAACHAHVEPARYYEACVNDACACDSGGDCECFCTAVARYAQACHEVGTCVCLRTPSICPLFCDYYNPEGQCEWHYQPCGVPCLRTCRNPRGDCLRDVRGLEGCYPKCPPEAPIFDEDKMQCVATCPTPPLPPRCHVHGKSYRPGAVVPSDKNCQSCLCTERGVECTYKAEACVCTYNGQRFHPGDVIYHTTDGTGGCISARCGANGTIERRVYPCSPTTPVPPTTFSFSTPPLVVSSTHTPSNGPSSAHTGPPSSAWPTTAGTSPRTRLPTASASLPPVCGEKCLWSPWMDVSRPGRGTDSGDFDTLENLRAHGYRVCESPRSVECRAEDAPGVPLRALGQRVQCSPDVGLTCRNREQASGLCYNYQIRVQCCTPLACSTSSSPAQTTPPTTSKTTETRASGSSAPSSTPGTVSLSTARTTPAPGTATSVKKTFSTPSPPPVPATSTSSMSTTAPGTSVVSSKPTPTEPSTSSCLQELCTWTEWIDGSYPAPGINGGDFDTFQNLRDEGYTFCESPRSVQCRAESFPNTPLADLGQDVICSHTEGLICLNKNQLPPICYNYEIRIQCCETVNVCRDITRLPKTVATTRPTPHPTGAQTQTTFTTHMPSASTEQPTATSRGGPTATSVTQGTHTTPVTRNCHPRCTWTKWFDVDFPSPGPHGGDKETYNNIIRSGEKICRRTEEITRLQCRAESHPEVSIEHLGQVVQCSREEGLVCRNQDQQGPFKMCLNYEVRVLCCETPKGCPVTSTPVTAPSTPSGRATSPTQSTSSWQKSRTTTLVTTSTTSTPQTSTTSAPTTSTIPASTPSTTSAPTTSTTSAPTTSISSAPTKQHNLGSYKQHNLCSYNQHNLCPYNQHNLFPYNQHNLCYYNQHNLCPYKQHNLHSTDQQNLSCPTTSTTSGPGTTPSPVTTTSTAPVSKTSTSHVSVSKTTHSQPVTSDCHPLCAWTKWFDVDFPSPGPHGGDKETYNNIIRSGEKICRRPEEITRLQCRAESHPEVNIEHLGQVVQCSREEGLVCRNQDQQGPFKMCLNYEVRVLCCETPRGCPVTSVTPYGTSPTNALYPSLSTSMVSASVASTSVASSSVASSSVAYSTQTCFCNVADRLYPAGSTIYRHRDLAGHCYYALCSQDCQVVRGVDSDCPSTTLPPAPATSPSISTSEPVTELGCPNAVPPRKKGETWATPNCSEATCEGNNVISLSPRTCPRVEKPTCANGYPAVKVADQDGCCHHYQCQCVCSGWGDPHYITFDGTYYTFLDNCTYVLVQQIVPVYGHFRVLVDNYFCGAEDGLSCPRSIILEYHQDRVVLTRKPVHGVMTNEIIFNNKVVSPGFRKNGIVVSRIGVKMYATIPELGVQVMFSGLIFSVEVPFSKFANNTEGQCGTCTNDRKDECRTPRGTVVASCSEMSGLWNVSIPDQPACHRPHPTPTTVGPTTVGSTTVGPTTVGSTTVGPTTPPAPCLPSPICHLILSKVFEPCHTVIPPLLFYEGCVFDRCHMTDLDVVCSSLELYAALCASHDICIDWRGRTGHMCPFTCPADKVYQPCGPSNPSYCYGNDSASLGALREAGPITEGCFCPEGMTLFSTSAQVCVPTGCPRCLGPHGEPVKVGHTVGMDCQECTCEAATWTLTCRPKLCPLPPACPLPGFVPVPAAPQAGQCCPQYSCACNTSRCPAPVGCPEGARAIPTYQEGACCPVQNCSWTVCSINGTLYQPGAVVSSSLCETCRCELPGGPPSDAFVVSCETQICNTHCPVGFEYQEQSGQCCGTCVQVACVTNTSKSPAHLFYPGETWSDAGNHCVTHQCEKHQDGLVVVTTKKACPPLSCSLDEARMSKDGCCRFCPLPPPPYQNQSTCAVYHRSLIIQQQGCSSSEPVRLAYCRGNCGDSSSMYSLEGNTVEHRCQCCQELRTSLRNVTLHCTDGSSRAFSYTEVEECGCMGRRCPAPGDTQHSEEAEPEPSQEAESGSWERGVPVSPMH

SEQ ID NO: 1031034 - protein, 2586 aa, Homo sapiens
QRLLRDRALFPAVHTMSVGRRKLALLWALALALACTRHTGHAQDGSSESSYKHHPALSPIARGPSGVPLRGATVFPSLRTIPVVRASNPAHNGRVCSTWGSFHYKTFDGDVFRFPGLCNYVFSEHCGAAYEDFNIQLRRSQESAAPTLSRVLMKVDGVVIQLTKGSVLVNGHPVLLPFSQSGVLIQQSSSYTKVEPGWALSSCGTTMTACCWKLDTKYANKTCGLCGDFNGMPVVSELLSHNTKLTPMEFGNLQKMDDPTEQCQDPVPEPPRNCSTGFGICEELLHGQLFSGCVALVDVGSYLEACRQDLCFCEDTDLLSCVCHTLAEYSRQCTHAGGLPQDWRGPDFCPQKCPNNMQYHECRSPCADTCSNQEHSRACEDHCVAGCFCPEGTVLDDIGQTGCVPVSKCACVYNGAAYAPGATYSTDCTNCTCSGGRWSCQEVPCPGTCSVLGGAHFSTFDGKQYTVHGDCSYVLTKPCDSSAFTVLAELRRCGLTDSETCLKSVTLSLDGAQTVVVIKASGEVFLNQIYTQLPISAANVTIFRPSTFFIIAQTSLGLQLNLQLVPTMQLFMQLAPKLRGQTCGLCGNFNSIQADDFRTLSGVVEATAAAFFNTFKTQAACPNIRNSFEDPCSLSVENEKYAQHWCSQLTDADGPFGRCHAAVKPGTYYSNCMFDTCNCERSEDCLCAALSSYVHACAAKGVQLGGWRDGVCTKPMTTCPKSMTYHYHVSTCQPTCRSLSEGDITCSVGFIPVDGCICPKGTFLDDTGKCVQASNCPCYHRGSMIPNGESVHDSGAICTCTHGKLSCIGGQAPAPVCAAPMVFFDCRNATPGDTGAGCQKSCHTLDMTCYSPQCVPGCVCPDGLVADGEGGCITAEDCPCVHNEASYRAGQTIRVGCNTCTCDSRMWRCTDDPCLATCAVYGDGHYLTFDGQSYSFNGDCEYTLVQNRCGGKDSTQDSFRVVTENVPCGTTGTTCSKAIKIFLGGFELKLSHGKVEVIGTDESQEVPYTIRQMGIYLVVDTDIGLVLLWDKKTSIFINLSPEFKGRVCGLCGNFDDIAVNDFATRSRSVVGDVLEFGNSWKLSPSCPDALAPKDPCTANPFRKSWAQKQCSILHGPTFAACHAHVEPARYYEACVNDACACDSGGDCECFCTAVARYAQACHEVGTCVCLRTPSICPLFCDYYNPEGQCEWHYQPCGVPCLRTCRNPRGDCLRDVRGLEGCYPKCPPEAPIFDEDKMQCVATCPTPPLPPRCHVHGKSYRPGAVVPSDKNCQSCLCTERGVECTYKAEACVCTYNGQRFHPGDVIYHTTDGTGGCISARCGANGTIERRVYPCSPTTPVPPTTFSFSTPPLVVSSTHTPSNGPSSAHTGPPSSAWPTTAGTSPRTRLPTASASLPPVCGEKCLWSPWMDVSRPGRGTDSGDFDTLENLRAHGYRVCESPRSVECRAEDAPGVPLRALGQRVQCSPDVGLTCRNREQASGLCYNYQIRVQCCTPLACSTSSSPAQTTPPTTSKTTETRASGSSAPSSTPGTVSLSTARTTPAPGTATSVKKTFSTPSPPPVPATSTSSMSTTAPGTSVVSSKPTPTEPSTSSCLQELCTWTEWIDGSYPAPGINGGDFDTFQNLRDEGYTFCESPRSVQCRAESFPNTPLADLGQDVICSHTEGLICLNKNQLPPICYNYEIRIQCCETVNVCRDITRLPKTVATTRPTPHPTGAQTQTTFTTHMPSASTEQPTATSRGGPTATSVTQGTHTTPVTRNCHPRCTWTKWFDVDFPSPGPHGGDKETYNNIIRSGEKICRRTEEITRLQCRAESHPEVSIEHLGQVVQCSREEGLVCRNQDQQGPFKMCLNYEVRVLCCETPKGCPVTSTPVTAPSTPSGRATSPTQSTSSWQKSRTTTLVTTSTTSTPQTSTTSAPTTSTIPASTPSTTSAPTTSTTSAPTTSISSAPTKQHNLGSYKQHNLCSYNQHNLCPYNQHNLFPYNQHNLCYYNQHNLCPYKQHNLHSTDQQNLSCPTTSTTSGPGTTPSPVTTTSTAPVSKTSTSHVSVSKTTHSQPVTSDCHPLCAWTKWFDVDFPSPGPHGGDKETYNNIIRSGEKICRRPEEITRLQCRAESHPEVNIEHLGQVVQCSREEGLVCRNQDQQGPFKMCLNYEVRVLCCETPRGCPVTSVTPYGTSPTNALYPSLSTSMVSASVASTSVASSSVASSSVAYSTQTCFCNVADRLYPAGSTIYRHRDLAGHCYYALCSQDCQVVRGVDSDCPSTTLPPAPATSPSISTSEPVTELGCPNAVPPRKKGETWATPNCSEATCEGNNVISLSPRTCPRVEKPTCANGYPAVKVADQDGCCHHYQCQCVCSGWGDPHYITFDGTYYTFLDNCTYVLVQQIVPVYGHFRVLVDNYFCGAEDGLSCPRSIILEYHQDRVVLTRKPVHGVMTNEIIFNNKVVSPGFRKNGIVVSRIGVKMYATIPELGVQVMFSGLIFSVEVPFSKFANNTEGQCGTCTNDRKDECRTPRGTVVASCSEMSGLWNVSIPDQPACHRPHPTPTTVGPTTVGSTTVGPTTVGSTTVGPTTVGSTTVGPTTPPAPCLPAAQ

SEQ ID NO: 1031035 - protein, 1942 aa, Homo sapiens
QRLLRDRALFPAVHTMSVGRRKLALLWALALALACTRHTGHAQDGSSESSYKHHPALSPIARGPSGVPLRGATVFPSLRTIPVVRASNPAHNGRVCSTWGSFHYKTFDGDVFRFPGLCNYVFSEHCGAAYEDFNIQLRRSQESAAPTLSRVLMKVDGVVIQLTKGSVLVNGHPVLLPFSQSGVLIQQSSSYTKVEPGWALSSCGTTMTACCWKLDTKYANKTCGLCGDFNGMPVVSELLSHNTKLTPMEFGNLQKMDDPTEQCQDPVPEPPRNCSTGFGICEELLHGQLFSGCVALVDVGSYLEACRQDLCFCEDTDLLSCVCHTLAEYSRQCTHAGGLPQDWRGPDFCPQKCPNNMQYHECRSPCADTCSNQEHSRACEDHCVAGCFCPEGTVLDDIGQTGCVPVSKCACVYNGAAYAPGATYSTDCTNCTCSGGRWSCQEVPCPGTCSVLGGAHFSTFDGKQYTVHGDCSYVLTKPCDSSAFTVLAELRRCGLTDSETCLKSVTLSLDGAQTVVVIKASGEVFLNQIYTQLPISAANVTIFRPSTFFIIAQTSLGLQLNLQLVPTMQLFMQLAPKLRGQTCGLCGNFNSIQADDFRTLSGVVEATAAAFFNTFKTQAACPNIRNSFEDPCSLSVENEKYAQHWCSQLTDADGPFGRCHAAVKPGTYYSNCMFDTCNCERSEDCLCAALSSYVHACAAKGVQLGGWRDGVCTKPMTTCPKSMTYHYHVSTCQPTCRSLSEGDITCSVGFIPVDGCICPKGTFLDDTGKCVQASNCPCYHRGSMIPNGESVHDSGAICTCTHGKLSCIGGQAPAPVCAAPMVFFDCRNATPGDTGAGCQKSCHTLDMTCYSPQCVPGCVCPDGLVADGEGGCITAEDCPCVHNEASYRAGQTIRVGCNTCTCDSRMWRCTDDPCLATCAVYGDGHYLTFDGQSYSFNGDCEYTLVQNRCGGKDSTQDSFRVVTENVPCGTTGTTCSKAIKIFLGGFELKLSHGKVEVIGTDESQEVPYTIRQMGIYLVVDTDIGLVLLWDKKTSIFINLSPEFKGRVCGLCGNFDDIAVNDFATRSRSVVGDVLEFGNSWKLSPSCPDALAPKDPCTANPFRKSWAQKQCSILHGPTFAACHAHVEPARYYEACVNDACACDSGGDCECFCTAVARYAQACHEVGTCVCLRTPSICPLFCDYYNPEGQCEWHYQPCGVPCLRTCRNPRGDCLRDVRGLEGCYPKCPPEAPIFDEDKMQCVATCPTPPLPPRCHVHGKSYRPGAVVPSDKNCQSCLCTERGVECTYKAEACVCTYNGQRFHPGDVIYHTTDGTGGCISARCGANGTIERRVYPCSPTTPVPPTTFSFSTPPLVVSSTHTPSNGPSSAHTGPPSSAWPTTAGTSPRTRLPTASASLPPVCGEKCLWSPWMDVSRPGRGTDSGDFDTLENLRAHGYRVCESPRSVECRAEDAPGVPLRALGQRVQCSPDVGLTCRNREQASGLCYNYQIRVQCCTPLACSTSSSPAQTTPPTTSKTTETRASGSSAPSSTPGTVSLSTARTTPAPGTATSVKKTFSTPSPPPVPATSTSSMSTTAPGTSVVSSKPTPTEPSTSSCLQELCTWTEWIDGSYPAPGINGGDFDTFQNLRDEGYTFCESPRSVQCRAESFPNTPLADLGQDVICSHTEGLICLNKNQLPPICYNYEIRIQCCETVNVCRDITRLPKTVATTRPTPHPTGAQTQTTFTTHMPSASTEQPTATSRGGPTATSVTQGTHTTPVTRNCHPRCTWTKWFDVDFPSPGPHGGDKETYNNIIRSGEKICRRTEEITRLQCRAESHPEVSIEHLGQVVQCSREEGLVCRNQDQQGPFKMCLNYEVRVLCCETPKGCPVTSTPVTAPSTPSGRATSPTQSTSSWQKSRTTTLVTTSTTSTPQTSTTSAAATSSTTSSSGLRLPVTTTSTASVSRPVR

SEQ ID NO: 1031036 - protein, 493 aa, Homo sapiens
KTSTSHVSISKTTHTTPVTRNCHPRCTWTKWFDVDFPSPGPHGGDKETYNNIIRSGEKICRRTEEITRLQCRAESHPEVSIEHLGQVVQCSREEGLVCRNQDQQGPFKMCLNYEVRVLCCETPKGCPVTSTPVTAPSTPSGRATSPTQSTSSWQKSRTTTLVTTSTTSTPQTSTTSAPTTSTIPASTPSTTSAPTTSTTSAPTTSISSAPTKQHNLGSYKQHNLCSYNQHNLCPYNQHNLFPYNQHNLCYYNQHNLCPYKQHNLHSTDQQNLSCPTTSTTSGPGTTPSPVTTTSTAPVSKTSTSHVSVSKTTHSQPVTSDCHPLCAWTKWFDVDFPSPGPHGGDKETYNNIIRSGEKICRRPEEITRLQCRAESHPEVNIEHLGQVVQCSREEGLVCRNQDQQGPFKMCLNYEVRVLCCETPRGCPVTSTSVTAPSTPSGRATSPTQSTSSWQKSRTTTFGDKQHNLHYTDQHNLMPLQVAQPSFNTQHIRLA

SEQ ID NO: 1031037 - protein, 3084 aa, Homo sapiens; identical to SEQ ID NO: 1031033

SEQ ID NO: 1031038 - protein, 3084 aa, Homo sapiens; identical to SEQ ID NO: 1031033

SEQ ID NO: 1031039 - protein, 1955 aa, Homo sapiens
MSVGRRKLALLWALALALACTRHTGHAQDGSSESSYKHHPALSPIARGPSGVPLRGATVFPSLRTIPVVRASNPAHNGRVCSTWGSFHYKTFDGDVFRFPGLCNYVFSEHCGAAYEDFNIQLRRSQESAAPTLSRVLMKVDGVVIQLTKGSVLVNGHPVLLPFSQSGVLIQQSSSYTKVEPGWALSSCGTTMTACCWKLDTKYANKTCGLCGDFNGMPVVSELLSHNTKLTPMEFGNLQKMDDPTEQCQDPVPEPPRNCSTGFGICEELLHGQLFSGCVALVDVGSYLEACRQDLCFCEDTDLLSCVCHTLAEYSRQCTHAGGLPQDWRGPDFCPQKCPNNMQYHECRSPCADTCSNQEHSRACEDHCVAGCFCPEGTVLDDIGQTGCVPVSKCACVYNGAAYAPGATYSTDCTNCTCSGGRWSCQEVPCPGTCSVLGGAHFSTFDGKQYTVHGDCSYVLTKPCDSSAFTVLAELRRCGLTDSETCLKSVTLSLDGAQTVVVIKASGEVFLNQIYTQLPISAANVTIFRPSTFFIIAQTSLGLQLNLQLVPTMQLFMQLAPKLRGQTCGLCGNFNSIQADDFRTLSGVVEATAAAFFNTFKTQAACPNIRNSFEDPCSLSVENEKYAQHWCSQLTDADGPFGRCHAAVKPGTYYSNCMFDTCNCERSEDCLCAALSSYVHACAAKGVQLGGWRDGVCTKPMTTCPKSMTYHYHVSTCQPTCRSLSEGDITCSVGFIPVDGCICPKGTFLDDTGKCVQASNCPCYHRGSMIPNGESVHDSGAICTCTHGKLSCIGGQAPAPVCAAPMVFFDCRNATPGDTGAGCQKSCHTLDMTCYSPQCVPGCVCPDGLVADGEGGCITAEDCPCVHNEASYRAGQTIRVGCNTCTCDSRMWRCTDDPCLATCAVYGDGHYLTFDGQSYSFNGDCEYTLVQNRCGGKDSTQDSFRVVTENVPCGTTGTTCSKAIKIFLGGFELKLSHGKVEVIGTDESQEVPYTIRQMGIYLVVDTDIGLVLLWDKKTSIFINLSPEFKGRVCGLCGNFDDIAVNDFATRSRSVVGDVLEFGNSWKLSPSCPDALAPKDPCTANPFRKSWAQKQCSILHGPTFAACHAHVEPARYYEACVNDACACDSGGDCECFCTAVARYAQACHEVGTCVCLRTPSICPLFCDYYNPEGQCEWHYQPCGVPCLRTCRNPRGDCLRDVRGLEGCYPKCPPEAPIFDEDKMQCVATCPTPPLPPRCHVHGKSYRPGAVVPSDKNCQSCLCTERGVECTYKAEACVCTYNGQRFHPGDVIYHTTDGTGGCISARCGANGTIERRVYPCSPTTPVPPTTFSFSTPPLVVSSTHTPSNGPSSAHTGPPSSAWPTTAGTSPRTRLPTASASLPPVCGEKCLWSPWMDVSRPGRGTDSGDFDTLENLRAHGYRVCESPRSVECRAEDAPGVPLRALGQRVQCSPDVGLTCRNREQASGLCYNYQIRVQCCTPLACSTSSSPAQTTPPTTSKTTETRASGSSAPSSTPGTVSLSTARTTPAPGTATSVKKTFSTPSPPPVPATSTSSMSTTAPGTSVVSSKPTPTEPSTSSCLQELCTWTEWIDGSYPAPGINGGDFDTFQNLRDEGYTFCESPRSVQCRAESFPNTPLADLGQDVICSHTEGLICLNKNQLPPICYNYEIRIQCCETVNVCRDITRLPKTVATTRPTPHPTGAQTQTTFTTHMPSASTEQPTATSRGGPTATSVTQGTHTTPVTRNCHPRCTWTKWFDVDFPSPGPHGGDKETYNNIIRSGEKICRRTEEITRLQCRAESHPEVSIEHLGQVVQCSREEGLVCRNQDQQGPFKMCLNYEVRVLCCETPKGCPVTSTPVTAPSTPSGRATSPTQSTSSWQKSRTTTLVTTSTTSTPQTSTTSAPTTSTIPASTPSTRDWCATRGIISLCSWSSRHLLCPVSPLNILCHPLFYPVLSLGIL

SEQ ID NO: 1031040 - protein, 1952 aa, Homo sapiens
QRLLRDRALFPAVHTMSVGRRKLALLWALALALACTRHTGHAQDGSSESSYKHHPALSPIARGPSGVPLRGATVFPSLRTIPVVRASNPAHNGRVCSTWGSFHYKTFDGDVFRFPGLCNYVFSEHCGAAYEDFNIQLRRSQESAAPTLSRVLMKVDGVVIQLTKGSVLVNGHPVLLPFSQSGVLIQQSSSYTKVEPGWALSSCGTTMTACCWKLDTKYANKTCGLCGDFNGMPVVSELLSHNTKLTPMEFGNLQKMDDPTEQCQDPVPEPPRNCSTGFGICEELLHGQLFSGCVALVDVGSYLEACRQDLCFCEDTDLLSCVCHTLAEYSRQCTHAGGLPQDWRGPDFCPQKCPNNMQYHECRSPCADTCSNQEHSRACEDHCVAGCFCPEGTVLDDIGQTGCVPVSKCACVYNGAAYAPGATYSTDCTNCTCSGGRWSCQEVPCPGTCSVLGGAHFSTFDGKQYTVHGDCSYVLTKPCDSSAFTVLAELRRCGLTDSETCLKSVTLSLDGAQTVVVIKASGEVFLNQIYTQLPISAANVTIFRPSTFFIIAQTSLGLQLNLQLVPTMQLFMQLAPKLRGQTCGLCGNFNSIQADDFRTLSGVVEATAAAFFNTFKTQAACPNIRNSFEDPCSLSVENEKYAQHWCSQLTDADGPFGRCHAAVKPGTYYSNCMFDTCNCERSEDCLCAALSSYVHACAAKGVQLGGWRDGVCTKPMTTCPKSMTYHYHVSTCQPTCRSLSEGDITCSVGFIPVDGCICPKGTFLDDTGKCVQASNCPCYHRGSMIPNGESVHDSGAICTCTHGKLSCIGGQAPAPVCAAPMVFFDCRNATPGDTGAGCQKSCHTLDMTCYSPQCVPGCVCPDGLVADGEGGCITAEDCPCVHNEASYRAGQTIRVGCNTCTCDSRMWRCTDDPCLATCAVYGDGHYLTFDGQSYSFNGDCEYTLVQNRCGGKDSTQDSFRVVTENVPCGTTGTTCSKAIKIFLGGFELKLSHGKVEVIGTDESQEVPYTIRQMGIYLVVDTDIGLVLLWDKKTSIFINLSPEFKGRVCGLCGNFDDIAVNDFATRSRSVVGDVLEFGNSWKLSPSCPDALAPKDPCTANPFRKSWAQKQCSILHGPTFAACHAHVEPARYYEACVNDACACDSGGDCECFCTAVARYAQACHEVGTCVCLRTPSICPLFCDYYNPEGQCEWHYQPCGVPCLRTCRNPRGDCLRDVRGLEGCYPKCPPEAPIFDEDKMQCVATCPTPPLPPRCHVHGKSYRPGAVVPSDKNCQSCLCTERGVECTYKAEACVCTYNGQRFHPGDVIYHTTDGTGGCISARCGANGTIERRVYPCSPTTPVPPTTFSFSTPPLVVSSTHTPSNGPSSAHTGPPSSAWPTTAGTSPRTRLPTASASLPPVCGEKCLWSPWMDVSRPGRGTDSGDFDTLENLRAHGYRVCESPRSVECRAEDAPGVPLRALGQRVQCSPDVGLTCRNREQASGLCYNYQIRVQCCTPLACSTSSSPAQTTPPTTSKTTETRASGSSAPSSTPGTVSLSTARTTPAPGTATSVKKTFSTPSPPPVPATSTSSMSTTAPGTSVVSSKPTPTEPSTSSCLQELCTWTEWIDGSYPAPGINGGDFDTFQNLRDEGYTFCESPRSVQCRAESFPNTPLADLGQDVICSHTEGLICLNKNQLPPICYNYEIRIQCCETVNVCRDITRLPKTVATTRPTPHPTGAQTQTTFTTHMPSASTEQPTATSRGGPTATSVTQGTHTTPVTRNCHPRCTWTKWFDVDFPSPGPHGGDKETYNNIIRSGEKICRRTEEITRLQCRAESHPEVSIEHLGQVVQCSREEGLVCRNQDQQGPFKMCLNYEVRVLCCETPKGCPVTSTPVTAPSTPSGRATSPTQSTSSWQKSRTTTLVTTSTTSTPQTSTTSAGPYNQHNLCSYSQNNLCSYNQNNFCLSSQHNLWSWKYSH

SEQ ID NO: 1031041 - protein, 2987 aa, Homo sapiens
QRLLRDRALFPAVHTMSVGRRKLALLWALALALACTRHTGHAQDGSSESSYKHHPALSPIARGPSGVPLRGATVFPSLRTIPVVRASNPAHNGRVCSTWGSFHYKTFDGDVFRFPGLCNYVFSEHCGAAYEDFNIQLRRSQESAAPTLSRVLMKVDGVVIQLTKGSVLVNGHPVLLPFSQSGVLIQQSSSYTKVEPGWALSSCGTTMTACCWKLDTKYANKTCGLCGDFNGMPVVSELLSHNTKLTPMEFGNLQKMDDPTEQCQDPVPEPPRNCSTGFGICEELLHGQLFSGCVALVDVGSYLEACRQDLCFCEDTDLLSCVCHTLAEYSRQCTHAGGLPQDWRGPDFCPQKCPNNMQYHECRSPCADTCSNQEHSRACEDHCVAGCFCPEGTVLDDIGQTGCVPVSKCACVYNGAAYAPGATYSTDCTNCTCSGGRWSCQEVPCPGTCSVLGGAHFSTFDGKQYTVHGDCSYVLTKPCDSSAFTVLAELRRCGLTDSETCLKSVTLSLDGAQTVVVIKASGEVFLNQIYTQLPISAANVTIFRPSTFFIIAQTSLGLQLNLQLVPTMQLFMQLAPKLRGQTCGLCGNFNSIQADDFRTLSGVVEATAAAFFNTFKTQAACPNIRNSFEDPCSLSVENEKYAQHWCSQLTDADGPFGRCHAAVKPGTYYSNCMFDTCNCERSEDCLCAALSSYVHACAAKGVQLGGWRDGVCTKPMTTCPKSMTYHYHVSTCQPTCRSLSEGDITCSVGFIPVDGCICPKGTFLDDTGKCVQASNCPCYHRGSMIPNGESVHDSGAICTCTHGKLSCIGGQAPAPVCAAPMVFFDCRNATPGDTGAGCQKSCHTLDMTCYSPQCVPGCVCPDGLVADGEGGCITAEDCPCVHNEASYRAGQTIRVGCNTCTCDSRMWRCTDDPCLATCAVYGDGHYLTFDGQSYSFNGDCEYTLVQNRCGGKDSTQDSFRVVTENVPCGTTGTTCSKAIKIFLGGFELKLSHGKVEVIGTDESQEVPYTIRQMGIYLVVDTDIGLVLLWDKKTSIFINLSPEFKGRVCGLCGNFDDIAVNDFATRSRSVVGDVLEFGNSWKLSPSCPDALAPKDPCTANPFRKSWAQKQCSILHGPTFAACHAHVEPARYYEACVNDACACDSGGDCECFCTAVARYAQACHEVGTCVCLRTPSICPLFCDYYNPEGQCEWHYQPCGVPCLRTCRNPRGDCLRDVRGLEGCYPKCPPEAPIFDEDKMQCVATCPTPPLPPRCHVHGKSYRPGAVVPSDKNCQSCLCTERGVECTYKAEACVCTYNGQRFHPGDVIYHTTDGTGGCISARCGANGTIERRVYPCSPTTPVPPTTFSFSTPPLVVSSTHTPSNGPSSAHTGPPSSAWPTTAGTSPRTRLPTASASLPPVCGEKCLWSPWMDVSRPGRGTDSGDFDTLENLRAHGYRVCESPRSVECRAEDAPGVPLRALGQRVQCSPDVGLTCRNREQASGLCYNYQIRVQCCTPLACSTSSSPAQTTPPTTSKTTETRASGSSAPSSTPGTVSLSTARTTPAPGTATSVKKTFSTPSPPPVPATSTSSMSTTAPGTSVVSSKPTPTEPSTSSCLQELCTWTEWIDGSYPAPGINGGDFDTFQNLRDEGYTFCESPRSVQCRAESFPNTPLADLGQDVICSHTEGLICLNKNQLPPICYNYEIRIQCCETVNVCRDITRLPKTVATTRPTPHPTGAQTQTTFTTHMPSASTEQPTATSRGGPTATSVTQGTHTTPVTRNCHPRCTWTKWFDVDFPSPGPHGGDKETYNNIIRSGEKICRRTEEITRLQCRAESHPEVSIEHLGQVVQCSREEGLVCRNQDQQGPFKMCLNYEVRVLCCETPKGCPVTSTPVTAPSTPSGRATSPTQSTSSWQKSRTTTLVTTSTTSTPQTSTTSAPTTSTTSGPGTTPSPVTTTSTAPVSKTSTSHVSVSKTTHSQPVTSDCHPLCAWTKWFDVDFPSPGPHGGDKETYNNIIRSGEKICRRPEEITRLQCRAESHPEVNIEHLGQVVQCSREEGLVCRNQDQQGPFKMCLNYEVRVLCCETPRGCPVTSVTPYGTSPTNALYPSLSTSMVSASVASTSVASSSVASSSVAYSTQTCFCNVADRLYPAGSTIYRHRDLAGHCYYALCSQDCQVVRGVDSDCPSTTLPPAPATSPSISTSEPVTELGCPNAVPPRKKGETWATPNCSEATCEGNNVISLSPRTCPRVEKPTCANGYPAVKVADQDGCCHHYQCQCVCSGWGDPHYITFDGTYYTFLDNCTYVLVQQIVPVYGHFRVLVDNYFCGAEDGLSCPRSIILEYHQDRVVLTRKPVHGVMTNEIIFNNKVVSPGFRKNGIVVSRIGVKMYATIPELGVQVMFSGLIFSVEVPFSKFANNTEGQCGTCTNDRKDECRTPRGTVVASCSEMSGLWNVSIPDQPACHRPHPTPTTVGPTTVGSTTVGPTTVGSTTVGPTTPPAPCLPSPICHLILSKVFEPCHTVIPPLLFYEGCVFDRCHMTDLDVVCSSLELYAALCASHDICIDWRGRTGHMCPFTCPADKVYQPCGPSNPSYCYGNDSASLGALREAGPITEGCFCPEGMTLFSTSAQVCVPTGCPRCLGPHGEPVKVGHTVGMDCQECTCEAATWTLTCRPKLCPLPPACPLPGFVPVPAAPQAGQCCPQYSCACNTSRCPAPVGCPEGARAIPTYQEGACCPVQNCSWTVCSINGTLYQPGAVVSSSLCETCRCELPGGPPSDAFVVSCETQICNTHCPVGFEYQEQSGQCCGTCVQVACVTNTSKSPAHLFYPGETWSDAGNHCVTHQCEKHQDGLVVVTTKKACPPLSCSLDEARMSKDGCCRFCPLPPPPYQNQSTCAVYHRSLIIQQQGCSSSEPVRLAYCRGNCGDSSSMYSLEGNTVEHRCQCCQELRTSLRNVTLHCTDGSSRAFSYTEVEECGCMGRRCPAPGDTQHSEEAEPEPSQEAESGSWERGVPVSPMH

SEQ ID NO: 1031042 - protein, 2229 aa, Homo sapiens
QRLLRDRALFPAVHTMSVGRRKLALLWALALALACTRHTGHAQDGSSESSYKHHPALSPIARGPSGVPLRGATVFPSLRTIPVVRASNPAHNGRVCSTWGSFHYKTFDGDVFRFPGLCNYVFSEHCGAAYEDFNIQLRRSQESAAPTLSRVLMKVDGVVIQLTKGSVLVNGHPVLLPFSQSGVLIQQSSSYTKVEPGWALSSCGTTMTACCWKLDTKYANKTCGLCGDFNGMPVVSELLSHNTKLTPMEFGNLQKMDDPTEQCQDPVPEPPRNCSTGFGICEELLHGQLFSGCVALVDVGSYLEACRQDLCFCEDTDLLSCVCHTLAEYSRQCTHAGGLPQDWRGPDFCPQKCPNNMQYHECRSPCADTCSNQEHSRACEDHCVAGCFCPEGTVLDDIGQTGCVPVSKCACVYNGAAYAPGATYSTDCTNCTCSGGRWSCQEVPCPGTCSVLGGAHFSTFDGKQYTVHGDCSYVLTKPCDSSAFTVLAELRRCGLTDSETCLKSVTLSLDGAQTVVVIKASGEVFLNQIYTQLPISAANVTIFRPSTFFIIAQTSLGLQLNLQLVPTMQLFMQLAPKLRGQTCGLCGNFNSIQADDFRTLSGVVEATAAAFFNTFKTQAACPNIRNSFEDPCSLSVENEKYAQHWCSQLTDADGPFGRCHAAVKPGTYYSNCMFDTCNCERSEDCLCAALSSYVHACAAKGVQLGGWRDGVCTKPMTTCPKSMTYHYHVSTCQPTCRSLSEGDITCSVGFIPVDGCICPKGTFLDDTGKCVQASNCPCYHRGSMIPNGESVHDSGAICTCTHGKLSCIGGQAPAPVCAAPMVFFDCRNATPGDTGAGCQKSCHTLDMTCYSPQCVPGCVCPDGLVADGEGGCITAEDCPCVHNEASYRAGQTIRVGCNTCTCDSRMWRCTDDPCLATCAVYGDGHYLTFDGQSYSFNGDCEYTLVQNRCGGKDSTQDSFRVVTENVPCGTTGTTCSKAIKIFLGGFELKLSHGKVEVIGTDESQEVPYTIRQMGIYLVVDTDIGLVLLWDKKTSIFINLSPEFKGRVCGLCGNFDDIAVNDFATRSRSVVGDVLEFGNSWKLSPSCPDALAPKDPCTANPFRKSWAQKQCSILHGPTFAACHAHVEPARYYEACVNDACACDSGGDCECFCTAVARYAQACHEVGTCVCLRTPSICPLFCDYYNPEGQCEWHYQPCGVPCLRTCRNPRGDCLRDVRGLEGCYPKCPPEAPIFDEDKMQCVATCPTPPLPPRCHVHGKSYRPGAVVPSDKNCQSCLCTERGVECTYKAEACVCTYNGQRFHPGDVIYHTTDGTGGCISARCGANGTIERRVYPCSPTTPVPPTTFSFSTPPLVVSSTHTPSNGPSSAHTGPPSSAWPTTAGTSPRTRLPTASASLPPVCGEKCLWSPWMDVSRPGRGTDSGDFDTLENLRAHGYRVCESPRSVECRAEDAPGVPLRALGQRVQCSPDVGLTCRNREQASGLCYNYQIRVQCCTPLACSTSSSPAQTTPPTTSKTTETRASGSSAPSSTPGTVSLSTARTTPAPGTATSVKKTFSTPSPPPVPATSTSSMSTTAPGTSVVSSKPTPTEPSTSSCLQELCTWTEWIDGSYPAPGINGGDFDTFQNLRDEGYTFCESPRSVQCRAESFPNTPLADLGQDVICSHTEGLICLNKNQLPPICYNYEIRIQCCETVNVCRDITRLPKTVATTRPTPHPTGAQTQTTFTTHMPSASTEQPTATSRGGPTATSVTQGTHTTPVTRNCHPRCTWTKWFDVDFPSPGPHGGDKETYNNIIRSGEKICRRTEEITRLQCRAESHPEVSIEHLGQVVQCSREEGLVCRNQDQQGPFKMCLNYEVRVLCCETPKGCPVTSTPVTAPSTPSGRATSPTQSTSSWQKSRTTTLVTTSTTSTPQTSTTSAPTTSTIPASTPSTTSAPTTSTTSAPTTSISSAPTKQHNLGSYKQHNLCSYNQHNLCPYNQHNLFPYNQHNLCYYNQHNLCPYKQHNLHSTDQQNLSCPTTSTTSGPGTTPSPVTTTSTAPVSKTSTSHVSVSKTTHSQPVTSDCHPLCAWTKWFDVDFPSPGPHGGDKETYNNIIRSGEKICRRPEEITRLQCRAESHPEVNIEHLGQVVQCSREEGLVCRNQDQQGPFKMCLNYEVRVLCCETPRGCPVTSTSVTAPSTPSGRATSPTQSTSSWQKSRTTTFGDKQHNLHYTDQHNLMPLQVAQPSFNTQHIRLA

SEQ ID NO: 1031043 - protein, 96 aa, Homo sapiens
ENGDKKIVPKKKKPLKLGPIKKKDLKKLVLYLKNGADCPCHQLDNLSHHFLIMGRKVKSQYLLTAIHKWDKKNKEFKNFMKKMKNHECPTFQSVFK

SEQ ID NO: 1031044 - protein, 75 aa, Homo sapiens
  misc_feature (8)..(8): Xaa can be any naturally occurring amino acid
PGGTRRRXLIKEPRDLSRFKTVYIEHLKGVLEQGLLIRPRLLPRGAALPRHLPREADFPGSVAVWLSFLKSPWLP

SEQ ID NO: 1031045 - protein, 96 aa, Homo sapiens; identical to SEQ ID NO: 1031043

SEQ ID NO: 1031046 - protein, 96 aa, Homo sapiens; identical to SEQ ID NO: 1031043

SEQ ID NO: 1031047 - protein, 96 aa, Homo sapiens; identical to SEQ ID NO: 1031043

SEQ ID NO: 1031048 - protein, 148 aa, Homo sapiens
  misc_feature (60)..(60): Xaa can be any naturally occurring amino acid
MGTPASVVSEPPPCRAPIEAVAGKQASGKIFQERELLGIQGLFQRRGEPAGRGRGHRSSXNVHGDHRVLRRSRGLRRRRPQRESLGIGNKLSARIWSPVLSWQPRSARRSSVEVLALGEKGGSRMGSGPKTHRSWSESEGFFKLGRGE

SEQ ID NO: 1031049 - protein, 561 aa, Homo sapiens
MRHCINCCIQLLPDGAHKQQVNCQGGPHHGHQACPTCKGENKILFRVDSKQMNLLAVLEVRTEGNENWGGFLRFKKGKRCSLVFGLIIMTLVMASYILSGAHQELLISSPFHYGGFPSNPSLMDSENPSDTKEHHHQSSVNNISYMKDYPSIKLIINSITTRIEFTTRQLPDLEDLKKQELHMFSVIPNKFLPNSKSPCWYEEFSGQNTTDPYLTNSYVLYSKRFRSTFDALRKAFWGHLAHAHGKHFRLRCLPHFYIIGQPKCGTTDLYDRLRLHPEVKFSAIKEPHWWTRKRFGIVRLRDGLRDRYPVEDYLDLFDLAAHQIHQGLQASSAKEQSKMNTIIIGEASASTMWDNNAWTFFYDNSTDGEPPFLTQDFIHAFQPNARLIVMLRDPVERLYSDYLYFASSNKSADDFHEKVTEALQLFENCMLDYSLRACVYNNTLNNAMPVRLQVGLYAVYLLDWLSVFDKQQFLILRLEDHASNVKYTMHKVFQFLNLGPLSEKQEALMTKSPASNARRPEDRNLGPMWPITQKILRDFYRPFNARLAQVLADEAFAWKTT

SEQ ID NO: 1031050 - protein, 91 aa, Homo sapiens
  misc_feature (22)..(22): Xaa can be any naturally occurring amino acid
LRSMLVNCNRIPFPQNQYAMIXIRARTDGYGSAVVQPSFCWCCLSAIREGTHSPFEGVQRALSARMARAVFATEGACVLNSHLQGQSPPSL

SEQ ID NO: 1031051 - protein, 281 aa, Homo sapiens
  misc_feature (2)..(2): Xaa can be any naturally occurring amino acid
  misc_feature (27)..(27): Xaa can be any naturally occurring amino acid
WXVAVAGGASNLLSLESQMPAKADSLXLPLLKRKASGPGVALDLEPLRGSLNHTPAHLECFLFPGEASASTMWDNNAWTFFYDNSTDGEPPFLTQDFIHAFQPNARLIVMLRDPVERLYSDYLYFASSNKSADDFHEKVTEALQLFENCMLDYSLRACVYNNTLNNAMPVRLQVGLYAVYLLDWLSVFDKQQFLILRLEDHASNVKYTMHKVFQFLNLGPLSEKQEALMTKSPASNARRPEDRNLGPMWPITQKILRDFYRPFNARLAQVLADEAFAWKTT

SEQ ID NO: 1031052 - protein, 571 aa, Homo sapiens
MRHCINCCIQLLPDGAHKQQVNCQGGPHHGHQACPTCKGENKILFRVDSKQMNLLAVLEVRTEGNENWGGFLRFKKGKRCSLVFGLIIMTLVMASYILSGAHQELLISSPFHYGGFPSNPSLMDSENPSDTKEHHHQSSVNNISYMKDYPSIKLIINSITTRIEFTTRQLPDLEDLKKQELHMFSVIPNKFLPNSKSPCWYEEFSGQNTTDPYLTNSYVLYSKRFRSTFDALRKAFWGHLAHAHGKHFRLRCLPHFYIIGQPKCGTTDLYDRLRLHPEVKFSAIKEPHWWTRKRFGIVRLRDGLRDRYPVEDYLDLFDLAAHQIHQGLQASSAKEQSKMNTIIIGEASASTMWDNNAWTFFYDNSTDGEPPFLTQDFIHAFQPNARLIVMLRDPVERLYSDYLYFASSNKSADDFHEKVTEALQLFENCMLDYSLRACVYNNTLNNAMPVRLQVGLYAVYLLDWLSVFDKQQFLILRLEDHASNVKYTMHKVFQFLNLRSQSRVAEFWLLIMDAGPLGHERLPSACGYQPPQGPESHFVVQATLLNEGDAGKRHVLAERVLPMWTGHRGMA

SEQ ID NO: 1031053 - protein, 561 aa, Homo sapiens; identical to SEQ ID NO: 1031049

SEQ ID NO: 1031054 - protein, 561 aa, Homo sapiens; identical to SEQ ID NO: 1031049

SEQ ID NO: 1031055 - protein, 482 aa, Homo sapiens
MRHCINCCIQLLPDGAHKQQVNCQGGPHHGHQACPTCKGENKILFRVDSKQMNLLAVLEVRTEGNENWGGFLRFKKGKRCSLVFGLIIMTLVMASYILSGAHQELLISSPFHYGGFPSNPSLMDSENPSDTKEHHHQSSVNNISYMKDYPSIKLIINSITTRIEFTTRQLPDLEDLKKQELHMFSVIPNKFLPNSKSPCWYEEFSGQNTTDPYLTNSYVLYSKRFRSTFDALRKAFWGHLAHAHGKHFRLRCLPHFYIIGQPKCGTTDLYDRLRLHPEVKFSAIKEPHWWTRKRFGIVRLRDGLRDRYPVEDYLDLFDLAAHQIHQGLQASSAKEQSKMNTIIIGEASASTMWDNNAWTFFYDNSTDGEPPFLTQDFIHAFQPNARLIVMLRDPVERLYSDYLYFASSNKSADDFHEKVTEALQLFENCMLDYSLRACVYNNTLNNAMPVCTPAPVPPELAPGRRSWFVVIMQAALWVCVSA

SEQ ID NO: 1031056 - protein, 660 aa, Homo sapiens
ATGTPTRTPSRTAPGALTAKPPLAPKPGTTVASGVTARSASGQVTGGHGAAAATSASAGQAPEDPSGPGTGPSGTCEAPVAVVTVTPAPEPAENSQDLGSTSSLGPGISGPRGQAPDTLSYLDSVSLMSGTLESLADDVSSMGSDSEINGLALRKTDKYGFLGGSQYSGSLESSIPVDVARQRELKWLDMFSNWDKWLSRRFQKVKLRCRKGIPSSLRAKAWQYLSNSKELLEQNPGKFEELERAPGDPKWLDVIEKDLHRQFPFHEMFAARGGHGQQDLYRILKAYTIYRPDEGYCQAQAPVAAVLLMHMPAEQAFWCLVQICDKYLPGYYSAGLEAIQLDGEIFFALLRRASPLAHRHLRRQRIDPVLYMTEWFMCIFARTLPWASVLRVWDMFFCEGVKIIFRVALVLLRHTLGSVEKLRSCQGMYETMEQLRNLPQQCMQEDFLVHEVTNLPVTEALIERENAAQLKKWRETRGELQYRPSRRLHGSRAIHEERRRQQPPLGPSSSLLSLPGLKSRGSRAAGGAPSPPPPVRRASAGPAPGPVVTAEGLHPSLPSPTGNSTPLGSSKETRKQEKERQKQEKERQKQEKEREKERQKQEKEREKQEKEREKQEKERQKQEKKAQGRKLSLRRKADGPPGPHDGGDRPSAEARQDAYF

SEQ ID NO: 1031057 - protein, 226 aa, Homo sapiens
ATGTPTRTPSRTAPGALTAKPPLAPKPGTTVASGVTARSASGQVTGGHGAAAATSASAGQAPEDPSGPGTGPSGTCEAPVAVVTVTPAPEPAENSQDLGSTSSLGPGISGPRGQAPDTLSYLDSVSLMSGTLESLADDVSSMGSDSEINGLALRKTDKYGFLGGSQYSGSLEYQWAPSGTASGKQRLGEGEAKTIHFAQTLAAQPPLRIHGVISASCRVLSILRCL

SEQ ID NO: 1031058 - protein, 636 aa, Homo sapiens
MEEPGDKLWDESGTGFGDSSSQPVTALTVFPNPHRQQDLYRILKAYTIYRPDEGYCQAQAPVAAVLLMHMPAEVSAWSGPGGAGGSHPTVVMGELPAPCFSGPTPPPCSCSSQQAFWCLVQICDKYLPGYYSAGLVSVWRLGASGAVAFPPGCRQVLALPHPGLPGFCPQGRPVLPMMGAQLTWPSSHGLSHLQEAIQLDGEIFFALLRRASPLAHRHLRRQRIDPVLYMTEWFMCIFARTLPWASVLRVWDMFFCEGTSVALQAMRGWGFCGGYQGFCHISGGPWTKGTCWVEVSPEAAGGWRNRPDFSSATNPEPALPAKILETDSSSCTFTGPQFPHLRLAVDGDGGCESILIRTAEILGLTTPCSLLSTPAGVKIIFRVALVLLRHTLGSVEKLRSCQGMYETMEQLRNLPQQCMQEDFLVHEVTNLPVTEALIERENAAQLKKWRETRGELQYRPSRRLHGSRAIHEERRRQQPPLGPSSSLLSLPGLKSRGSRAAGGAPSPPPPVRRASAGPAPGPVVTAEGLHPSLPSPTGNSTPLGSSKETRKQEKERQKQEKERQKQEKEREKERQKQEKEREKQEKEREKQEKERQKQEKKAQGRKLSLRRKADGPPGPHDGGDRPSAEARQDAYF

SEQ ID NO: 1031059 - protein, 757 aa, Homo sapiens
MPKWPDILMFGSSQTIQFLFELGEVACLSSPCNAGFTLLLLTPSVLPRPCRESSIPVDVARQRELKWLDMFSNWDKWLSRRFQKVKLRCRKGIPSSLRAKAWQYLSNSKELLEQNPGKFEELERAPGDPKWLDVIEKDLHRQFPFHEMFAARGGHGQQDLYRILKAYTIYRPDEGYCQAQAPVAAVLLMHMPAEVSAWSGPGGAGGSHPTVVMGELPAPCFSGPTPPPCSCSSQQAFWCLVQICDKYLPGYYSAGLVSVWRLGASGAVAFPPGCRQVLALPHPGLPGFCPQGRPVLPMMGAQLTWPSSHGLSHLQEAIQLDGEIFFALLRRASPLAHRHLRRQRIDPVLYMTEWFMCIFARTLPWASVLRVWDMFFCEGTSVALQAMRGWGFCGGYQGFCHISGGPWTKGTCWVEVSPEAAGGWRNRPDFSSATNPEPALPAKILETDSSSCTFTGPQFPHLRLAVDGDGGCESILIRKAEILGLTTPCSLLSTPAGVKIIFRVALVLLRHTLGSVEKLRSCQGMYETMEQLRNLPQQCMQEDFLVHEVTNLPVTEALIERENAAQLKKWRETRGELQYRPSRRLHGSRAIHEERRRQQPPLGPSSSLLSLPGLKSRGSRAAGGAPSPPPPVRRASAGPAPGPVVTAEGLHPSLPSPTGNSTPLGSSKETRKQEKERQKQEKERQKQEKEREKERQKQEKEREKQEKEREKQEKERQKQEKKAQGRKLSLRRKADGPPGPHDGGDRPSAEARQDAYF

SEQ ID NO: 1031060 - protein, 238 aa, Homo sapiens
DAQLDGCPVEDYTGLGEHMCLCVCVRVCQTVSLTPGCLAGGAEQSDADTCKTPLDIAPPPLRSLSTPGSGERRSGRSRRKSERSRKRSERSRRRSGRSRRRRLKAGSFRCVERQMGPQAPMMVGTGPQPRPGRTLTSDLCPGAGLHGPPLSLSQEQAWPKVPPPSTLSGCPLLGKVAWFPISSPAADPYTGRTDGQLQMSLEPLISHEAQLGSLSLLPQFPLGPLLGAVLNGPLSSQG

SEQ ID NO: 1031061 - protein, 106 aa, Homo sapiens
SIGRSRKQGSGGGKAGSGRSRKQKERQKQEKERQKQEKEREKERQKQEKEREKQEKEREKQEKERQKQEKKAQGRKLSLRRKADGPPGPHDGGDRPSAEARQDAYF

SEQ ID NO: 1031062 - protein, 326 aa, Homo sapiens
  misc_feature (284)..(284): Xaa can be any naturally occurring amino acid
  misc_feature (291)..(291): Xaa can be any naturally occurring amino acid
  misc_feature (325)..(325): Xaa can be any naturally occurring amino acid
ATGTPTRTPSRTAPGALTAKPPLAPKPGTTVASGVTARSASGQVTGGHGAAAATSASAGQAPEDPSGPGTGPSGTCEAPVAVVTVTPAPEPAENSQDLGSTSSLGPGISGPRGQAPDTLSYLDSVSLMSGTLESLADDVSSMGSDSEINGLALRKTDKYGFLGGSQYSGSLESSIPVDVARQRELKWLDMFSNWDKWLSRRFQKVKLRCRKGIPSSLRAKAWQYLSNSKELLEQNPGKFEELERAPGDPKWLDVIEKDLHRQFPFHEMFAARGGHGQQGTCTRXLEGLTPXYPGLDQRGYLAKAQGPPVGFAGPWLNATLPLLEXR

SEQ ID NO: 1031063 - protein, 877 aa, Homo sapiens
ATGTPTRTPSRTAPGALTAKPPLAPKPGTTVASGVTARSASGQVTGGHGAAAATSASAGQAPEDPSGPGTGPSGTCEAPVAVVTVTPAPEPAENSQDLGSTSSLGPGISGPRGQAPDTLSYLDSVSLMSGTLESLADDVSSMGSDSEINGLALRKTDKYGFLGGSQYSGSLESSIPVDVARQRELKWLDMFSNWDKWLSRRFQKVKLRCRKGIPSSLRAKAWQYLSNSKELLEQNPGKFEELERAPGDPKWLDVIEKDLHRQFPFHEMFAARGGHGQQDLYRILKAYTIYRPDEGYCQAQAPVAAVLLMHMPAEVSAWSGPGGAGGSHPTVVMGELPAPCFSGPTPPPCSCSSQQAFWCLVQICDKYLPGYYSAGLVSVWRLGASGAVAFPPGCRQVLALPHPGLPGFCPQGRPVLPMMGAQLTWPSSHGLSHLQEAIQLDGEIFFALLRRASPLAHRHLRRQRIDPVLYMTEWFMCIFARTLPWASVLRVWDMFFCEGTSVALQAMRGWGFCGGYQGFCHISGGPWTKGTCWVEVSPEAAGGWRNRPDFSSATNPEPALPAKILETDSSSCTFTGPQFPHLRLAVDGDGGCESILIRKAEILGLTTPCSLLSTPAGVKIIFRVALVLLRHTLGSVEKLRSCQGMYETMEQLRNLPQQCMQEDFLVHEVTNLPVTEALIERENAAQLKKWRETRGELQYRPSRRLHGSRAIHEERRRQQPPLGPSSSLLSLPGLKSRGSRAAGGAPSPPPPVRRASAGPAPGPVVTAEGLHPSLPSPTGNSTPLGSSKETRKQEKERQKQEKERQKQEKEREKERQKQEKEREKQEKEREKQEKERQKQEKKAQGRKLSLRRKADGPPGPHDGGDRPSAEARQDAYF

SEQ ID NO: 1031064 - protein, 597 aa, Homo sapiens
ATGTPTRTPSRTAPGALTAKPPLAPKPGTTVASGVTARSASGQVTGGHGAAAATSASAGQAPEDPSGPGTGPSGTCEAPVAVVTVTPAPEPAENSQDLGSTSSLGPGISGPRGQAPDTLSYLDSVSLMSGTLESLADDVSSMGSDSEINGLALRKTDKYGFLGGSQYSGSLESSIPVDVARQRELKWLDMFSNWDKWLSRRFQKVKLRCRKGIPSSLRAKAWQYLSNSKELLEQNPGKFEELERAPGDPKWLDVIEKDLHRQFPFHEMFAARGGHGQQDLYRILKAYTIYRPDEGYCQAQAPVAAVLLMHMPAEQAFWCLVQICDKYLPGYYSAGLGVKIIFRVALVLLRHTLGSVEKLRSCQGMYETMEQLRNLPQQCMQEDFLVHEVTNLPVTEALIERENAAQLKKWRETRGELQYRPSRRLHGSRAIHEERRRQQPPLGPSSSLLSLPGLKSRGSRAAGGAPSPPPPVRRASAGPAPGPVVTAEGLHPSLPSPTGNSTPLGSSKETRKQEKERQKQEKERQKQEKEREKERQKQEKEREKQEKEREKQEKERQKQEKKAQGRKLSLRRKADGPPGPHDGGDRPSAEARQDAYF

SEQ ID NO: 1031065 - protein, 660 aa, Homo sapiens; identical to SEQ ID NO: 1031056

SEQ ID NO: 1031066 - protein, 97 aa, Homo sapiens
SPSSRRTSKAASSKRQRSACWGVCCVGLVVGVLALSSVLWFSFHNAPVPSASDPGSERFLHSIAPLTMRWSWLPFPCLQPSLSPPLPGQGSHSGPVL

SEQ ID NO: 1031067 - protein, 145 aa, Homo sapiens [sequence omitted]

SEQ ID NO: 1031068 - protein, 162 aa, Homo sapiens
EADSIPLAAITEAGAAKMKFNPFVTSDRSKNRKRHFNAPSHIRRKIMSSPLSKELRQKYNVRSMPIRKDDEVQVVRGHYKGQQIGKVVQVYRKKYVIYIERVQREKANGTTVHVGIHPSKVVITRLKLDKDRKKILERKAKSRQVGKEKGKYKEETIEKMQE

SEQ ID NO: 1031069 - protein, 123 aa, Homo sapiens
SGIASGARLLLRMLSALPGWGPAHLQRPLLGPASCLGILRPAMTAHSFALPVIIFTTFWGLVGIAGPWFVPKGPNRGVIITMLVATAVCCYLFWLIAILAQLNPLFGPQLKNETIWYVRFLWE

SEQ ID NO: 1031070 - protein, 92 aa, Homo sapiens [sequence omitted]

SEQ ID NO: 1031071 - protein, 206 aa, Homo sapiens
SGIASGARLLLRMLSALPGWGPAHLQRPLLGPASCLGILRPAMTAHSFALPVIIFTTFWGLVGIAGPWFVPKGPNRGVIITMLVATAVCCYLLCPALGMTVAPLSLTTPSSGPSPTQLCLVTSSLLLAPRDPDPQGLPGSWKSSQSSQPARALGSPGHSSGRGDVLLQYPHCSGVCPLSQGDAAGELVWVGSFPLQTGQMPGLSPS

SEQ ID NO: 1031072 - protein, 314 aa, Homo sapiens
SGIASGARLLLRMLSALPGWGPAHLQRPLLGPASCLGILRPAMTAHSFALPVIIFTTFWGLVGIAGPWFVPKGPNRGVIITMLVATAVCCYLFWHHRHSWSQLKPLFVAPACKNEIIVCTVLLSVWEDLVSHPNRRVSHASSRTEPDETSNMITMNKDTLSITEPHHTHKTPPPHNYVWSPAPSCWHPETRTRRACLVPGSLPSLPSQPGPWGALGTAAAEGMSCSNTRTALEFALFPKEMLLGSWYGWGLSLYRRGRCQDSAHPEEDTCPHGEGAPAQAGESVPSQQLCHHPAGNWGGLYWVIGKAFSLAWNC

SEQ ID NO: 1031073 - protein, 162 aa, Homo sapiens; identical to SEQ ID NO: 1031068

SEQ ID NO: 1031074 - protein, 123 aa, Homo sapiens; identical to SEQ ID NO: 1031069

SEQ ID NO: 1031075 - protein, 229 aa, Homo sapiens
  misc_feature (71)..(71): Xaa can be any naturally occurring amino acid
GRVGKIKASFGLELAYAKGRLDIVIITMLVATAVCCYLFWLIAILAQLNPLFGPQLKNETIWYVRFLWLSXPRAPYQVPSSRNDCGSTVPDNPFVRTLPHTTMSGHQLPPAGTQRPGPAGPAWFLEVFPVFPASPGPGEPWAQQRPRGCPAPIPALLWSLPSFPRRCCWGAGMGGVFPFTDGADARTQPILRRTRVLMERVLRPRRGSRCPVSSSATILLGTGGASIGL

SEQ ID NO: 1031076 - protein, 196 aa, Homo sapiens
RPLQHQNVPSQQLCHHPAGNWGVTRRPRPRCPALGMTVAPLSLTTPSSGPSPTQLCLVTSSLLLAPRDPDPQGLPGSWKSSQSSQPARALGSPGHSSGRGDVLLQYPHCSGVCPLSQGDAAGELVWVGSFPLQTGPVLTGAPGEETTASLLYGLLMWPAILFSGHCLWSSRRLGCLSLTCQFLAGQLLRAQAGASH

SEQ ID NO: 1031077 - protein, 92 aa, Homo sapiens [sequence omitted]

SEQ ID NO: 1031078 - protein, 106 aa, Homo sapiens
RGTWEQDPCRWCAPKTIARRAPAPLSTRGPGPGVAFVPFIHCAINPLSPIKKKSAAAACPGHGLLFKTKLEKSLAWKEAQPELQEPQPAAPGTPGGFSEVMGSALA

SEQ ID NO: 1031079 - protein, 155 aa, Homo sapiens
MQSVTSVETQRATDVCSACAAAAARSEPPKRLQTAQVTDCFLKPNWRSLWPGKRPSLSCRSLSQQHLEHQVASPKSWAVPWPEGPQPPPPGLLLEPGHVLLKKMPFTQGISCYLMWKDTPMSPFGPLWGPGNAAVGSRPQAGPALSSARVCKSEQ

SEQ ID NO: 1031080 - protein, 155 aa, Homo sapiens; identical to SEQ ID NO: 1031079

SEQ ID NO: 1031081 - protein, 494 aa, Homo sapiens
MPKLQGFEFWSRTLRGARHVVAPMVDQSELAWRLLSRRHGAQLCYTPMLHAQVFVRDANYRKENLYCEVCPEDRPLIVQFCANDPEVFVQAALLAQDYCDAIDLNLGCPQMIAKRGHYGAFLQDEWDLLQRMILLAHEKLSVPVTCKIRVFPEIDKTVRYAQMLEKAGCQLLTVHGRTKEQKGPLSGAASWEHIKAVRKAVAIPVFANGNIQCLQDVERCLRDTGVQGVMSAGGAVAQDSSQAPCTRPDTTSPEGNLHNPALFEGRSPAVWELAEEYLDIVREHPCPLSYVRAHLFKLWHHTLQVHQELREELAKVKTLEGIAAVSQELKLRCQEEISRQEGAKPTGDLPFHWICQPYIRPGPREGSKEKAGARSKRALEEEEGGTEVLSKNKQKKQLRNPHKTFDPSLKPKYAKCDQCGNPKGNRCVFSLCRGCCKKRASKETADCPGHGLLFKTKLEKSLAWKEAQPELQEPQPAAPGTPGGFSEVMGSALA

SEQ ID NO: 1031082 - protein, 492 aa, Homo sapiens
MPKLQGFEFWSRTLRGARHVVAPMVDQSELAWRLLSRRHGAQLCYTPMLHAQVFVRDANYRKENLYCEVCPEDRPLIVQFCANDPEVFVQAALLAQDYCDAIDLNLGCPQMIAKRGHYGAFLQDEWDLLQRMILLAHEKLSVPVTCKIRVFPEIDKTVRYAQMLEKAGCQLLTVHGRTKEQKGPLSGAASWEHIKAVRKAVAIPVFANGNIQCLQDVERCLRDTGVQGVMSAEGNLHNPALFEGRSPAVWELAEEYLDIVREHPCPLSYVRAHLFKLWHHTLQVHQELREELAKVKTLEGIAAVSQELKLRCQEEISRQEGAKPTGDLPFHWICQPYIRPGPREGSKEKAGARSKRALEEEEGGTEVLSKNKQKKQLRNPHKTFDPSLKPKYAKCDQCGNPKGNRCVFSLCRGCCKKRASKETADCPGLLLEPGHVLLKKMPFTQGISCYLMWKDTPMSPFGPLWGPGNAAVGSRPQAGPALSSARVCKSEQ

SEQ ID NO: 1031083 - protein, 333 aa, Homo sapiens
MPKLQGFEFWSRTLRGARHVVAPMVDQSELAWRLLSRRHGAQLCYTPMLHAQVFVRDANYRKENLYCEVCPEDRPLIVQFCANDPEVFVQAALLAQDYCDAIDLNLGCPQMIAKRGHYGAFLQDEWDLLQRMILLAHEKLSVPVTCKIRVFPEIDKTVRYAQMLEKAGCQLLTVHGRTKEQKGPLSGAASWEHIKAVRKAVAIPVFANGNIQCLQDVERCLRDTGVQGVMSAEGNLHNPALFEGRSPAVWELAEEYLDIVREQGEGRCAQQAGPGGRGGWHGGPVQEQAKEAAEEPPQDLRPLSEAKYARCPVEPKGKMGSTVPGCEKSPKMG

SEQ ID NO: 1031084 - protein, 554 aa, Homo sapiens
MPKLQGFEFWSRTLRGARHVVAPMVDQSELAWRLLSRRHGAQLCYTPMLHAQVFVRDANYRKENLYCEVCPEDRPLIVQFCANDPEVFVQAALLAQDYCDAIDLNLGCPQMIAKRGHYGAFLQDEWDLLQRMILLAHEKLSVPVTCKIRVFPEIDKTVRYAQMLEKAGCQLLTVHGRTKEQKGPLSGAASWEHIKAVRKAVAIPVFANGNIQCLQDVERCLRDTGVQGVMSAEGNLHNPALFEGRSPAVWELAEEYLDIVREHPCPLSYVRAHLFKLWHHTLQVHQELREELAKVKTLEGIAAVSQELKLRCQEEISRQEGAKPTGDLPFHWICQPYIRPGPREGSKEKAGARSKRALEEEEGGTEVLSKNKQKKQLRNPHKTFDPSLKPKYAKCDQCGNPKVSGFRLQATKASALGVGRVVSALLGVAGLVPAQLGLQRGSRWHGCLRTAPCFQPSPCPGLEGKRVWVGWGEGEASGLGAVPRAASRPWASGRGFPSGAAPLLASLAPGVVLATGSRDFLCPGQQMCVQPVPRLLQEASLQRDCRLPRSRIAF

SEQ ID NO: 1031085 - protein, 227 aa, Homo sapiens
MPKLQGFEFWSRTLRGARHVVAPMVDQSELAWRLLSRRHGAQLCYTPMLHAQVFVRDANYRKENLYCEVCPEDRPLIVQFCANDPEVFVQAALLAQDYCDAIDLNLGCPQMIAKRGHYGAFLQDEWDLLQRMILLAHEKLSVPVTCKIRVFPEIDKTVRYAQMLEKAGCQLLTVHGRTKEQKGPLSGAASWEHIKAVRKAVAIPVFANGRKRRVARRSCPRTSKRSS

SEQ ID NO: 1031086 - protein, 516 aa, Homo sapiens
MPKLQGFEFWSRTLRGARHVVAPMVDQSELAWRLLSRRHGAQLCYTPMLHAQVFVRDANYRKENLYCEVCPEDRPLIVQFCANDPEVFVQAALLAQDYCDAIDLNLGCPQMIAKRGHYGAFLQDEWDLLQRMILLAHEKLSVPVTCKIRVFPEIDKTVRYAQMLEKAGCQLLTVHGRTKEQKGPLSGAASWEHIKAVRKAVAIPVFANGNIQCLQDVERCLRDTGVQGVMSAEGNLHNPALFEGRSPAVWELAEEYLDIVREHPCPLSYVRAHLFKLWHHTLQVHQELREELAKVKTLEGIAAVSQELKLRCQEEISRQEGAKPTGDLPFHWICQPYIRPGPREGSKEKAGARSKRALEEEEGGTEVLSKNKQKKQLRNPHKTFDPSLKPKYAKCDQCGNPKVSGFRLQATKASALGVGRVVSALLGVAGLVPAQLGLQRGSRWHGCLRTAPCFQPSPCPGLEGKRVWVGWGEGEASGLGAVPRAASRPWASGRGFPSGEQAPGWTCPVLSTRVQK

SEQ ID NO: 1031087 - protein, 323 aa, Homo sapiens
AARAADSISEAPDSLVTVLNGLPEGKEGTPHSSGTRHGRLAPHPDSDPCGCGCWAPLTVSLGSARCPPLRPREGSKEKAGARSKRALEEEEGGTEVLSKNKQKKQLRNPHKTFDPSLKPKYAKCDQCGNPKVSGFRLQATKASALGVGRVVSALLGVAGLVPAQLGLQRGSRWHGCLRTAPSSSQAPAQAWRGRESGWVGVRERHLAWEQFPGLHPGRGHLAEASPVGLLPCWPAWPREWCWPQAPEISCAQGNRCVFSLCRGCCKKRASKETADCPGHGLLFKTKLEKSLAWKEAQPELQEPQPAAPGTPGGFSEVMGSALA

SEQ ID NO: 1031088 - protein, 326 aa, Homo sapiens
  misc_feature (300)..(300): Xaa can be any naturally occurring amino acid
MPKLQGFEFWSRTLRGARHVVAPMVDQSELAWRLLSRRHGAQLCYTPMLHAQVFVRDANYRKENLYCEVCPEDRPLIVQFCANDPEVFVQAALLAQDYCDAIDLNLGCPQMIAKRGHYGAFLQDEWDLLQRMILLAHEKLSVPVTCKIRVFPEIDKTVRYAQMLEKAGCQLLTVHGRTKEQKGPLSGAASWEHIKAVRKAVAIPVFANGNIQCLQDVERCLRDTGVQGVMSARRAYHAQPQPLCSRARVPLPCWDAGLKRTYLGPSVAGDANSLALACLLPYQAPHSAFNVLEGSPTAAXGCCSPGMLRDEAMLVPTGCKNPVDAA

SEQ ID NO: 1031089 - protein, 155 aa, Homo sapiens; identical to SEQ ID NO: 1031079

SEQ ID NO: 1031090 - protein, 155 aa, Homo sapiens; identical to SEQ ID NO: 1031079

SEQ ID NO: 1031091 - protein, 155 aa, Homo sapiens; identical to SEQ ID NO: 1031079

SEQ ID NO: 1031092 - protein, 151 aa, Homo sapiens
RGGGAEPWARLRPGGGPGAVRAFAAPRELQGPRAAARPERGGPGTPAPGALGAKGARRTRRGPRAPGDDAKAAGLRVLEPHPARGPPRRGPHGGPERAGLEAAEPAPRGTALLHAHAACPGLCPRRQLPEGEPVLRGVPRGPAPHRAVLCQ

SEQ ID NO: 1031093 - protein, 190 aa, Homo sapiens
PWTVAGTPPVCLGRTESCSSCAAHQPTCFLSVSCRMVPPASPHTLLTEGKADVASLHPLPSLSLLGLAGHSWHGRHQQAPCRRTGQPPQPGQTLALTHQHPFVLFLAKYAKCDQCGNPKGNRCVFSLCRGCCKKRASKETADCPGHGLLFKTKLEKSLAWKEAQPELQEPQPAAPGTPGGFSEVMGSALA

SEQ ID NO: 1031094 - protein, 281 aa, Homo sapiens
  misc_feature (249)..(249): Xaa can be any naturally occurring amino acid
  misc_feature (261)..(261): Xaa can be any naturally occurring amino acid
MPKLQGFEFWSRTLRGARHVVAPMVDQSELAWRLLSRRHGAQLCYTPMLHAQVFVRDANYRKENLYCEVCPEDRPLIVQFCANDPEVFVQAALLAQDYCDAIDLNLGCPQMIAKRGHYGAFLQDEWDLLQRMILLAHEKLSVPVTCKIRVFPEIDKTVRYAQMLEKAGCQLLTVHGRTKEQKGPLSGAASWEHIKAVRKAVAIPVFANGNIQCLQDVERCLRDTGVQGVMSAEGCPQMIAKRGHYGAFXQDEWDLLQRMIXLAHEKLSVPVTCKIRVFPEI

SEQ ID NO: 1031095 - protein, 248 aa, Homo sapiens
EQQEEAEHSIVGTRLVSGQLQPSQPNADQGKLTTMRIAVIGFGLLGITCAIPVKQADSGSSEEKQLYNKYPDAVATWLNPDPSQKQNLLAPQTLPSKSNESHDHMDDMDDEDDDDHVDSQDSIDSNDSDDVDDTDDSHQSDESHHSDESDELVTDFPTDLPATEVFTPVVPTVDTYDGRGDSVVNGLRSKSKKFARPESGTLMLQTRTSAHNGKRGVDMVHTRAIPVAQELAAASGLDKPREGTVLKS

SEQ ID NO: 1031096 - protein, 263 aa, Homo sapiens
EQQEEAEHSIVGTRLVSGQLQPSQPNADQGKLTTMRIAVIGFGLLGITCAIPVKQADSGSSEEKQLYNKYPDAVATWLNPDPSQKQNLLAPQKCCGPLKKPMTLNKRPFQVSPTKAMTTWMIWMMKMMMTMWTARTPLTRTTLNDVDDTDDSHQSDESHHSDESDELVTDFPTDLPATEVFTPVVPTVDTYDGRGDSVVNGLRSKSKKFARPESGTLMLQTRTSAHNGKRGVDMVHTRAIPVAQELAAASGLDKPREGTVLKS

SEQ ID NO: 1031097 - protein, 161 aa, Homo sapiens
SDFEHTIHVGFDAVTGEFTGMPEQWARLLQTSNITKLEQKKNPQAVLDVLKFYDSNTVKQKYLSFTPPEKDGFPSGTPALNAKGTEAPAVVTEEEDDDEETAPPVIAPRPDHTKSIYTRSVIDPVPAPVGDSHVDGAAKSLDKQKKKTKMTDEEIMEKLSM

SEQ ID NO: 1031098 - protein, 256 aa, Homo sapiens
  misc_feature (240)..(240): Xaa can be any naturally occurring amino acid
SDFEHTIHVGFDAVTGEFTGMPEQWARLLQTSNITKLEQKKNPQAVLDVLKFYDSNTVKQKYLSFTPPEKDGFPSGTPALNAKGTEAPAVVTEEEDDDEETAPPVIAPRPDHTKSIYTRSVIDPVPAPVGDSHVDGAAKSLDKQKKKTKMTDEEIMEKLRTIVSIGDPKKKYTRYEKIGQGASGTVFTATDVALGQEVAIKQINLQKQPKKELIINEILVMKELKNPNIVNFLDSYLVGXELFVVMEYLAGGSSLM

SEQ ID NO: 1031099 - protein, 235 aa, Homo sapiens
SDFEHTIHVGFDAVTGEFTGMPEQWARLLQTSNITKLEQKKNPQAVLDVLKFYDSNTVKQKYLSFTPPEKDGFPSGTPALNAKGTEAPAVVTEEEDDDEETAPPVIAPRPDHTKSIYTRSVIDPVPAPVGDSHVDGAAKSLDKQKKKTKMTDEEIMEKLRTIVSIGDPKKKYTRYEKIGQGASGTVFTATDVALGQEVAIKQINLQKQPKKELIINEILVMKELKNPNIVNFLDR

SEQ ID NO: 1031100 - protein, 178 aa, Homo sapiens
RRAWVALGRIWVPAGCAGLRFRPCHLAAPYPTRGRLMLGLVGEIITALRAEESSRLVALEVLRRFWRPLEQHYLDLDETGPLLPGLVEYMNSGPVVATGLGGAGRGEEHGRVMLGETHPAEFASPAPIRGDFCIQVGKDTDYQWHVIQYKSAEKEISLWFKPEELVDYKSCAHDWVYE

SEQ ID NO: 1031101 - protein, 178 aa, Homo sapiens; identical to SEQ ID NO: 1031100

SEQ ID NO: 1031102 - protein, 149 aa, Homo sapiens
  misc_feature (57)..(57): Xaa can be any naturally occurring amino acid
  misc_feature (147)..(147): Xaa can be any naturally occurring amino acid
QAPWLASAKVAVGCPQASAWPPPPISYQEELYDFPSCGKWRARSQGSAEASQWPAPXASPGGALASPEPGRKILPRMISHSELRKLFYSADAVCFDVDSTVISEEGIGRISLCHQAGVQWCNLGSLQPPPPGFKQFSCLHLPELAEXTG

SEQ ID NO: 1031103 - protein, 412 aa, Homo sapiens
SELIRHQITHTGEKPYECMNVGRHFAVSHTLLDIRASYNQNPINVMSVGKLLIRAQSLFYIRGFILERNPIPVINVAKPSVGFQILLIINEFTLERSLTHVISAIKCLVEDEILLNITEFIQVRNPMNVMTVGKPLVRAPTLFFIRESTLERNLMHVVIVLKALVAVQILLSIKEYTLERNHMHVISVIKVLVKAQTSLNIREYTLVKSLIIAIVVRKPSVRVLTLFFIREFTLEKNYYLCTQCSKSFSQISDLIKHQRIHTGEKPYKCSECRKAFSQCSALTLHQRIHTGKKPNPCDECGKSFSRRSDLINHQKIHTGEKPYKCDACGKAFSTCTDLIEHQKTHAEEKPYQCVQCSRSCSQLSELTIHEEVHCGEDSQNVMNVRKPLVCTPTLFSTRDTVPEKNLMNAVDY

SEQ ID NO: 1031104 - protein, 485 aa, Homo sapiens
EKNPINAVIVVKVLASAQIWLNIRESILERSLILVTSVTNILDSDVIKHQRIHTGEKPYKCDVCGKAFSQSSDLILHQRIHTGEKPYPCNQCSKSFSQNSDLIKHRRIHTGEKPYKCNECGKAFNQSSVLILHQRIHTGEKPYPCDQCSKTFSRLSDLINHQRIHTGEKPYPCNQCNKMFSQRMRSLLNITEFIQVRNPMNVMTVGKPLVRAPTLFFIRESTLERNLMHVVIVLKALVAVQILLSIKEYTLERNHMHVISVIKVLVKAQTSLNIREYTLVKSLIIAIVVRKPSVRVLTLFFIREFTLEKNYYLCTQCSKSFSQISDLIKHQRIHTGEKPYKCSECRKAFSQCSALTLHQRIHTGKKPNPCDECGKSFSRRSDLINHQKIHTGEKPYKCDACGKAFSTCTDLIEHQKTHAEEKPYQCVQCSRSCSQLSELTIHEEVHCGEDSQNVMNVRKPLVCTPTLFSTRDTVPEKNLMNAVDY

SEQ ID NO: 1031105 - protein, 461 aa, Homo sapiens; identical to SEQ ID NO: 816332

SEQ ID NO: 1031106 - protein, 493 aa, Homo sapiens
MSSPTTSSLDTPLPGNGPPQPGAPSSSPTVKEEGPEPWPGGPDPDVPGTDEASSACSTDWVIPDPEEEPERKRKKGPAPKMLGHELCRVCGDKASGFHYNVLSCEGCKGFFRRSVVRGGARRYACRGGGTCQMDAFMRRKCQQCRLRKCKEAGMREQSECSREGAGARPWPHRHSTWEFMLRPESPIQACVLSEEQIRKKKIRKQQQQESQSQSQSPVGPQGSSSSASGPGASPGGSEAGSQGSGEGEGVQLTAAQELMIQQLVAAQLQCNKRSFSDQPKVTPWPLGADPQSRDARQQRFAHFTELAIISVQEIVDFAKQVPGFLQLGREDQIALLKASTIEIMLLETARRYNHETECITFLKDFTYSKDDFHRAGLQVEFINPIFEFSRAMRRLGLDDAEYALLIAINIFSADRPNVQEPGRVEALQQPYVEALLSYTRIKRPQDQLRFPRMLMKLVSLRTLSSVHSEQVFALRLQDKKLPPLLSEIWDVHE

SEQ ID NO: 1031107 - protein, 314 aa, Homo sapiens
MSHVRGVREQCVLSEEQIRKKKIRKQQQQESQSQSQSPVGPQGSSSSASGPGASPGGSEAGSQGSGEGEGVQLTAAQELMIQQLVAAQLQCNKRSFSDQPKVTPWPLGADPQSRDARQQRFAHFTELAIISVQEIVDFAKQVPGFLQLGREDQIALLKASTIEIMLLETARRYNHETECITFLKDFTYSKDDFHRAGLQVEFINPIFEFSRAMRRLGLDDAEYALLIAINIFSADRPNVQEPGRVEALQQPYVEALLSYTRIKRPQDQLRFPRMLMKLVSLRTLSSVHSEQVFALRLQDKKLPPLLSEIWDVHE

SEQ ID NO: 1031108 - protein, 483 aa, Homo sapiens
MSIRVTQKSYKVSTSGPRAFSSRSYTSGPGSRISSSSFSRVGSSNFRGGLGGGYGGASGMGGITAVTVNQSLLSPLVLEVDPNIQAVRTQEKEQIKTLNNKFASFIDKVRFLEQQNKMLETKWSLLQQQKTARSNMDNMFESYINNLRRQLETLGQEKLKLEAELGNMQGLVEDFKNKYEDEINKRTEMENEFVLIKKDVDEAYMNKVELESRLEGLTDEINFLRQLYEEEIRELQSQISDTSVVLSMDNSRSLDMDSIIAEVKAQYEDIANRSRAEAESMYQIKYEELQSLAGKHGDDLRRTKTEISEMNRNISRLQAEIEGLKGQRASLEAAIADAEQRGELAIKDANAKLSELEAALQRAKQDMARQLREYQELMNVKLALDIEIATYRKLLEGEESRLESGMQNMSIHTKTTSGYAGGLSSAYGGLTSPGLSYSLGSSFGSGAGSSSFSRTSSSRAVVVKKIETRDGKLVSESSDVLPK

SEQ ID NO: 1031109 - protein, 483 aa, Homo sapiens; identical to SEQ ID NO: 1031108

SEQ ID NO: 1031110 - protein, 483 aa, Homo sapiens; identical to SEQ ID NO: 1031108

SEQ ID NO: 1031111 - protein, 483 aa, Homo sapiens; identical to SEQ ID NO: 1031108

SEQ ID NO: 1031112 - protein, 256 aa, Homo sapiens
MKEEIRELQSQISDTSVVLSMDNSRSLDMDSIIAEVKAQYEDIANRSRAEAESMYQIKYEELQSLAGKHGDDLRRTKTEISEMNRNISRLQAEIEGLKGQRASLEAAIADAEQRGELAIKDANAKLSELEAALQRAKQDMARQLREYQELMNVKLALDIEIATYRKLLEGEESRLESGMQNMSIHTKTTSGYAGGLSSAYGGLTSPGLSYSLGSSFGSGAGSSSFSRTSSSRAVVVKKIETRDGKLVSESSDVLPK

SEQ ID NO: 1031113 - protein, 249 aa, Homo sapiens
MKEEIRELQSQISDTSVVLSMDNSRSLDMDSIIAEVKAQYEDIANRSRAEAESMYQIKYEELQSLAGKHGDDLRRTKTEISEMNRNISRLQAEIEGLKGQRASLEAAIADAEQRGELAIKDANAKLSELEAALQRAKQDMARQLREYQELMNVKLALDIEIATYRKLLEGEESRLESGMQNMSIHTKTTSGYAGGLSSAYGGLTSPAQYSWASWSGRVKSSADKPQAGVKNPPVGDGLARPPRRGPPPW

SEQ ID NO: 1031114 - protein, 261 aa, Homo sapiens
MSIRVTQKSYKVSTSGPRAFSSRSYTSGPGSRISSSSFSRVGSSNFRGGLGGGYGGASGMGGITAVTVNQSLLSPLVLEVDPNIQAVRTQEKEQIKTLNNKFASFIDKVRFLEQQNKMLETKWSLLQQQKTARSNMDNMFESYINNLRRQLETLGQEKLKLEAELGNMQGLVEDFKNKYEDEINKRTEMENEFVLIKKDVDEAYMNKVELESRLEGLTDEINFLRQLYERGDPGAAVPDLGHICGAVHGQQPLPGHGQHHC

SEQ ID NO: 1031115 - protein, 261 aa, Homo sapiens; identical to SEQ ID NO: 1031114

SEQ ID NO: 1031116 - protein, 279 aa, Homo sapiens
MNKVELESRLEGLTDEINFLRQLYEEEIRELQSQISDTSVVLSMDNSRSLDMDSIIAEVKAQYEDIANRSRAEAESMYQIKYEELQSLAGKHGDDLRRTKTEISEMNRNISRLQAEIEGLKGQRASLEAAIADAEQRGELAIKDANAKLSELEAALQRAKQDMARQLREYQELMNVKLALDIEIATYRKLLEGEESRLESGMQNMSIHTKTTGGYAGGLSSAYGDLTDPGLSYSLGSSFGSGAGSSSFSRTSSSRAVVVKKIETRDGKLVSESSDVLPK

SEQ ID NO: 1031117 - protein, 240 aa, Homo sapiens
MKEEIRELQSQISDSIIAEVKAQYEDIANRSRAEAESMYQIKYEELQSLAGKHGDDLRRTKTEISEMNRNISRLQAEIEGLKGQRASLEAAIADAEQRGELAIKDANAKLSELEAALQRAKQDMARQLREYQELMNVKLALDIEIATYRKLLEGEESRLESGMQNMSIHTKTTSGYAGGLSSAYGGLTSPGLSYSLGSSFGSGAGSSSFSRTSSSRAVVVKKIETRDGKLVSESSDVLPK

SEQ ID NO: 1031118 - protein, 279 aa, Homo sapiens; identical to SEQ ID NO: 1031116

SEQ ID NO: 1031119 - protein, 240 aa, Homo sapiens; identical to SEQ ID NO: 1031117

SEQ ID NO: 1031120 - protein, 277 aa, Homo sapiens
MKEEIRELQSQISDTSVVLSMDNSRSLDMDSIIAEVKAQYEDIANRSRAEAESMYQIKYEELQSLAGKHGDDLRRTKTEISEMNRNISRLQAEIEGLKGQRASLEAAIADAEQRGELAIKDANAKLSELEAALQRAKQDMARQLREYQELMNVKLALDIEIATYRKLLEGEESRLESGMQNMSIHTKTTRGKQGAELRLVGAKKPGSDKGGPSLGLGGPSLADNLRRGWKTNTVGTGWTRAAKERGGPDTPGPRRGAGGERPDPPERRTAHKVSRPK

SEQ ID NO: 1031121 - protein, 144 aa, Homo sapiens
MSIRVTQKSYKVSTSGPRAFSSRSYTSGPGSRISSSSFSRVGSSNFRGGLGGGYGGASGMGGITAVTVNQSLLSPLVLEVDPNIQAVRTQEKEQIKTLNNKFASFIDKVRFLEQQNKMLETKWSMVLPAEDRLRTNMYYTLETE

SEQ ID NO: 1031122 - protein, 135 aa, Homo sapiens
  misc_feature (132)..(132): Xaa can be any naturally occurring amino acid
MSIRVTQKSYKVSTSGPRAFSSRSYTSGPGSRISSSSFSRVGSSNFRGGLGGGYGGASGMGGITAVTVNQSLLSPLVLEVDPNIQAVRTQEKEQIKTLNNKFASFHQHVAARTRMPGGLSWKACKAQKNSFXGNM

SEQ ID NO: 1031123 - protein, 411 aa, Homo sapiens
PPLRARTHTHDAGRPTLACLLQQQKTARSNMDNMFESYINNLRRQLETLGQEKLKLEAELGNMQGLVAAHFTATHATERLHALTLTRYTHALRRNRTLAPSLTRTATAAHCTRLTTAHPTGYAALARLLAPCDTRPAPAPHALTPSLTRHPYLLTPRPHPGHPCPLPRTLAHPTLLAACSPRPPPRPPPLAPLAPPPPSACTAHPAPRYRTALLRPPRPPPRACPPAQPLLPTTSPLLHRTLAPTPCPCRPPPRALHPCRAAPPRTCDSPAALDPRHPFAPASRACRTGRAPPPRPHAPPLPRPALPHAPPPPPSWPPPACPPPLARTWPPPLPAPHPRLPRPPPYSPPPPTATPAPPPPNPPHPTPPPHPPPRPSPPPHYPPPPTPPPTPPAPRPPPPPPPPPHQPTHTS

SEQ ID NO: 1031124 - protein, 278 aa, Homo sapiens
MKEEIRELQSQISDTSVVLSMDNSRSLDMDSIIAEVKAQYEDIANRSRAEAESMYQIKYEELQSLAGKHGDDLRRTKTEISEMNRNISRLQAEIEGLKGQRASLEAAIADAEQRGELAIKDANAKLSELEAALQRAKQDMARQLREYQELMNVKLALDIEIATYRKLLEGEESRLESGMQNMSIHTKTTRGKQVGEAPAKGGPQSRAQSKGGPSLGLGGPSLADNLRRGWKTNTVGTGWTRAAKERGGPDTPGPRRGAGGERPDPPERRTAHKVSRPK

SEQ ID NO: 1031125 - protein, 261 aa, Homo sapiens; identical to SEQ ID NO: 1031114

SEQ ID NO: 1031126 - protein, 253 aa, Homo sapiens
  misc_feature (217)..(217): Xaa can be any naturally occurring amino acid
  misc_feature (234)..(234): Xaa can be any naturally occurring amino acid
  misc_feature (249)..(249): Xaa can be any naturally occurring amino acid
MSIRVTQKSYKVSTSGPRAFSSRSYTSGPGSRISSSSFSRVGSSNFRGGLGGGYGGASGMGGITAVTVNQSLLSPLVLEVDPNIQAVRTQEKEQIKTLNNKFASFIDKVRFLEQQNKMLETKWSLLQQQKTARSNMDNMFESYINNLRRQLETLGQEKLKLEAELGNMQGLVEDFKNKYEDEINKRTEMENEFVLIKKDVDEAYMNKVELESPPWKXVDPTKIKLPQGKLILKXGDSGEACKSQGFSGXKFCW

SEQ ID NO: 1031127 - protein, 249 aa, Homo sapiens
ARGQGRGQRHTNKVGGEETGTLSFSAPSRISAWFGPPASTPASTMSIRVTQKSYKVSTSGPRAFSSRSYTSGPGSRISSSSFSRVGSSNFRGGLGGGYGGASGMGGITAVTVNQSLLSPLVLEVDPNIQAVRTQEKEQIKTLNNKFASFIDKVRFLEQQNKMLETKWSLLQQQKTARSNMDNMFESYINNLRRQLETLGQEKLKLEAELGNMQGLVEDFATQLAVDPKRTRWRRIGPSEGCENLMEQVS

SEQ ID NO: 1031128 - protein, 236 aa, Homo sapiens
MSIRVTQKSYKVSTSGPRAFSSRSYTSGPGSRISSSSFSRVGSSNFRGGLGGGYGGASGGEASSPSKTEQPKPTEPPKPEKKPAGRRRRAQEGGGRQGRKGGRVSRGTPRARGRRSASRGLGERESGRGEEGREEGGGRGVGGGGGGWGAGGGGWAEAEERGEREGGRGEGGRGWGEGGREGRGGDADGGEGGLRGAGARKRRRGGESAARRGARRGGGGAREGKTGGGGGARAGE

SEQ ID NO: 1031129 - protein, 483 aa, Homo sapiens; identical to SEQ ID NO: 1031108

SEQ ID NO: 1031130 - protein, 279 aa, Homo sapiens; identical to SEQ ID NO: 1031116

SEQ ID NO: 1031131 - protein, 279 aa, Homo sapiens; identical to SEQ ID NO: 1031116

SEQ ID NO: 1031132 - protein, 279 aa, Homo sapiens; identical to SEQ ID NO: 1031116

SEQ ID NO: 1031133 - protein, 124 aa, Homo sapiens [sequence omitted]

SEQ ID NO: 1031134 - protein, 120 aa, Homo sapiens
GRRLRSEPRPARPPIARAWPPAQGPMAERVALASLRRACLALPVTAFVPGPGARVRPGSAAAWSDGSSAEGRNQGARGQRSGRAPEPEQVAVRRGRARAAAADRAMEWAGLGLMGRCLAR

SEQ ID NO: 1031135 - protein, 384 aa, Homo sapiens
AAAASALSPAPLGRRLLGPGRQPRGRWPSASHSRPCAVPASRSLLRRSSPGLAPASGPAPRRPGPMAPQRRAATKAPEGNGAAERRNRSSTKKDRAPREVQRLWQRPWLRTAGLGAGFVLTALLLWSSLGADDGVAEVLARRGEVVAGRFIEVPCSEDYDSHRRFEGCTPRKCGRGVTDVVITREEAERIRSVAEKGLSLGGSDGGASILDLHSGALSVGKHFVNLYRYFGDKIQNIFSEEDFRLYREVRQKVQLTIAEAFGISASSLHLTKPTFFSRINSTEARTAHDEYWHAHVDKVTYGSFDYTSLLYLSNYLEDFGGGRFMFMEEGANKTVEPRAGRVSFFTSGSENLHRVEKVHWGTRYAITIAFSCNPDHGIEDPAFP

SEQ ID NO: 1031136 - protein, 494 aa, Homo sapiens
AAAASALSPAPLGRRLLGPGRQPRGRWPSASHSRPCAVPASRSLLRRSSPGLAPASGPAPRRPGPMAPQRRAATKAPEGNGAAERRNRSSTKKDRAPREVQRLWQRPWLRTAGLGAGFVLTALLLWSSLGADDGVAEVLARRGEVVAGRFIEVPCSEDYDSHRRFEGCTPRKCGRGVTDVVITREEAERIRSVAEKGLSLGGSDGGASILDLHSGALSVGKHFVNLYRYFGDKIQNIFSEEDFRLYREVRQKVQLTIAEAFGISASSLHLTKPTFFSRINSTEARTAHDEYWHAHVDKVTYGSFDYTSLLYLSNYLEDFGGGRFMFMEEGANKTVEPRAGCFCFRMMFVGSKKLMDREPVKLLVRRLESGVLRGLTTRPRGERHMRFWKLRALLIVDSLVAVLSPALRKQVASPSSPRGPRTYTAWRRSTGAPVTPSPSPSAATPTMASRTQRSRSQQPGQGNFRRARVEAAAPVVHPPPRPPAPVAQSALGIL

SEQ ID NO: 1031137 - protein, 364 aa, Homo sapiens
QQRNERHQYYRYDPGLISRGSRSLLRRSSPGLAPASGPAPRRPGPMAPQRRAATKAPEGNGAAERRNRSSTKKDRAPREVQRLWQRPWLRTAGLGAGFVLTALLLWSSLGADDGVAEVLARRGEVVAGRFIEVPCSEDYDSHRRFEGCTPRKCGRGVTDVVITREEAERIRSVAEKGLSLGGSDGGASILDLHSGALSVGKHFVNLYRYFGDKIQNIFSEEDFRLYREVRQKVQLTIAEAFGISASSLHLTKPTFFSRINSTEARTAHDEYWHAHVDKVTYGSFDYTSLLYLSNYLEDFGGGRFMFMEEGANKTVEPRAGRVSFFTSGSENLHRVEKVHWGTRYAITIAFSCNPDHGIEDPAFP

SEQ ID NO: 1031138 - protein, 494 aa, Homo sapiens; identical to SEQ ID NO: 1031136

SEQ ID NO: 1031139 - protein, 382 aa, Homo sapiens
  misc_feature (360)..(360): Xaa can be any naturally occurring amino acid
AAAASALSPAPLGRRLLGPGRQPRGRWPSASHSRPCAVPASRSLLRRSSPGLAPASGPAPRRPGPMAPQRRAATKAPEGNGAAERRNRSSTKKDRAPREVQRLWQRPWLRTAGLGAGFVLTALLLWSSLGADDGVAEVLARRGEVVAGRFIEVPCSEDYDSHRRFEGCTPRKCGRGVTDVVITREEAERIRSVAEKGLSLGGSDGGASILDLHSGALSVGKHFVNLYRYFGDKIQNIFSEEDFRLYREVRQKVQLTIAEAFGISASSLHLTKPTFFSRINSTEARTAHDEYWHAHVDKVTYGSFDYTSLLYLSNYLEDFGGGRFMFMEEGANKTVEPRAGEGFGRPASASRSPACLPSPXKSQSQQFCGKMKNSQSTRQAFS

SEQ ID NO: 1031140 - protein, 271 aa, Homo sapiens
CTAQSACTLESCGCVCLKFTFDLGVLASSGPDSLEGHAPVALETASHPGCPFTGCTPRKCGRGVTDVVITREEAERIRSVAEKGLSLGGSDGGASILDLHSGALSVGKHFVNLYRYFGDKIQNIFSEEDFRLYREVRQKVQLTIAEAFGISASSLHLTKPTFFSRINSTEARTAHDEYWHAHVDKVTYGSFDYTSLLYLSNYLEDFGGGRFMFMEEGANKTVEPRAGRVSFFTSGSENLHRVEKVHWGTRYAITIAFSCNPDHGIEDPAFP

SEQ ID NO: 1031141 - protein, 124 aa, Homo sapiens [sequence omitted]

SEQ ID NO: 1031142 - protein, 381 aa, Homo sapiens
AAAASALSPAPLGRRLLGPGRQPRGRWPSASHSRPCAVPASRSLLRRSSPGLAPASGPAPRRPGPMAPQRRAATKAPEGNGAAERRNRSSTKKDRAPREVQRLWQRPWLRTAGLGAGFVLTALLLWSSLGADDGVAEVLARRGEVVAGRFIEVPCSEDYDSHRRFEGCTPRKCGRGVTDVVITREEAERIRSVAEKGLSLGGSDGGASIPRTWLCLPRCFRLFRRSVPGLWSPAVRGPVSAGGLVRMASSRLEGRKQGRPEGNGAVERRNLEQYQEGPSPAGRCTRLVGRGPVGYRTAGLEGWLCGSPHSLLWEQLGGRRTWVARGPGPRRGRRSRAREKHSRVARELEGVPTGHQKGTKALQDPAKMRPNSVNRRVGQPA

SEQ ID NO: 1031143 - protein, 384 aa, Homo sapiens; identical to SEQ ID NO: 1031135

SEQ ID NO: 1031144 - protein, 384 aa, Homo sapiens; identical to SEQ ID NO: 1031135

SEQ ID NO: 1031145 - protein, 384 aa, Homo sapiens; identical to SEQ ID NO: 1031135

SEQ ID NO: 1031146 - protein, 354 aa, Homo sapiens
MAWLACLMPDSRSLLRRSSPGLAPASGPAPRRPGPMAPQRRAATKAPEGNGAAERRNRSSTKKDRAPREVQRLWQRPWLRTAGLGAGFVLTALLLWSSLGADDGVAEVLARRGEVVAGRFIEVPCSEDYDSHRRFEGCTPRKCGRGVTDVVITREEAERIRSVAEKGLSLGGSDGGASILDLHSGALSVGKHFVNLYRYFGDKIQNIFSEEDFRLYREVRQKVQLTIAEAFGISASSLHLTKPTFFSRINSTEARTAHDEYWHAHVDKVTYGSFDYTSLLYLSNYLEDFGGGRFMFMEEGANKTVEPRAGRVSFFTSGSENLHRVEKVHWGTRYAITIAFSCNPDHGIEDPAFP

SEQ ID NO: 1031147 - protein, 494 aa, Homo sapiens; identical to SEQ ID NO: 1031136

SEQ ID NO: 1031148 - protein, 348 aa, Homo sapiens
AAAASALSPAPLGRRLLGPGRQPRGRWPSASHSRPCAVPASRSLLRRSSPGLAPASGPAPRRPGPMAPQRRAATKAPEGNGAAERRNRSSTKKDRAPREVQRLWQRPWLRTAGLGAGFVLTALLLWSSLGADDGVAEVLARRGEVVAGRFIEVPCSEDYDSHRRFEGCTPRKCGRGVTDVVITREEAERIRSVAEKGLSLGGSDGGASILDLHSGALSVGKHFVNLYRYFGDKIQNIFSEEDFRLYREVRQKVQLTIAEAFGISASSLHLTKPTFFSRINSTEARTAHDEYWHAHVDKVTMASRTQRSRSQQPGQGNFRRARVEAAAPVVHPPPRPPAPVAQSALGIL

SEQ ID NO: 1031149 - protein, 350 aa, Homo sapiens
AAAASALSPAPLGRRLLGPGRQPRGRWPSASHSRPCAVPASRSLLRRSSPGLAPASGPAPRRPGPMAPQRRAATKAPEGNGAAERRNRSSTKKDRAPREVQRLWQRPWLRTAGLGAGFVLTALLLWSSLGADDGVAEVLARRGEVVAGRFIEVPCSEDYDSHRRFEGCTPRKCGRGVTDVVITREEAERIRSVAEKGLSLGGSDGGASILDLHSGALSVGKHFVNLYRYFGDKIQNIFSEEDFRLYRTEARTAHDEYWHAHVDKVTYGSFDYTSLLYLSNYLEDFGGGRFMFMEEGANKTVEPRAGRVSFFTSGSENLHRVEKVHWGTRYAITIAFSCNPDHGIEDPAFP

SEQ ID NO: 1031150 - protein, 55 aa, Homo sapiens
MATSLSSPLPGRVSFFTSGSENLHRVEKVHWGTRYAITIAFSCNPDHGIEDPAFP

SEQ ID NO: 1031151 - protein, 308 aa, Homo sapiens
SGCAVRPAGVAGCLRTARGAPWRVSEVVSLLLVRNIAITGNLEVETPFCHPSVPRAAANPPAGLQDPGLTERPHRSRRPRARYAPGIMGEKSRRKGPAPRHADGKLGRTCDHPYAPWSFTPSSRAPTAWVRPPCPVWASRLQEHSPEPRRARAPPTRRAQAALYAPALRLRDHLDRFSILMTSCTSWLQAPQAPGLCRDEQSSRISVPQLSGAPILLPDLEGTKLSNFQESSPLPHKHERKDKRSTPEEEGRSAPEKIIQSLKLCPGGHRPASLSSGCPAGCRLSFNLPPSMLLSVQKCCMPSSLKTC

SEQ ID NO: 1031152 - protein, 308 aa, Homo sapiens; identical to SEQ ID NO: 1031151

SEQ ID NO: 1031153 - protein, 239 aa, Homo sapiens
SGCAVRPAGVAGCLRTARGAPWRVSEVVSLLLVRNIAITGNLEVETPFCHPSVPRAAANPPAGLQDPGLTERPHRSRRPRARYAPGIMGEKSRRKGPAPRHADGKLGRTCDHPYAPWSFTPSSRAPTAWVRPPCPVWASRLQEHSPEPRRARAPPTRRAQAALYAPALRLRDHLDRFSILMTSCTSWLQAPQAPGLCRDEQSSRISVPQLSGAPILLPDLEGTKLSNFQEKGSHSIVPG

SEQ ID NO: 1031154 - protein, 308 aa, Homo sapiens; identical to SEQ ID NO: 1031151

SEQ ID NO: 1031155 - protein, 442 aa, Homo sapiens
GDRWLRDPQSLGPAGFVFLWPQPELWLSFAPVADVIAEDLVLSMEQINWLSLVYLVVSTPFGVAAIWILDSVGLRAALGVYTIPAGVVCLLSTICLWESVPPTPPSAGAASSTSEKFLDGLKPLLMWNKAYVILAVCLGGMIGISASFSALLEQILCASGHSSGFSGLCGALFITFGILGALALGPYVDRTKHFTEATKIGLCLFSLACVPFALVSQLQGQTLALAATCSLLGLFGFSVGPVAMELAVECSFPVGEGAATGMIFVLGQAEGILIMLAMTALTVRRSEPSLSTCQQGEDPLDWTVSLLLMAGLCTFFSCILAVFFHTPYRRLQAESGEPPSTRNAVGGADSGPGVDRGGAGRAGVLGPSTATPECTARGASLEDPRGPGSPHPACHRATPRAQGPAATDAPSRPGRLAGRVQASRFIDPAGSHSSFSSPWVIT

SEQ ID NO: 1031156 - protein, 560 aa, Homo sapiens
MAGPTEAETGLAEPRALCAQRGHRTYARRWVFLLAISLLNCSNATLWLSFAPVADVIAEDLVLSMEQINWLSLVYLVVSTPFGVAAIWILDSVGLRAATILGAWLNFAGSVLRMVPCMVVGTQNPFAFLMGGQSLCALAQSLVIFSPAKLAALWFPEHQRATCNMLATMSNPLGVLVANVLSPVLVKKGEDIPLMLGVYTIPAGVVCLLSTICLWESVPPTPPSAGAASSTSEKFLDGLKPLLMWNKAYVILAVCLGGMIGISASFSALLEQILCASGHSSGFSGLCGALFITFGILGALALGPYVDRTKHFTEATKIGLCLFSLACVPFALVSQLQGQTLALAATCSLLGLFGFSVGPVAMELAVECSFPVGEGAATGMIFVLGQAEGILIMLAMTALTVRRSEPSLSTCQQGEDPLDWTVSLLLMAGLCTFFSCILAVFFHTPYRRLQAESGEPPSTRNAVGGADSGPGVDRGGAGRAGVLGPSTATPECTARGASLEDPRGPGSPHPACHRATPRAQGPAATDAPSRPGRLAGRVQASRFIDPAGSHSSFSSPWVIT

SEQ ID NO: 1031157 - protein, 441 aa, Homo sapiens
MAGPTEAETGLAEPRALCAQRGHRTYARRWVFLLAISLLNCSNATINWLSLVYLVVSTPFGVAAIWILDSVGLRAALGVYTIPAGVVCLLSTICLWESVPPTPPSAGAASSTSEKFLDGLKPLLMWNKAYVILAVCLGGMIGISASFSALLEQILCASGHSSGFSGLCGALFITFGILGALALGPYVDRTKHFTEATKIGLCLFSLACVPFALVSQLQGQTLALAATCSLLGLFGFSVGPVAMELAVECSFPVGEGAATGMIFVLGQAEGILIMLAMTALTVRRSEPSLSTCQQGEDPLDWTVSLLLMAGLCTFFSCILAVFFHTPYRRLQAESGEPPSTRNAVGGADSGPGVDRGGAGRAGVLGPSTATPECTARGASLEDPRGPGSPHPACHRATPRAQGPAATDAPSRPGRLAGRVQASRFIDPAGSHSSFSSPWVIT

SEQ ID NO: 1031158 - protein, 463 aa, Homo sapiens
MAGPTEAETGLAEPRALCAQRGHRTYARRWVFLLAISLLNCSNATLWLSFAPVADVIAEDLVLSMEQINWLSLVYLVVSTPFGVAAIWILDSVGLRAALGVYTIPAGVVCLLSTICLWESVPPTPPSAGAASSTSEKFLDGLKPLLMWNKAYVILAVCLGGMIGISASFSALLEQILCASGHSSGFSGLCGALFITFGILGALALGPYVDRTKHFTEATKIGLCLFSLACVPFALVSQLQGQTLALAATCSLLGLFGFSVGPVAMELAVECSFPVGEGAATGMIFVLGQAEGILIMLAMTALTVRRSEPSLSTCQQGEDPLDWTVSLLLMAGLCTFFSCILAVFFHTPYRRLQAESGEPPSTRNAVGGADSGPGVDRGGAGRAGVLGPSTATPECTARGASLEDPRGPGSPHPACHRATPRAQGPAATDAPSRPGRLAGRVQASRFIDPAGSHSSFSSPWVIT

SEQ ID NO: 1031159 - protein, 560 aa, Homo sapiens; identical to SEQ ID NO: 1031156

SEQ ID NO: 1031160 - protein, 560 aa, Homo sapiens; identical to SEQ ID NO: 1031156

SEQ ID NO: 1031161 - protein, 560 aa, Homo sapiens; identical to SEQ ID NO: 1031156

SEQ ID NO: 1031162 - protein, 495 aa, Homo sapiens
  misc_feature (1)..(1): Xaa can be any naturally occurring amino acid
XTQKNKMKKRGRNRTGKPGNGGTGGDPWRPPTMAGPTEAETGLAEPRALCAQRGHRTYARRWVFLLAISLLNCSNATLWLSFAPVADVIAEDLVLSMEQINWLSLVYLVVSTPFGVAAIWILDSVGLRAALGVYTIPAGVVCLLSTICLWESVPPTPPSAGAASSTSEKFLDGLKPLLMWNKAYVILAVCLGGMIGISASFSALLEQILCASGHSSGFSGLCGALFITFGILGALALGPYVDRTKHFTEATKIGLCLFSLACVPFALVSQLQGQTLALAATCSLLGLFGFSVGPVAMELAVECSFPVGEGAATGMIFVLGQAEGILIMLAMTALTVRRSEPSLSTCQQGEDPLDWTVSLLLMAGLCTFFSCILAVFFHTPYRRLQAESGEPPSTRNAVGGADSGPGVDRGGAGRAGVLGPSTATPECTARGASLEDPRGPGSPHPACHRATPRAQGPAATDAPSRPGRLAGRVQASRFIDPAGSHSSFSSPWVIT

SEQ ID NO: 1031163 - protein, 173 aa, Homo sapiens
MRLSGPGGHPLPSSWSSCWPCLLLPALMRLPRAPGLAHLKLLLGPPGQFRLRLPLPTRTGLGLPQGTGQLQSELWQPGSDSHPCPASPRKAPSLPRYLWPGLPPIHLSPNPGEALFSQGFCVQQGHLYTLLAGGLGTLELQEPEEGALFLDLHNAAVGDCSWSPGFCQAHSVC

SEQ ID NO: 1031164 - protein, 454 aa, Homo sapiens [sequence omitted]

SEQ ID NO: 1031165 - protein, 399 aa, Homo sapiens
MAGNAEPPPAGAACPQDRRSCSGRAGGDRVWEDGEHPAKKLKSGGDEERREKPPKRKIVLLMAYSGKGYHGMQRNVGSSQFKTIEDDLVSALVRSGCIPENHGEDMRKMSFQRCARTDKGVSAAGQVVSLKVWLIDDILEKINSHLPSHIRILGLKRVTGGFNSKNRCDARTYCYLLPTFAFAHKDRDVQDETYRLSAETLQQVNRLLACYKGTHNFHNFTSQKGPQDPSACRYILEMYCEEPFVREGLEFAVIRVKGQSFMMHQIRKMVGLVVAIVKGYAPESVLERSWGTEKVDVPKAPGLGLVLERVHFEKYNQRFGNDGLHEPLDWAQEEGKVAAFKEEHIYPTIIGTERDERSMAQWLSTLPIHNFSATALTAGGTGAKVPSPLEGSEGDGDTD

SEQ ID NO: 1031166 - protein, 318 aa, Homo sapiens
MAGNAEPPPAGAACPQDRRSCSGRAGGDRVWEDGEHPAKKLKSGGDEERREKPPKRKIVLLMAYSGKGYHGMQRNVGSSQFKTIEDDLVSALVRSGCIPENHGEDMRKMSFQRCARTDKGVSAAGQVVSLKVWLIDDILEKINSHLPSHIRILGLKRVTGGFNSKNRCDARTYCYLLPTFAFAHKDRDVQDETYRLSAETLQQVNRLLACYKGTHNFHNFTSQKGPQDPSACRYILEMYCEEPFVREALKSRGPRGRATQYCAIDRKMWPGVATGQVIPPNCDRVAHKRRAKTTDYVKPPKHTETGRNGRSTAAITTV

SEQ ID NO: 1031167 - protein, 133 aa, Homo sapiens
MAGNAEPPPAGAACPQDRRSCSGRAGGDRVWEDGEHPAKKLKSGGDEERREKPPKRKIVLLMAYSGKGYHGMQRNVGSSQFKTIEDDLVSALVRSGCIPENHGEDMRKMSFQRCARTDKVRISFCCPGWSAVA

SEQ ID NO: 1031168 - protein, 436 aa, Homo sapiens
MAGNAEPPPAGAACPQDRRSCSGRAGGDRVWEDGEHPAKKLKSGGDEERREKPPKRKIVLLMAYSGKGYHGMQRNVGSSQFKTIEDDLVSALVRSGCIPENHGEDMRKMSFQRCARTDKVKDLILLPRLECSGMIMAHCSLKLLGSSNPPASASRVGVSAAGQVVSLKVWLIDDILEKINSHLPSHIRILGLKRVTGGFNSKNRCDARTYCYLLPTFAFAHKDRDVQDETYRLSAETLQQVNRLLACYKGTHNFHNFTSQKGPQDPSACRYILEMYCEEPFVREGLEFAVIRVKGQSFMMHQIRKMVGLVVAIVKGYAPESVLERSWGTEKVDVPKAPGLGLVLERVHFEKYNQRFGNDGLHEPLDWAQEEGKVAAFKEEHIYPTIIGTERDERSMAQWLSTLPIHNFSATALTAGGTGAKVPSPLEGSEGDGDTD

SEQ ID NO: 1031169 - protein, 162 aa, Homo sapiens
MYCEEPFVREGLEFAVIRVKGQSFMMHQIRKMVGLVVAIVKGYAPESVLERSWGTEKVDVPKAPGLGLVLERVHFEKYNQRFGNDGLHEPLDWAQEEGKVAAFKEEHIYPTIIGTERDERSMAQWLSTLPIHNFSATALTAGGTGAKVPSPLEGSEGDGDTD

SEQ ID NO: 1031170 - protein, 327 aa, Homo sapiens
MPGPPDAFLTAEFMCEIRKVRVVLLSQRPACEAQGTHLPSPVLLCLQGVSAAGQVVSLKVWLIDDILEKINSHLPSHIRILGLKRVTGGFNSKNRCDARTYCYLLPTFAFAHKDRDVQDETYRLSAETLQQVNRLLACYKGTHNFHNFTSQKGPQDPSACRYILEMYCEEPFVREGLEFAVIRVKGQSFMMHQIRKMVGLVVAIVKGYAPESVLERSWGTEKVDVPKAPGLGLVLERVHFEKYNQRFGNDGLHEPLDWAQEEGKVAAFKEEHIYPTIIGTERDERSMAQWLSTLPIHNFSATALTAGGTGAKVPSPLEGSEGDGDTD

SEQ ID NO: 1031171 - protein, 399 aa, Homo sapiens; identical to SEQ ID NO: 1031165

SEQ ID NO: 1031172 - protein, 187 aa, Homo sapiens
MGLQLRALLGAFGRWTLRLGPRPSCSPRMAGNAEPPPAGAACPQDRRSCSGRAGGDRVWEDGEHPAKKLKSGGDEERREKPPKRKIVLLMAYSGKGYHGMQRNVGSSQFKTIEDDLVSALVRSGCIPENHGEDMRKMSFQRCARTDKVGGGLLCPSPAAMSSTWPTFQLSVLACYAVSEHIMMYKSN

SEQ ID NO: 1031173 - protein, 159 aa, Homo sapiens
MAGNAEPPPAGAACPQDRRSCSGRAGGDRVWEDGEHPAKKLKSGGDEERREKPPKRKIVLLMAYSGKGYHGMQRNVGSSQFKTIEDDLVSALVRSGCIPENHGEDMRKMSFQRCARTDKVGGGLLCPSPAAMSSTWPTFQLSVLACYAVSEHIMMYKSN

SEQ ID NO: 1031174 - protein, 399 aa, Homo sapiens; identical to SEQ ID NO: 1031165

SEQ ID NO: 1031175 - protein, 368 aa, Homo sapiens
VIFPVMYKESNRAISIIYPSLQACIISLCWRHSVSSHYWKITINGCKFSHLIEHCTCPSCPSSSCACSPACGCPLPREADACWSLVGALGKETLGLTPCSGCSLVIQALLYLPFSSLTTSPLGLKRVTGGFNSKNRCDARTYCYLLPTFAFAHKDRDVQDETYRLSAETLQQVNRLLACYKGTHNFHNFTSQKGPQDPSACRYILEMYCEEPFVREGLEFAVIRVKGQSFMMHQIRKMVGLVVAIVKGYAPESVLERSWGTEKVDVPKAPGLGLVLERVHFEKYNQRFGNDGLHEPLDWAQEEGKVAAFKEEHIYPTIIGTERDERSMAQWLSTLPIHNFSATALTAGGTGAKVPSPLEGSEGDGDTD

SEQ ID NO: 1031176 - protein, 399 aa, Homo sapiens; identical to SEQ ID NO: 1031165

SEQ ID NO: 1031177 - protein, 189 aa, Homo sapiens
MGLQLRALLGAFGRWTLRLGPRPSCSPRMAGNAEPPPAGAACPQDRRSCSGRAGGDRVWEDGEHPAKKLKSGGDEERREKPPKRKIVLLMAYSGKGYHGMQRNVGSSQFKTIEDDLVSALVRSGCIPENHGEDMRKMSFQRCARTDKGVSAAGQVVSLKVWLIDDILEKINSHLPSHIRILGAQSPGRQ

SEQ ID NO: 1031178 - protein, 399 aa, Homo sapiens; identical to SEQ ID NO: 1031165

SEQ ID NO: 1031179 - protein, 687 aa, Homo sapiens
MAADKPADQGAEKHEGTGQSSGITDQEKELSTNAFQAFTSGNYDACLQHLACLQDINKDDYKIILNTAVAEFFKSNQTTTDNLRQTLNQLKNQVHSAVEEMDGLDDVENSMLYYNQAVILYHLRQYTEAISVGEKLYQFIEPFEEKFAQAVCFLLVDLYILTYQAEKALHLLAVLEKMISQGNNNKNGKNETGNNNNKDGSNHKAESGALIEAAKSKIHQYKVRAYIQMKSLKACKREIKSVMNTAGNSAPSLFLKSNFEYLRGNYRKAVKLLNSSNIAEHPGFMKTGECLRCMFWNNLGCIHFAMSKHNLGIFYFKKALQENDNVCAQLSAGSTDPGKKFSGRPMCTLLTNKRYELLYNCGIQLLHIGRPLAAFECLIEAVQVYHANPRLWLRLAECCIAANKGTSEQETKGLPSKKGIVQSIVGQGYHRKIVLASQSIQNTVYNDGQSSAIPVASMEFAAICLRNALLLLPEEQQDPKQENGAKNSNQLGGNTESSESSETCSSKSHDGDKFIPAPPSSPLRKQELENLKCSILACSAYVALALGDNLMALNHADKLLQQPKLSGSLKFLGHLYAAEALISLDRISDAITHLNPENVTDVSLGISSNEQDQGSDKGENEAMESSGKRAPQCYPSSVNSARTVMLFNLGSAYCLRSEYDKARKCLHQAASMIHPKEVPPEAILLAV

SEQ ID NO: 1031180 - protein, 526 aa, Homo sapiens
MAADKPADQGAEKHEGTGQSSGITDQEKELSTNAFQAFTSGNYDACLQHLACLQDINKDDYKIILNTAVAEFFKSNQTTTDNLRQTLNQLKNQVHSAVEEMDGLDDVENSMLYYNQAVILYHLRQYTEAISVGEKLYQFIEPFEEKFAQAVCFLLVDLYILTYQAEKALHLLAVLEKMISQGNNNKNGKNETGNNNNKDGSNHKAESGALIEAAKSKIHQYKVRAYIQMKSLKACKREIKSVMNTAGNSAPSLFLKSNFEYLRGNYRKAVKLLNSSNIAEHPGFMKTGECLRCMFWNNLGCIHFAMSKHNLGIFYFKKALQENDNVCAQLSAGSTDPGKKFSGRPMCTLLTNKRYELLYNCGIQLLHIGRPLAAFECLIEAVQVYHANPRLWLRLAECCIAANKGTSEQETKGLPSKKGIVQSIVGQGYHRKIVLASQSIQNTVYNDGQSSAIPVASMEFAAICLRNALLLLPEEQQDPKQENGAKNSNQLGGNTESSESSETCSSKAMDGINSSRSHLLLLGNRI

SEQ ID NO: 1031181 - protein, 602 aa, Homo sapiens
MAADKPAQVHSAVEEMDGLDDVENSMLYYNQAVILYHLRQYTEAISVGEKLYQFIEPFEEKFAQAVCFLLVDLYILTYQAEKALHLLAVLEKMISQGNNNKNGKNETGNNNNKDGSNHKAESGALIEAAKSKIHQYKVRAYIQMKSLKACKREIKSVMNTAGNSAPSLFLKSNFEYLRGNYRKAVKLLNSSNIAEHPGFMKTGECLRCMFWNNLGCIHFAMSKHNLGIFYFKKALQENDNVCAQLSAGSTDPGKKFSGRPMCTLLTNKRYELLYNCGIQLLHIGRPLAAFECLIEAVQVYHANPRLWLRLAECCIAANKGTSEQETKGLPSKKGIVQSIVGQGYHRKIVLASQSIQNTVYNDGQSSAIPVASMEFAAICLRNALLLLPEEQQDPKQENGAKNSNQLGGNTESSESSETCSSKSHDGDKFIPAPPSSPLRKQELENLKCSILACSAYVALALGDNLMALNHADKLLQQPKLSGSLKFLGHLYAAEALISLDRISDAITHLNPENVTDVSLGISSNEQDQGSDKGENEAMESSGKRAPQCYPSSVNSARTVMLFNLGSAYCLRSEYDKARKCLHQAASMIHPKEVPPEAILLAV

SEQ ID NO: 1031182 - protein, 226 aa, Homo sapiens
MKAQSGNYDACLQHLACLQDINKDDYKIILNTAVAEFFKSNQTTTDNLRQTLNQLKNQVHSAVEEMDGLDDVENSMLYYNQAVILYHLRQYTEAISVGEKLYQFIEPFEEKFAQAVCREEIIALNAHRRKQERSKIDTLTSQLKELEKQEQTHSKASRRQEITKIRAELKEIETQKTLQKISESRSWFLERINKTDRPLARLIKKKREKNQIDTIKNDKGDITTDP

SEQ ID NO: 1031183 - protein, 179 aa, Homo sapiens
EVKRCQEAQNGPESDVWTHQSKIRCSILACSAYVALALGDNLMALNHADKLLQQPKLSGSLKFLGHLYAAEALISLDRISDAITHLNPENVTDVSLGISSNEQDQGSDKGENEAMESSGKRAPQCYPSSVNSARTVMLFNLGSAYCLRSEYDKARKCLHQAASMIHPKEVPPEAILLAV

SEQ ID NO: 1031184 - protein, 614 aa, Homo sapiens
MAADKPADQGAEKHEGTGQSSGITDQEKELSTNAFQAFTSGNYDACLQHLACLQDINKDDYKIILNTAVAEFFKSNQTTTDNLRQTLNQLKNQVHSAVEEMDGLDDVENSMLYYNQAVILYHLRQYTEAISVGEKLYQFIEPFEEKFAQAVCFLLVDLYILTYQAEKALHLLAVLEKMISQGNNNKNGKNETGNNNNKDGSNHKAESGALIEAAKSKIHQYKVRAYIQMKSLKACKREIKSVMNTAGNSAPSLFLKSNFEYLRGNYRKAVKLLNSSNIAEHPGFMKTGECLRCMFWNNLGCIHFAMSKHNLGIFYFKKALQENDNVCAQLSAGSTDPGKKFSGRPMCTLLTNKRYELLYNCGIQLLHIGRPLAAFECLIEAVQVYHANPRLWLRLAECCIAANKGTSEQETKGLPSKKGIVQSIVGQGYHRKIVLASQSIQNTVYNDGQSSAIPVASMEFAAICLRNALLLLPEEQQDPKQENGAKNSNQLGGNTESSESSETCSSKSHDGDKFIPAPPSSPLRKQELENLKCSILACSAYVALALGDNLMALNHADKLLQQPKLSGSLKFLGHLYAAEALISLDRISDAITHLNPENVTDVSLGISSNEQDQG

SEQ ID NO: 1031185 - protein, 627 aa, Homo sapiens
MAADKPADQGAEKHEGTGQSSGITDQEKELSTNAFQAFTSGNYDACLQHLACLQDINKDDYKIILNTAVAEFFKSNQTTTDNLRQTLNQLKNQVHSAVEEMDGLDDVENSMLYYNQAVILYHLRQYTEAISVGEKLYQFIEPFEEKFAQAVCFLLVDLYILTYQAEKALHLLAVLEKMISQGNNNKNGKNETGNNNNKDGSNHKAESGALIEAAKSKIHQYKVRAYIQMKSLKACKREIKSVMNTAGNSAPSLFLKSNFEYLRGNYRKAVKLLNSSNIAEHPGFMKTGECLRCMFWNNLGCIHFAMSKHNLGIFYFKKALQENDNVCAQLSAGSTDPGKKFSGRPMCTLLTNKRYELLYNCGIQLLHIGRPLAAFECLIEAVQVYHANPRLWLRLAECCIAANKGTSEQETKGLPSKKGIVQSIVGQGYHRKIVLASQSIQNTVYNDGQSSAIPVASMEFAAICLRNALLLLPEEQQDPKQENGAKNSNQLGGNTESSESSETCSSKSHDGDKFIPAPPSSPLRKQELENLKCSILACSAYVALALGDNLMALNHADKLLQQPKLSGSLKFLGHLYAAEALISLDRISDAITHLNPENVTDVSLGISSNEQDQGSDKGENEAMESCK

SEQ ID NO: 1031186 - protein, 652 aa, Homo sapiens
MKAQSGNYDACLQHLACLQDINKDDYKIILNTAVAEFFKSNQTTTDNLRQTLNQLKNQVHSAVEEMDGLDDVENSMLYYNQAVILYHLRQYTEAISVGEKLYQFIEPFEEKFAQAVCFLLVDLYILTYQAEKALHLLAVLEKMISQGNNNKNGKNETGNNNNKDGSNHKAESGALIEAAKSKIHQYKVRAYIQMKSLKACKREIKSVMNTAGNSAPSLFLKSNFEYLRGNYRKAVKLLNSSNIAEHPGFMKTGECLRCMFWNNLGCIHFAMSKHNLGIFYFKKALQENDNVCAQLSAGSTDPGKKFSGRPMCTLLTNKRYELLYNCGIQLLHIGRPLAAFECLIEAVQVYHANPRLWLRLAECCIAANKGTSEQETKGLPSKKGIVQSIVGQGYHRKIVLASQSIQNTVYNDGQSSAIPVASMEFAAICLRNALLLLPEEQQDPKQENGAKNSNQLGGNTESSESSETCSSKSHDGDKFIPAPPSSPLRKQELENLKCSILACSAYVALALGDNLMALNHADKLLQQPKLSGSLKFLGHLYAAEALISLDRISDAITHLNPENVTDVSLGISSNEQDQGSDKGENEAMESSGKRAPQCYPSSVNSARTVMLFNLGSAYCLRSEYDKARKCLHQAASMIHPKEVPPEAILLAV

SEQ ID NO: 1031187 - protein, 400 aa, Homo sapiens
RLGSEAGCRNNLGCIHFAMSKHNLGIFYFKKALQENDNVCAQLSAGSTDPGKKFSGRPMCTLLTNKRYELLYNCGIQLLHIGRPLAAFECLIEAVQVYHANPRLWLRLAECCIAANKGTSEQETKGLPSKKGIVQSIVGQGYHRKIVLASQSIQNTVYNDGQSSAIPVASMEFAAICLRNALLLLPEEQQDPKQENGAKNSNQLGGNTESSESSETCSSKSHDGDKFIPAPPSSPLRKQELENLKCSILACSAYVALALGDNLMALNHADKLLQQPKLSGSLKFLGHLYAAEALISLDRISDAITHLNPENVTDVSLGISSNEQDQGSDKGENEAMESSGKRAPQCYPSSVNSARTVMLFNLGSAYCLRSEYDKARKCLHQAASMIHPKEVPPEAILLAV

SEQ ID NO: 1031188 - protein, 126 aa, Homo sapiens
GLASHLVAAWPPTWLRPGLPLGCGLASHLVAAWPPTWLRPPTWLCSILACSAYVALALGDNLMALNHADKLLQQPKLSGSLKFLGHLYAAEALISLDRISDAITHLNPENVTDVSLGISSNEQDQG

SEQ ID NO: 1031189 - protein, 660 aa, Homo sapiens
MAADKPADQGAEKHEGTGQSSGITDQEKELSTNAFQAFTSGNYDACLQHLACLQDINKDDYKIILNTAVAEFFKSNQTTTDNLRQTLNQLKNQVHSAVEEMDGLDDVENSMLYYNQAVILYHLRQYTEAISVGEKLYQFIEPFEEKFAQAVCFLLVDLYILTYQAEKALHLLAVLEKMISQGNNNKNGKNETGNNNNKDGSNHKAESGALIEAAKSKIHQYKVRAYIQMKSLKACKREIKSVMNTAGNSAPSLFLKSNFEYLRGNYRKAVKLLNSSNIAEHPGFMKTGECLRCMFWNNLGCIHFAMSKHNLGIFYFKKALQENDNVCAQLSAGSTDPGKKFSGRPMCTLLTNKRYELLYNCGIQLLHIGRPLAAFECLIEAVQVYHANPRLWLRLAECCIAANKGTSEQETKGLPSKKGIVQSIVGQGYHRKIVLASQSIQNTVYNDGQSSAIPVASMEFAAICLRNALLLLPEEQQDPKQENGAKNSNQLGGNTESSESSETCRCSILACSAYVALALGDNLMALNHADKLLQQPKLSGSLKFLGHLYAAEALISLDRISDAITHLNPENVTDVSLGISSNEQDQGSDKGENEAMESSGKRAPQCYPSSVNSARTVMLFNLGSAYCLRSEYDKARKCLHQAASMIHPKEVPPEAILLAV

SEQ ID NO: 1031190 - protein, 711 aa, Homo sapiens
MGERSYTLSIGNGDYFGQIKKMLWDYVQTLSDQGAEKHEGTGQSSGITDQEKELSTNAFQAFTSGNYDACLQHLACLQDINKDDYKIILNTAVAEFFKSNQTTTDNLRQTLNQLKNQVHSAVEEMDGLDDVENSMLYYNQAVILYHLRQYTEAISVGEKLYQFIEPFEEKFAQAVCFLLVDLYILTYQAEKALHLLAVLEKMISQGNNNKNGKNETGNNNNKDGSNHKAESGALIEAAKSKIHQYKVRAYIQMKSLKACKREIKSVMNTAGNSAPSLFLKSNFEYLRGNYRKAVKLLNSSNIAEHPGFMKTGECLRCMFWNNLGCIHFAMSKHNLGIFYFKKALQENDNVCAQLSAGSTDPGKKFSGRPMCTLLTNKRYELLYNCGIQLLHIGRPLAAFECLIEAVQVYHANPRLWLRLAECCIAANKGTSEQETKGLPSKKGIVQSIVGQGYHRKIVLASQSIQNTVYNDGQSSAIPVASMEFAAICLRNALLLLPEEQQDPKQENGAKNSNQLGGNTESSESSETCSSKSHDGDKFIPAPPSSPLRKQELENLKCSILACSAYVALALGDNLMALNHADKLLQQPKLSGSLKFLGHLYAAEALISLDRISDAITHLNPENVTDVSLGISSNEQDQGSDKGENEAMESSGKRAPQCYPSSVNSARTVMLFNLGSAYCLRSEYDKARKCLHQAASMIHPKEVPPEAILLAV

SEQ ID NO: 1031191 - protein, 459 aa, Homo sapiens
MKSLKACKREIKSVMNTAGNSAPSLFLKSNFEYLRGNYRKAVKLLNSSNIAEHPGFMKTGECLRCMFWNNLGCIHFAMSKHNLGIFYFKKALQENDNVCAQLSAGSTDPGKKFSGRPMCTLLTNKRYELLYNCGIQLLHIGRPLAAFECLIEAVQVYHANPRLWLRLAECCIAANKGTSEQETKGLPSKKGIVQSIVGQGYHRKIVLASQSIQNTVYNDGQSSAIPVASMEFAAICLRNALLLLPEEQQDPKQENGAKNSNQLGGNTESSESSETCSSKSHDGDKFIPAPPSSPLRKQELENLKCSILACSAYVALALGDNLMALNHADKLLQQPKLSGSLKFLGHLYAAEALISLDRISDAITHLNPENVTDVSLGISSNEQDQGSDKGENEAMESSGKRAPQCYPSSVNSARTVMLFNLGSAYCLRSEYDKARKCLHQAASMIHPKEVPPEAILLAV

SEQ ID NO: 1031192 - protein, 115 aa, Homo sapiens
PNIFSNVQFILKASEIIGKRELRSESIFRPVEDKKRYENTDSDMGGYEINHLLWHCVAAWSCVQNNSPQLNNVLEHLVFHKTQLQKKCWLGFSTGFTGPWGRLAKIKTWACLESF

SEQ ID NO: 1031193 - protein, 254 aa, Homo sapiens [sequence omitted]

SEQ ID NO: 1031194 - protein, 384 aa, Homo sapiens [sequence omitted]

SEQ ID NO: 1031195 - protein, 384 aa, Homo sapiens
MNSTLFSQVENHSVHSNFSEKNAQLLAFENDDCHLPLAMIFTLALAYGAVIILGVSGNLALIIIILKQKEMRNVTNILIVNLSFSDLLVAIMCLPFTFVYTLMDHWVFGEAMCKLNPFVQCVSITVSIFSLVLIAVERHQLIINPRGWRPNNRHAYVGIAVIWVLAVASSLPFLIYQVMTDEPFQNVTLDAYKDKYVCFDQFPSDSHRLSYTTLLLVLQYFGPLCFIFICYFKIYIRLKRRNNMMDKMRDNKYRSSETKRINIMLLSIVVAFAVCWLPLTIFNTVFDWNHQIIATCNHNLLFLLCHLTAMISTCVNPIFYGFLNKNFQRDLQFFFNFCDFRSRDDDYETIAMSTMHTDVSKTSLKQASPVAFKKINNNDDNEKI

SEQ ID NO: 1031196 - protein, 384 aa, Homo sapiens; identical to SEQ ID NO: 1031195

SEQ ID NO: 1031197 - protein, 254 aa, Homo sapiens [sequence omitted]

SEQ ID NO: 1031198 - protein, 1320 aa, Homo sapiens
MSGGASATGPRRGPPGLEDTTSKKKQKDRANQESKDGDPRKETGSRYVAQAGLEPLASGDPSASASHAAGITGSRHRTRLFFPSSSGSASTPQEEQTKEGACEDPHDLLATPTPELLLDWRQSAEEVIVKLRVGVGPLQLEDVDAAFTDTDCVVRFAGGQQWGGVFYAEIKSSCAKVQTRKGSLLHLTLPKKVPMLTWPSLLVEADEQLCIPPLNSQTCLLGSEENLAPLAGEKAVPPGNDPVSPAMVRSRNPGKDDCAKEEMAVAADAATLVDEPESMVNLAFVKNDSYEKGPDSVVVHVYVKEICRDTSRVLFREQDFTLIFQTRDGNFLRLHPGCGPHTTFRWQVKLRNLIEPEQCTFCFTASRIDICLRKRQSQRWGGLEAPAARGAVGGAKVAVPTGPTPLDSTPPGGAPHPLTGQEEARAVEKDKSKARSEDTGLDSVATRTPMEHVTPKPETHLASPKPTCMVPPMPHSPVSGDSVEEEEEEEKKVCLPGFTGLVNLGNTCFMNSVIQSLSNTRELRDFFHDRSFEAEINYNNPLGTGGRLAIGFAVLLRALWKGTHHAFQPSKLKAIVASKASQFTGYAQHDAQEFMAFLLDGLHEDLNRIQNKPYTETVDSDGRPDEVVAEEAWQRHKMRNDSFIVDLFQGQYKSKLVCPVCAKVSITFDPFLYLPVPLPQKQKVLPVFYFAREPHSKPIKFLVSVSKENSTASEVLDSLSQSVHVKPENLRLAEVIKNRFHRVFLPSHSLDTVSPSDTLLCFELLSSELAKERVVVLEVQQRPQVPSVPISKCAACQRKQQSEDEKLKRCTRCYRVGYCNQLCQKTHWPDHKGLCRPENIGYPFLVSVPASRLTYARLAQLLEGYARYSVSVFQPPFQPGRMALESQSPGCTTLLSTGSLEAGDSERDPIQPPELQLVTPMAEGDTGLPRVWAAPDRGPVPSTSGISSEMLASGPIEVGSLPAGERVSRPEAAVPGYQHPSEAMNAHTPQFFIYKIDSSNREQRLEDKGDTPLELGDDCSLALVWRNNERLQEFVLVASKELECAEDPGSAGEAARAGHFTLDQCLNLFTRPEVLAPEEAWYCPQCKQHREASKQLLLWRLPNVLIVQLKRFSFRSFIWRDKINDLVEFPVRNLDLSKFCIGQKEEQLPSYDLYAVINHYGGMIGGHYTACARLPNDRSSQRSDVGWRLFDDSTVTTVDESQVVTRYAYVLFYRRRNSPVERPPRAGHSEHHPDLGPAAEAAASQASRIWQELEAEEEPVPEGSGPLGPWGPQDWVGPLPRGPTTPDEGCLRYFVLGTVAALVALVLNVFYPLVSQSRWR

SEQ ID NO: 1031199 - protein, 1268 aa, Homo sapiens
MSGGASATGPRRGPPGLEDTTSKKKQKDRANQESKDGDPRKETGSRYVAQAGLEPLASGDPSASASHAAGITGSRHRTRLFFPSSSGSASTPQEEQTKEELLLDWRQSAEEVIVKLRVGVGPLQLEDVDAAFTDTDCVVRFAGGQQWGGVFYAEIKSSCAKVQTRKGSLLHLTLPKKVPMLTWPSLLVEADEQLCIPPLNSQTCLLGSEENLAPLAGEKAVPPGNDPVSPAMVRSRNPGKDDCAKEEMAVAADAATLVDEPESMVNLAFVKNDSYEKGPDSVVVHVYVKEICRDTSRVLFREQDFTLIFQTRDGNFLRLHPGCGPHTTFRWQVKLRNLIEPEQCTFCFTASRIDICLRKRQSQRWGGLEAPAARGAVGGAKVAVPTGPTPLDSTPPGGAPHPLTGQEEARAVEKDKSKARSEDTGLDSVATRTPMEHVTPKPETHLASPKPTCMVPPMPHSPVSGDSVEEEEEEEKKVCLPGFTGLVNLGNTCFMNSVIQSLSNTRELRDFFHDRSFEAEINYNNPLGTGGRLAIGFAVLLRALWKGTHHAFQPSKLKAIVASKASQFTGYAQHDAQEFMAFLLDGLHEDLNRIQNKPYTETVDSDGRPDEVVAEEAWQRHKMRNDSFIVDLFQGQYKSKLVCPVCAKVSITFDPFLYLPVPLPQKQKVLPVFYFAREPHSKPIKFLVSVSKENSTASEVLDSLSQSVHVKPENLRLAEVIKNRFHRVFLPSHSLDTVSPSDTLLCFELLSSELAKERVVVLEVQQRPQVPSVPISKCAACQRKQQSEDEKLKRCTRCYRVGYCNQLCQKTHWPDHKGLCRPENIGYPFLVSVPASRLTYARLAQLLEGYARYSVSVFQPPFQPGRMALESQSPGCTTLLSTGSLEAGDSERDPIQPPELQLVTPMAEGDTGLPRVWAAPDRGPVPSTSGISSEMLASGPIEVGSLPAGERVSRPEAAVPGYQHPSEAMNAHTPQFFIYKIDSSNREQRLEDKGDTPLELGDDCSLALVWRNNERLQEFVLVASKELECAEDPGSAGEAARAGHFTLDQCLNLFTRPEVLAPEEAWYCPQCKQHREASKQLLLWRLPNVLIVQLKRFSFRSFIWRDKINDLVEFPVRNLDLSKFCIGQKEEQLPSYDLYAVINHYGGMIGGHYTACARLPNDRSSQRSDVGWRLFDDSTVTTVDESQVVTRYAYVLFYRRRNSPVERPPRAGHSEHHPDLGPAAEAAASQGLGPGQAPEVAPTRTAPERFAPPVDRPAPTYSNMEEVD

SEQ ID NO: 1031200 - protein, 1268 aa, Homo sapiens; identical to SEQ ID NO: 1031199

SEQ ID NO: 1031201 - protein, 460 aa, Homo sapiens
MSGGASATGPRRGPPGLEDTTSKKKQKDRANQESKDGDPRKETGSRYVAQAGLEPLASGDPSASASHAAGITGSRHRTRLFFPSSSGSASTPQEEQTKEGACEDPHDLLATPTPELLLDWRQSAEEVIVKLRVGVGPLQLEDVDAAFTDTDCVVRFAGGQQWGGVFYAEIKSSCAKVQTRKGSLLHLTLPKKVPMLTWPSLLVEADEQLCIPPLNSQTCLLGSEENLAPLAGEKAVPPGNDPVSPAMVRSRNPGKDDCAKEEMAVAADAATLVDEPESMVNLAFVKNDSYEKGPDSVVVHVYVKEICRDTSRVLFREQDFTLIFQTRDGNFLRLHPGCGPHTTFRWQVKLRWVVPGPTTVPVLHRGLHLPGSSILMLIPPKSLEFSPHRNLIEPEQCTFCFTASRIDICLRKRQSQRWGGLEAPAARGLHTSSLHCPVPRDQDPNPCHMLLTTSPLIPPF

SEQ ID NO: 1031202 - protein, 215 aa, Homo sapiens
  misc_feature (56)..(58): Xaa can be any naturally occurring amino acid
MVNLAFVKNDSYEKGPDSVVVHVYVKEICRDTSRVLFREQDFTLIFQTRWVGDDGXXXASGGTVCLMLFLMSFLLILLCLCRDGNFLRLHPGCGPHTTFRWQVKLRWVVPGPTTVPVLHRGLHLPGSSILMLIPPKSPEFSPHRNLIEPEQCTFCFTASRIDICLRKRQSQRWGGLEAPAARGLHTSSLHCPVPRDQDPNPCHMLLTTSPLIPPF

SEQ ID NO: 1031203 - protein, 1224 aa, Homo sapiens
MSGGASATGPRRGPPGLEDTTSKKKQKDRANQESKDGDPRKETGSRYVAQAGLEPLASGDPSASASHAAGITGSRHRTRLFFPSSSGSASTPQEEQTKEELLLDWRQSAEEVIVKLRVGVGPLQLEDVDAAFTDTDCVVRFAGGEADEQLCIPPLNSQTCLLGSEENLAPLAGEKAVPPGNDPVSPAMVRSRNPGKDDCAKEEMAVAADAATLVDEPESMVNLAFVKNDSYEKGPDSVVVHVYVKEICRDTSRVLFREQDFTLIFQTRDGNFLRLHPGCGPHTTFRWQVKLRNLIEPEQCTFCFTASRIDICLRKRQSQRWGGLEAPAARGAVGGAKVAVPTGPTPLDSTPPGGAPHPLTGQEEARAVEKDKSKARSEDTGLDSVATRTPMEHVTPKPETHLASPKPTCMVPPMPHSPVSGDSVEEEEEEEKKVCLPGFTGLVNLGNTCFMNSVIQSLSNTRELRDFFHDRSFEAEINYNNPLGTGGRLAIGFAVLLRALWKGTHHAFQPSKLKAIVASKASQFTGYAQHDAQEFMAFLLDGLHEDLNRIQNKPYTETVDSDGRPDEVVAEEAWQRHKMRNDSFIVDLFQGQYKSKLVCPVCAKVSITFDPFLYLPVPLPQKQKVLPVFYFAREPHSKPIKFLVSVSKENSTASEVLDSLSQSVHVKPENLRLAEVIKNRFHRVFLPSHSLDTVSPSDTLLCFELLSSELAKERVVVLEVQQRPQVPSVPISKCAACQRKQQSEDEKLKRCTRCYRVGYCNQLCQKTHWPDHKGLCRPENIGYPFLVSVPASRLTYARLAQLLEGYARYSVSVFQPPFQPGRMALESQSPGCTTLLSTGSLEAGDSERDPIQPPELQLVTPMAEGDTGLPRVWAAPDRGPVPSTSGISSEMLASGPIEVGSLPAGERVSRPEAAVPGYQHPSEAMNAHTPQFFIYKIDSSNREQRLEDKGDTPLELGDDCSLALVWRNNERLQEFVLVASKELECAEDPGSAGEAARAGHFTLDQCLNLFTRPEVLAPEEAWYCPQCKQHREASKQLLLWRLPNVLIVQLKRFSFRSFIWRDKINDLVEFPVRNLDLSKFCIGQKEEQLPSYDLYAVINHYGGMIGGHYTACARLPNDRSSQRSDVGWRLFDDSTVTTVDESQVVTRYAYVLFYRRRNSPVERPPRAGHSEHHPDLGPAAEAAASQGLGPGQAPEVAPTRTAPERFAPPVDRPAPTYSNMEEVD

SEQ ID NO: 1031204 - protein, 1250 aa, Homo sapiens
MSGGASATGPRRGPPGLEDTTSKKKQKDRANQESKDGDPRKETGSRYVAQAGLEPLASGDPSASASHAAGITGSRHRTRLFFPSSSGSASTPQEEQTKEELLLDWRQSAEEVIVKLRVGVGPLQLEDVDAAFTDTDCVVRFAGGQQWGGVFYAEIKSSCAKVQTRKGSLLHLTLPKKVPMLTWPSLLVEADEQLCIPPLNSQTCLLGSEENLAPLAGEKAVPPGNDPVSPAMVRSRNPGKDDCAKEEMAVAADAATLVDEPESMVNLAFVKNDSYEKGPDSVVVHVYVKEICRDTSRVLFREQDFTLIFQTRDGNFLRLHPGCGPHTTFRWQVKLRNLIEPEQCTFCFTASRIDICLRKRQSQRWGGLEAPAARGAVGGAKVAVPTGPTPLDSTPPGGAPHPLTGQEEARAVEKDKSKARSEDTGLDSVATRTPMEHVTPKPETHLASPKPTCMVPPMPHSPVSGDSVEEEEEEEKKVCLPGFTGLVNLGNTCFMNSVIQSLSNTRELRDFFHDRSFEAEINYNNPLGTGGRLAIGFAVLLRALWKGTHHAFQPSKLKAIVASKASQFTGYAQHDAQEFMAFLLDGLHEDLNRIQNKPYTETVDSDGRPDEVVAEEAWQRHKMRNDSFIVDLFQGQYKSKLVCPVCAKVSITFDPFLYLPVPLPQKQKVLPVFYFAREPHSKPIKFLVSVSKENSTASEVLDSLSQSVHVKPENLRLAEVIKNRFHRVFLPSHSLDTVSPSDTLLCFELLSSELAKERVVVLEVQQRPQVPSVPISKCAACQRKQQSEDEKLKRCTRCYRVGYCNQLCQKTHWPDHKGLCRPENIGYPFLVSVPASRLTYARLAQLLEGYARYSVSVFQPPFQPGRMALESQSPGCTTLLSTGSLEAGDSERDPIQPPELQLVTPMAEGDTGLPRVWAAPDRGPVPSTSGISSEMLASGPIEVGSLPAGERVSRPEAAVPGYQHPSEAMNAHTPQFFIYLELGDDCSLALVWRNNERLQEFVLVASKELECAEDPGSAGEAARAGHFTLDQCLNLFTRPEVLAPEEAWYCPQCKQHREASKQLLLWRLPNVLIVQLKRFSFRSFIWRDKINDLVEFPVRNLDLSKFCIGQKEEQLPSYDLYAVINHYGGMIGGHYTACARLPNDRSSQRSDVGWRLFDDSTVTTVDESQVVTRYAYVLFYRRRNSPVERPPRAGHSEHHPDLGPAAEAAASQGLGPGQAPEVAPTRTAPERFAPPVDRPAPTYSNMEEVD

SEQ ID NO: 1031205 - protein, 1253 aa, Homo sapiens
MSGGASATGPRRGPPGLEDTTSKKKQKDRANQESKDGDPRKETGSRYVAQAGLEPLASGDPSASASHAAGITGSRHRTRLFFPSSSGSASTPQEEQTKEELLLDWRQSAEEVIVKLRVGVGPLQLEDVDAAFTDTDCVVRFAGGQQWGGVFYAEIKSSCAKVQTRKGSLLHLTLPKKVPMLTWPSLLVEADEQLCIPPLNSQTCLLGSEENLAPLAGEKAVPPGNDPVSPAMVRSRNPGKDDCAKEEMAVAADAATLVDEPESMVNLAFVKNDSYEKGPDSVVVHVYVKEICRDTSRVLFREQDFTLIFQTRDGNFLRLHPGCGPHTTFRWQVKLRNLIEPEQCTFCFTASRIDICLRKRQSQRWGGLEAPAARGAVGGAKVAVPTGPTPLDSTPPGGAPHPLTGQEEARAVEKDKSKARSEDTGLDSVATRTPMEHVTPKPETHLASPKPTCMVPPMPHSPVSGDSVEEEEEEEKKVCLPGFTGLVNLGNTCFMNSVIQSLSNTRELRDFFHDRSFEAEINYNNPLGTGGRLAIGFAVLLRALWKGTHHAFQPSKLKAIVASKASQFTGYAQHDAQEFMAFLLDGLHEDLNRIQNKPYTETVDSDGRPDEVVAEEAWQRHKMRNDSFIVDLFQGQYKSKLVCPVCAKVSITFDPFLYLPVPLPQKQKVLPVFYFAREPHSKPIKFLVSVSKENSTASEVLDSLSQSVHVKPENLRLAEVIKNRFHRVFLPSHSLDTVSPSDTLLCFELLSSELAKERVVVLEVQQRPQVPSVPISKCAACQRKQQSEDEKLKRCTRCYRVGYCNQLCQKTHWPDHKGLCRPENIGYPFLVSVPASRLTYARLAQLLEGYARYSVSVFQPPFQPGRMALESQSPGCTTLLSTGSLEAGDSERDPIQPPELQLVTPMAEGDTGLPRVWAAPDRGPVPSTSGISSEMLASGPIEVGSLPAGERVSRPEAAVPGYQHPSEAMNAHTPQFFIYKIDSSNREQRLEDKGDTPLELGDDCSLALVWRNNERLQEFVLVASKELECAEDPGSAGEAARAGHFTLDQCLNLFTRPEVLAPEEAWYCPQCKQHREASKQLLLWRLPNVLIVQLKRFSFRSFIWRDKINDLVEFPVRNLDLSKFCIGQKEEQLPSYDLYAVINHYGGMIGGHYTACARLPNDRSSQRSDVGWRLFDDSTVTTVDESQVVTRYAYVLFYRRRNSPVERPPRAGHSEHHPDLGPAAEAAASQVRHVGGFTEYWGTVHRLGPGWGI

SEQ ID NO: 1031206 - protein, 1140 aa, Homo sapiens
QKRAQGRGEVGAGAGPGAQAGPSAKRAVHLCRGPEGERVQDDPGPRGDAPPFVADPATQVEADEQLCIPPLNSQTCLLGSEENLAPLAGEKAVPPGNDPVSPAMVRSRNPGKDDCAKEEMAVAADAATLVDEPESMVNLAFVKNDSYEKGPDSVVVHVYVKEICRDTSRVLFREQDFTLIFQTRDGNFLRLHPGCGPHTTFRWQVKLRNLIEPEQCTFCFTASRIDICLRKRQSQRWGGLEAPAARGAVGGAKVAVPTGPTPLDSTPPGGAPHPLTGQEEARAVEKDKSKARSEDTGLDSVATRTPMEHVTPKPETHLASPKPTCMVPPMPHSPVSGDSVEEEEEEEKKVCLPGFTGLVNLGNTCFMNSVIQSLSNTRELRDFFHDRSFEAEINYNNPLGTGGRLAIGFAVLLRALWKGTHHAFQPSKLKAIVASKASQFTGYAQHDAQEFMAFLLDGLHEDLNRIQNKPYTETVDSDGRPDEVVAEEAWQRHKMRNDSFIVDLFQGQYKSKLVCPVCAKVSITFDPFLYLPVPLPQKQKVLPVFYFAREPHSKPIKFLVSVSKENSTASEVLDSLSQSVHVKPENLRLAEVIKNRFHRVFLPSHSLDTVSPSDTLLCFELLSSELAKERVVVLEVQQRPQVPSVPISKCAACQRKQQSEDEKLKRCTRCYRVGYCNQLCQKTHWPDHKGLCRPENIGYPFLVSVPASRLTYARLAQLLEGYARYSVSVFQPPFQPGRMALESQSPGCTTLLSTGSLEAGDSERDPIQPPELQLVTPMAEGDTGLPRVWAAPDRGPVPSTSGISSEMLASGPIEVGSLPAGERVSRPEAAVPGYQHPSEAMNAHTPQFFIYKIDSSNREQRLEDKGDTPLELGDDCSLALVWRNNERLQEFVLVASKELECAEDPGSAGEAARAGHFTLDQCLNLFTRPEVLAPEEAWYCPQCKQHREASKQLLLWRLPNVLIVQLKRFSFRSFIWRDKINDLVEFPVRNLDLSKFCIGQKEEQLPSYDLYAVINHYGGMIGGHYTACARLPNDRSSQRSDVGWRLFDDSTVTTVDESQVVTRYAYVLFYRRRNSPVERPPRAGHSEHHPDLGPAAEAAASQGLGPGQAPEVAPTRTAPERFAPPVDRPAPTYSNMEEVD

SEQ ID NO: 1031207 - protein, 1268 aa, Homo sapiens; identical to SEQ ID NO: 1031199

SEQ ID NO: 1031208 - protein, 546 aa, Homo sapiens [sequence omitted]

SEQ ID NO: 1031209 - protein, 647 aa, Homo sapiens
MFEIDYSRDSFLKDGQPFRYISGSIHYSRVPRFYWKDRLLKMKMAGLNAIQTYVPWNFHEPWPGQYQFSEDHDVEYFLRLAHELGLLVILRPGPYICAEWEMGGLPAWLLEKESILLRSSDPDYLAAVDKWLGVLLPKMKPLLYQNGGPVITVQVENEYGSYFACDFDYLRFLQKRFRHHLGDDVVLFTTDGAHKTFLKCGALQGLYTTVDFGTGSNITDAFLSQRKCEPKGPLINSEFYTGWLDHWGQPHSTIKTEAVASSLYDILARGASVNLYMFIGGTNFAYWNGANSPYAAQPTSYDYDAPLSEAGDLTEKYFALRNIIQKFEKVPEGPIPPSTPKFAYGKVTLEKLKTVGAALDILCPSGPIKSLYPLTFIQVKQHYGFVLYRTTLPQDCSNPAPLSSPLNGVHDRAYVAVDGIPQGVLERNNVITLNITGKAGATLDLLVENMGRVNYGAYINDFKGLVSNLTLSSNILTDWTIFPLDTEDAVRSHLGGWGHRDSGHHDEAWAHNSSNYTLPAFYMGNFSIPSGIPDLPQDTFIQFPGWTKGQVWINGFNLGRYWPARGPQLTLFVPQHILMTSAPNTITVLELEWAPCSSDDPELCAVTFVDRPVIGSSVTYDHPSKPVEKRLMPPPPQKNKDSWLDHV

SEQ ID NO: 1031210 - protein, 683 aa, Homo sapiens
GTPDLRRSARLGLPKCWDYRREQDFHSNKFQNATQRMFEIDYSRDSFLKDGQPFRYISGSIHYSRVPRFYWKDRLLKMKMAGLNAIQTYVPWNFHEPWPGQYQFSEDHDVEYFLRLAHELGLLVILRPGPYICAEWEMGGLPAWLLEKESILLRSSDPDYLAAVDKWLGVLLPKMKPLLYQNGGPVITVQVENEYGSYFACDFDYLRFLQKRFRHHLGDDVVLFTTDGAHKTFLKCGALQGLYTTVDFGTGSNITDAFLSQRKCEPKGPLINSEFYTGWLDHWGQPHSTIKTEAVASSLYDILARGASVNLYMFIGGTNFAYWNGANSPYAAQPTSYDYDAPLSEAGDLTEKYFALRNIIQKFEKVPEGPIPPSTPKFAYGKVTLEKLKTVGAALDILCPSGPIKSLYPLTFIQVKQHYGFVLYRTTLPQDCSNPAPLSSPLNGVHDRAYVAVDGIPQGVLERNNVITLNITGKAGATLDLLVENMGRVNYGAYINDFKGLVSNLTLSSNILTDWTIFPLDTEDAVRSHLGGWGHRDSGHHDEAWAHNSSNYTLPAFYMGNFSIPSGIPDLPQDTFIQFPGWTKGQVWINGFNLGRYWPARGPQLTLFVPQHILMTSAPNTITVLELEWAPCSSDDPELCAVTFVDRPVIGSSVTYDHPSKPVEKRLMPPPPQKNKDSWLDHV

SEQ ID NO: 1031211 - protein, 371 aa, Homo sapiens [sequence omitted]

SEQ ID NO: 1031212 - protein, 395 aa, Homo sapiens
MCLLVFSLYSAELMDPKELVPELHQSVITSGTFLSSGANSPYAAQPTSYDYDAPLSEAGDLTEKYFALRNIIQKFEKVPEGPIPPSTPKFAYGKVTLEKLKTVGAALDILCPSGPIKSLYPLTFIQVKQHYGFVLYRTTLPQDCSNPAPLSSPLNGVHDRAYVAVDGIPQGVLERNNVITLNITGKAGATLDLLVENMGRVNYGAYINDFKGLVSNLTLSSNILTDWTIFPLDTEDAVRSHLGGWGHRDSGHHDEAWAHNSSNYTLPAFYMGNFSIPSGIPDLPQDTFIQFPGWTKGQVWINGFNLGRYWPARGPQLTLFVPQHILMTSAPNTITVLELEWAPCSSDDPELCAVTFVDRPVIGSSVTYDHPSKPVEKRLMPPPPQKNKDSWLDHV

SEQ ID NO: 1031213 - protein, 677 aa, Homo sapiens
MPGFLVRILLLLLVLLLLGPTRGLRNATQRMFEIDYSRDSFLKDGQPFRYISGSIHYSRVPRFYWKDRLLKMKMAGLNAIQTYVPWNFHEPWPGQYQFSEDHDVEYFLRLAHELGLLVILRPGPYICAEWEMGGLPAWLLEKESILLRSSDPDYLAAVDKWLGVLLPKMKPLLYQNGGPVITVQVENEYGSYFACDFDYLRFLQKRFRHHLGDDVVLFTTDGAHKTFLKCGALQGLYTTVDFGTGSNITDAFLSQRKCEPKGPLINSEFYTGWLDHWGQPHSTIKTEAVASSLYDILARGASVNLYMFIGGTNFAYWNGANSPYAAQPTSYDYDAPLSEAGDLTEKYFALRNIIQKFEKVPEGPIPPSTPKFAYGKVTLEKLKTVGAALDILCPSGPIKSLYPLTFIQVKQHYGFVLYRTTLPQDCSNPAPLSSPLNGVHDRAYVAVDGIPQGVLERNNVITLNITGKAGATLDLLVENMGRVNYGAYINDFKGLVSNLTLSSNILTDWTIFPLDTEDAVRSHLGGWGHRDSGHHDEAWAHNSSNYTLPAFYMGNFSIPSGIPDLPQDTFIQFPGWTKGQVWINGFNLGRYWPARGPQLTLFVPQHILMTSAPNTITVLELEWAPCSSDDPELCAVTFVDRPVIGSSVTYDHPSKPVEKRLMPPPPQKNKDSWLDHV

SEQ ID NO: 1031214 - protein, 677 aa, Homo sapiens; identical to SEQ ID NO: 1031213

SEQ ID NO: 1031215 - protein, 677 aa, Homo sapiens; identical to SEQ ID NO: 1031213

SEQ ID NO: 1031216 - protein, 405 aa, Homo sapiens
MPGFLVRILLLLLVLLLLGPTRGLRNATQRMFEIDYSRDSFLKDGQPFRYISGSIHYSRVPRFYWKDRLLKMKMAGLNAIQTYVPWNFHEPWPGQYQFSEDHDVEYFLRLAHELGLLVILRPGPYICAEWEMGGLPAWLLEKESILLRSSDPDYLAAVDKWLGVLLPKMKPLLYQNGGPVITVQVENEYGSYFACDFDYLRFLQKRFRHHLGDDVVLFTTDGAHKTFLKCGALQGLYTTVDFGTGSNITDAFLSQRKCEPKGPLINSEFYTGWLDHWGQPHSTIKTEAVASSLYDILARGASVNLYMFIGGTNFAYWNGANSPYAAQPTSYDYDAPLSEAGDLTEKYFALRNIIQKVGAWYELWWADLGRASFELTVVCGPLSGWSLLLKDGEGGSVDWVGSVPW

SEQ ID NO: 1031217 - protein, 136 aa, Homo sapiens
FVGAFFPPLLLACLHHGPPSSRLRCIWGCWFSVSLSPGQVWINGFNLGRYWPARGPQLTLFVPQHILMTSAPNTITVLELEWAPCSSDDPELCAVTFVDRPVIGSSVTYDHPSKPVEKRLMPPPPQKNKDSWLDHV

SEQ ID NO: 1031218 - protein, 725 aa, Homo sapiens [sequence omitted]

SEQ ID NO: 1031219 - protein, 509 aa, Homo sapiens [sequence omitted]

SEQ ID NO: 1031220 - protein, 371 aa, Homo sapiens [sequence omitted]

SEQ ID NO: 1031221 - protein, 198 aa, Homo sapiens
MGRVNYGAYINDFKGLVSNLTLSSNILTDWTIFPLDTEDAVRSHLGGWGHRDSGHHDEAWAHNSSNYTLPAFYMGNFSIPSGIPDLPQDTFIQFPGWTKGQVWINGFNLGRYWPARGPQLTLFVPQHILMTSAPNTITVLELEWAPCSSDDPELCAVTFVDRPVIGSSVTYDHPSKPVEKRLMPPPPQKNKDSWLDHV

SEQ ID NO: 1031222 - protein, 521 aa, Homo sapiens
QYVGCDGPARMLHDIIELVQQFGRPYISQGIITGPDEHTTIPGAAGNGAGGQADGGGPGHISNPVTVLPASALLPLAILEEVVTATCWKLLDVIGFLPEQLVYEASRDSINVRVPLMFWKWVTVGINQVVGGLDNCGVDSGILKDVTSLALSSELNAIPWMKQHCSYLLVSAPSAFIHLEMKTHLSYLICRVFFDPLVSQFEKVPEGPIPPSTPKFAYGKVTLEKLKTVGAALDILCPSGPIKSLYPLTFIQVKQHYGFVLYRTTLPQDCSNPAPLSSPLNGVHDRAYVAVDGIPQGVLERNNVITLNITGKAGATLDLLVENMGRVNYGAYINDFKGLVSNLTLSSNILTDWTIFPLDTEDAVRSHLGGWGHRDSGHHDEAWAHNSSNYTLPAFYMGNFSIPSGIPDLPQDTFIQFPGWTKGQVWINGFNLGRYWPARGPQLTLFVPQHILMTSAPNTITVLELEWAPCSSDDPELCAVTFVDRPVIGSSVTYDHPSKPVEKRLMPPPPQKNKDSWLDHV

SEQ ID NO: 1031223 - protein, 378 aa, Homo sapiens
MLAVMDLARMLHDIIELVQQFGRPYISQGIITGPDEHTTIPGAAGNGAGGQADGGGPGHISNPVTVLPASALLPLAILEEVVTATCWKLLDVIGFLPEQLVYEASRDSINVRVPLMFWKWVTVGINQVVGGLDNCGVDSGILKDVTSLALSSELNAIPWMKQHCSYLLVSAPSAFIHLEMKTHLSYLICRVFFDPLVSQFEKVPEGPIPPSTPKFAYGKVTLEKLKTVGAALDILCPSGPIKSLYPLTFIQVKQHYGFVLYRTTLPQDCSNPAPLSSPLNGVHDRAYVAVDGIPQGVLERNNVITLNITGKAGATLDLLVENMGRVNYGAYINDFKGLVSNLTLSSNILTDWTIFPLDTEDAVRSHLGGWGHRDSGHH

SEQ ID NO: 1031224 - protein, 677 aa, Homo sapiens; identical to SEQ ID NO: 1031213

SEQ ID NO: 1031225 - protein, 677 aa, Homo sapiens; identical to SEQ ID NO: 1031213

SEQ ID NO: 1031226 - protein, 518 aa, Homo sapiens
MPGFLVRILLLLLVLLLLGPTRGLRVENEYGSYFACDFDYLRFLQKRFRHHLGDDVVLFTTDGAHKTFLKCGALQGLYTTVDFGTGSNITDAFLSQRKCEPKGPLINSEFYTGWLDHWGQPHSTIKTEAVASSLYDILARGASVNLYMFIGGTNFAYWNGANSPYAAQPTSYDYDAPLSEAGDLTEKYFALRNIIQKFEKVPEGPIPPSTPKFAYGKVTLEKLKTVGAALDILCPSGPIKSLYPLTFIQVKQHYGFVLYRTTLPQDCSNPAPLSSPLNGVHDRAYVAVDGIPQGVLERNNVITLNITGKAGATLDLLVENMGRVNYGAYINDFKGLVSNLTLSSNILTDWTIFPLDTEDAVRSHLGGWGHRDSGHHDEAWAHNSSNYTLPAFYMGNFSIPSGIPDLPQDTFIQFPGWTKGQVWINGFNLGRYWPARGPQLTLFVPQHILMTSAPNTITVLELEWAPCSSDDPELCAVTFVDRPVIGSSVTYDHPSKPVEKRLMPPPPQKNKDSWLDHV

SEQ ID NO: 1031227 - protein, 427 aa, Homo sapiens
MLAVMDLARMLHDIIELVQQFGRPYISQGIITGPDEHTTIPGAAGNGAGGQADGGGPGHISNPVTVLPASALLPLAILEEVVTATCWKLLDVIGFLPEQLVYEAFQFEKVPEGPIPPSTPKFAYGKVTLEKLKTVGAALDILCPSGPIKSLYPLTFIQVKQHYGFVLYRTTLPQDCSNPAPLSSPLNGVHDRAYVAVDGIPQGVLERNNVITLNITGKAGATLDLLVENMGRVNYGAYINDFKGLVSNLTLSSNILTDWTIFPLDTEDAVRSHLGGWGHRDSGHHDEAWAHNSSNYTLPAFYMGNFSIPSGIPDLPQDTFIQFPGWTKGQVWINGFNLGRYWPARGPQLTLFVPQHILMTSAPNTITVLELEWAPCSSDDPELCAVTFVDRPVIGSSVTYDHPSKPVEKRLMPPPPQKNKDSWLDHV

SEQ ID NO: 1031228 - protein, 414 aa, Homo sapiens
MPGFLVRILLLLLVLLLLGPTRGLRNATQRMFEIDYSRDSFLKDGQPFRYISGSIHYSRVPRFYWKDRLLKMKMAGLNAIQTYVPWNFHEPWPGQYQFSEDHDVEYFLRLAHELGLLVILRPGPYICAEWEMGGLPAWLLEKESILLRSSDPDYLAAVDKWLGVLLPKMKPLLYQNGGPVITVQVENEYGSYFACDFDYLRFLQKRFRHHLGDDVVLFTTDGAHKTFLKCGALQGLYTTVDFGTGSNITDAFLSQRKCEPKGPLINSEFYTGWLDHWGQPHSTIKTEAVASSLYDILARGASVNLYMFIGGTNFAYWNGANSPYAAQPTSYDYDAPLSEAGDLTEKYFALRNIIQKFEKVPEGPIPPSTPKFAYGKVTLEKLKTVGAALDILCPSGPHTVRWPNTVRSPTRCGP

SEQ ID NO: 1031229 - protein, 840 aa, Homo sapiens
MGTPRAQHPPPPQLLFLILLSCPWIQGLPLKEEEILPEPGSETPTVASEALAELLHGALLRRGPEMGYLPGPPLGPEGGEEETTTTIITTTTVTTTVTSPVLCNNNISEGEGYVESPDLGSPVSRTLGLLDCTYSIHVYPGYGIEIQVQTLNLSQEEELLVLAGGGSPGLAPRLLANSSMLGEGQVLRSPTNRLLLHFQSPRVPRGGGFRIHYQAYLLSCGFPPRPAHGDVSVTDLHPGGTATFHCDSGYQLQGEETLICLNGTRPSWNGETPSCMASCGGTIHNATLGRIVSPEPGGAVGPNLTCRWVIEAAEGRRLHLHFERVSLDEDNDRLMVRSGGSPLSPVIYDSDMDDVPERGLISDAQSLYVELLSETPANPLLLSLRFEAFEEDRCFAPFLAHGNVTTTDPEYRPGALATFSCLPGYALEPPGPPNAIECVDPTEPHWNDTEPACKAMCGGELSEPAGVVLSPDWPQSYSPGQDCVWGVHVQEEKRILLQVEILNVREGDMLTLFDGDGPSARVLAQLRGPQPRRRLLSSGPDLTLQFQAPPGPPNPGLGQGFVLHFKEVPRNDTCPELPPPEWGWRTASHGDLIRGTVLTYQCEPGYELLGSDILTCQWDLSWSAAPPACQKIMTCADPGEIANGHRTASDAGFPVGSHVQYRCLPGYSLEGAAMLTCYSRDTGTPKWSDRVPKCALKYEPCLNPGVPENGYQTLYKHHYQAGESLRFFCYEGFELIGEVTITCVPGHPSQWTSQPPLCKVTQTTDPSRQLEGGNLALAILLPLGLVIVLGSGVYIYYTKLQGKSLFGFSGSHSYSPITVESDFSNPLYEAGDTREYEVSI

SEQ ID NO: 1031230 - protein, 944 aa, Homo sapiens
MGTPRAQHPPPPQLLFLILLSCPWIQGLPLKEEEILPEPGSETPTVASEALAELLHGALLRRGPEMGYLPGSDPDPTLATPPAGQTLAVPSLPRATEPGTGPLTTAVTPNGVRGAGPTAPELLTPPPGTTAPPPPSPASPGPPLGPEGGEEETTTTIITTTTVTTTVTSPVLCNNNISEGEGYVESPDLGSPVSRTLGLLDCTYSIHVYPGYGIEIQVQTLNLSQEEELLVLAGGGSPGLAPRLLANSSMLGEGQVLRSPTNRLLLHFQSPRVPRGGGFRIHYQAYLLSCGFPPRPAHGDVSVTDLHPGGTATFHCDSGYQLQGEETLICLNGTRPSWNGETPSCMASCGGTIHNATLGRIVSPEPGGAVGPNLTCRWVIEAAEGRRLHLHFERVSLDEDNDRLMVRSGGSPLSPVIYDSDMDDVPERGLISDAQSLYVELLSETPANPLLLSLRFEAFEEDRCFAPFLAHGNVTTTDPEYRPGALATFSCLPGYALEPPGPPNAIECVDPTEPHWNDTEPACKAMCGGELSEPAGVVLSPDWPQSYSPGQDCVWGVHVQEEKRILLQVEILNVREGDMLTLFDGDGPSDRVLAQLRGPQPRQDIGDGPSARVLAQLRGPQPRRRLLSSGPDLTLQFQAPPGPPNPGLGQGFVLHFKEVPRNDTCPELPPPEWGWRTASHGDLIRGTVLTYQCEPGYELLGSDILTCQWDLSWSAAPPACQKIMTCADPGEIANGHRTASDAGFPVGSHVQYRCLPGYSLEGAAMLTCYSRDTGTPKWSDRVPKCALKYEPCLNPGVPENGYQTLYKHHYQAGESLRFFCYEGFELIGEVTITCVPGHPSQWTSQPPLCKVAYEELLDNRKLEVTQTTDPSRQLEGGNLALAILLPLGLVIVLGSGVYIYYTKLQGKSLFGFSGSHSYSPITVESDFSNPLYEAGDTREYEVSI

SEQ ID NO: 1031231 - protein, 927 aa, Homo sapiens
MGTPRAQHPPPPQLLFLILLSCPWIQGLPLKEEEILPEPGSETPTVASEALAELLHGALLRRGPEMGYLPGSDPDPTLATPPAGQTLAVPSLPRATEPGTGPLTTAVTPNGVRGAGPTAPELLTPPPGTTAPPPPSPASPGPPLGPEGGEEETTTTIITTTTVTTTVTSPVLCNNNISEGEGYVESPDLGSPVSRTLGLLDCTYSIHVYPGYGIEIQVQTLNLSQEEELLVLAGGGSPGLAPRLLANSSMLGEGQVLRSPTNRLLLHFQSPRVPRGGGFRIHYQAYLLSCGFPPRPAHGDVSVTDLHPGGTATFHCDSGYQLQGEETLICLNGTRPSWNGETPSCMASCGGTIHNATLGRIVSPEPGGAVGPNLTCRWVIEAAEGRRLHLHFERVSLDEDNDRLMVRSGGSPLSPVIYDSDMDDVPERGLISDAQSLYVELLSETPANPLLLSLRFEAFEEDRCFAPFLAHGNVTTTDPEYRPGALATFSCLPGYALEPPGPPNAIECVDPTEPHWNDTEPACKAMCGGELSEPAGVVLSPDWPQSYSPGQDCVWGVHVQEEKRILLQVEILNVREGDMLTLFDGDGPSARVLAQLRGPQPRRRLLSSGPDLTLQFQAPPGPPNPGLGQGFVLHFKEVPRNDTCPELPPPEWGWRTASHGDLIRGTVLTYQCEPGYELLGSDILTCQWDLSWSAAPPACQKIMTCADPGEIANGHRTASDAGFPVGSHVQYRCLPGYSLEGAAMLTCYSRDTGTPKWSDRVPKCALKYEPCLNPGVPENGYQTLYKHHYQAGESLRFFCYEGFELIGEVTITCVPGHPSQWTSQPPLCKGCLVMELIMDNSDNTGEVTQTTDPSRQLEGGNLALAILLPLGLVIVLGSGVYIYYTKLQGKSLFGFSGSHSYSPITVESDFSNPLYEAGDTREYEVSI

SEQ ID NO: 1031232 - protein, 801 aa, Homo sapiens
MGTPRAQHPPPPQLLFLILLSCPWIQGLPLKEEEILPEPGSETPTVASEALAELLHGALLRRGPEMGYLPGSDPDPTLATPPAGQTLAVPSLPRATEPGTGPLTTAVTPNGVRGAGPTAPELLTPPPGTTAPPPPSPASPGPPLGPEGGEEETTTTIITTTTVTTTVTSPVLCNNNISEGEGYVESPDLGSPVSRTLGLLDCTYSIHVYPGYGIEIQVQTLNLSQEEELLVLAGGGSPGLAPRLLANSSMLGEGQVLRSPTNRLLLHFQSPRVPRGGGFRIHYQAYLLSCGFPPRPAHGDVSVTDLHPGGTATFHCDSGYQLQGEETLICLNGTRPSWNGETPSCMASCGGTIHNATLGRIVSPEPGGAVGPNLTCRWVIEAAEGRRLHLHFERVSLDEDNDRLMVRSGGSPLSPVIYDSDMDDVPERGLISDAQSLYVELLSETPANPLLLSLRFEAFEEDRCFAPFLAHGNVTTTDPEYRPGALATFSCLPGYALEPPGPPNAIECVDPTEPHWNDTEPACKAMCGGELSEPAGVVLSPDWPQSYSPGQDCVWGVHVQEEKRILLQVEILNVREGDMLTLFDGDGPSARVLAQLRGPQPRRRLLSSGPDLTLQFQAPPGPPNPGLGQGFVLHFKEVPRNDTCPELPPPEWGWRTASHGDLIRGTVLTYQCEPGYELLGSDILTCQWDLSWSAAPPACQKIMTCADPGEIANGHRTASDAGFPVGSHVQYRCLPGYSLEGAAMLTCYSRASLCASSAMRALSLSARSPSPVCPATPPSGPASPHSAKLPMRSSWTTENWK

SEQ ID NO: 1031233 - protein, 541 aa, Homo sapiens
MGTPRAQHPPPPQLLFLILLSCPWIQGLPLKEEEILPEPGSETPTVASEALAELLHGALLRRGPEMGYLPGSDPDPTLATPPAGQTLAVPSLPRATEPGTGPLTTAVTPNGVRGAGPTAPELLTPPPGTTAPPPPSPASPGPPLGPEGGEEETTTTIITTTTVTTTVTSPVLCNNNISEGEGYVESPDLGSPVSRTLGLLDCTYSIHVYPGYGIEIQVQTLNLSQEEELLVLAGGGSPGLAPRLLANSSMLGEGQVLRSPTNRLLLHFQSPRVPRGGGFRIHYQAYLLSCGFPPRPAHGDVSVTDLHPGGTATFHCDSGYQLQGEETLICLNGTRPSWNGETPSCMASCGGTIHNATLGRIVSPEPGGAVGPNLTCRWVIEAAEGRRLHLHFERVSLDEDNDRLMVRSGGSPLSPVIYDSDMDDVPERGLISDAQSLYVELLSETPANPLLLSLRFEAFEEDRWGTVPAPESWPSCGDLSRAAAFSPLGPTSHCSFRHRPGPQIQAWARASYCTSKRSRGTTRAPSCHLRSGAGERHPTGT

SEQ ID NO: 1031234 - protein, 869 aa, Homo sapiens
  misc_feature (382)..(382): Xaa can be any naturally occurring amino acid
  misc_feature (386)..(386): Xaa can be any naturally occurring amino acid
MGTPRAQHPPPPQLLFLILLSCPWIQGLPLKEEEILPEPGSETPTVASEALAELLHGALLRRGPEMGYLPGSDPDPTLATPPAGQTLAVPSLPRATEPGTGPLTTAVTPNGVRGAGPTAPELLTPPPGTTAPPPPSPASPGPPLGPEGGEEETTTTIITTTTVTTTVTSPVLCNNNISEGEGYVESPDLGSPVSRTLGLLDCTYSIHVYPGYGIEIQVQTLNLSQEEELLVLAGGGSPGLAPRLLANSSMLGEGQVLRSPTNRLLLHFQSPRVPRGGGFRIHYQAYLLSCGFPPRPAHGDVSVTDLHPGGTATFHCDSGYQLQGEETLICLNGTRPSWNGETPSCMASCGGTIHNATLGRIVSPEPGGAVGPNLTCRWVIEXMLDXGCPGLAPLATFWKTGSFGLGIDMRQLRPGLDCVRSGGSPLSPVIYDSDMDDVPERGLISDAQSLYVELLSETPANPLLLSLRFEAMCGGELSEPAGVVLSPDWPQSYSPGQDCVWGVHVQEEKRILLQVEILNVREGDMLTLFDGDGPSARVLAQLRGPQPRRRLLSSGPDLTLQFQAPPGPPNPGLGQGFVLHFKEVPRNDTCPELPPPEWGWRTASHGDLIRGTVLTYQCEPGYELLGSDILTCQWDLSWSAAPPACQKIMTCADPGEIANGHRTASDAGFPVGSHVQYRCLPGYSLEGAAMLTCYSRDTGTPKWSDRVPKCALKYEPCLNPGVPENGYQTLYKHHYQAGESLRFFCYEGFELIGEVTITCVPGHPSQWTSQPPLCKVAYEELLDNRKLEVTQTTDPSRQLEGGNLALAILLPLGLVIVLGSGVYIYYTKLQGKSLFGFSGSHSYSPITVESDFSNPLYEAGDTREYEVSI

SEQ ID NO: 1031235 - protein, 143 aa, Homo sapiens
QRTRNTIGLVEAGGCQMRLKYEPCLNPGVPRMATRRCTSTCQKIMTCADPGEIANGHRTASDAGFPVGSHVQYRCLPGYSLEGAAMLTCYSRASLCASSAMRALSLSARSPSPVCPATPPSGPASPHSAKLPMRSSWTTENWK

SEQ ID NO: 1031236 - protein, 923 aa, Homo sapiens
MGTPRAQHPPPPQLLFLILLSCPWIQGLPLKEEEILPEPGSETPTVASEALAELLHGALLRRGPEMGYLPGSDPDPTLATPPAGQTLAVPSLPRATEPGTGPLTTAVTPNGVRGAGPTAPELLTPPPGTTAPPPPSPASPGPPLGPEGGEEETTTTIITTTTVTTTVTSPVLCNNNISEGEGYVESPDLGSPVSRTLGLLDCTYSIHVYPGYGIEIQVQTLNLSQEEELLVLAGGGSPGLAPRLLANSSMLGEGQVLRSPTNRLLLHFQSPRVPRGGGFRIHYQAYLLSCGFPPRPAHGDVSVTDLHPGGTATFHCDSGYQLQGEETLICLNGTRPSWNGETPSCMASCGGTIHNATLGRIVSPEPGGAVGPNLTCRWVIEAAEGRRLHLHFERVSLDEDNDRLMVRSGGSPLSPVIYDSDMDDVPERGLISDAQSLYVELLSETPANPLLLSLRFEAFEEDRCFAPFLAHGNVTTTDPEYRPGALATFSCLPGYALEPPGPPNAIECVDPTEPHWNDTEPACKAMCGGELSEPAGVVLSPDWPQSYSPGQDCVWGVHVQEEKRILLQVEILNVREGDMLTLFDGDGPSARVLAQLRGPQPRRRLLSSGPDLTLQFQAPPGPPNPGLGQGFVLHFKEVPRNDTCPELPPPEWGWRTASHGDLIRGTVLTYQCEPGYELLGSDILTCQWDLSWSAAPPACQKIMTCADPGEIANGHRTASDAGFPVGSHVQYRCLPGYSLEGAAMLTCYSRDTGTPKWSDRVPKCALKYEPCLNPGVPENGYQTLYKHHYQAGESLRFFCYEGFELIGEVTITCVPGHPSQWTSQPPLCKVAYEELLDNRKLEVTQTTDPSRQLEGGNLALAILLPLGLVIVLGSGVYIYYTKLQGKSLFGFSGSHSYSPITVESDFSNPLYEAGDTREYEVSI

SEQ ID NO: 1031237 - protein, 769 aa, Homo sapiens
MGTPRAQHPPPPQLLFLILLSCPWIQGLPLKEEEILPEPGSETPTVASEALAELLHGALLRRGPEMGYLPGSDPDPTLATPPAGQTLAVPSLPRATEPGTGPLTTAVTPNGVRGAGPTAPELLTPPPGTTAPPPPSPASPGPPLGPEGGEEETTTTIITTTTVTTTVTSPVLCNNNISEGEGYVESPDLGSPVSRTLGLLDCTYSIHVYPGYGIEIQVQTLNLSQEEELLVLAGGGSPGLAPRLLANSSMLGEGQVLRSPTNRLLLHFQSPRVPRGGGFRIHYQAYLLSCGFPPRPAHGDVSVTDLHPGGTATFHCDSGYQLQGEETLICLNGTRPSWNGETPSCMASCGGTIHNATLGRIVSPEPGGAVGPNLTCRWVIEAAEGRRLHLHFERVSLDEDNDRLMVRSGGSPLSPVIYDSDMDDVPERGLISDAQSLYVELLSETPANPLLLSLRFEAFEEDRCFAPFLAHGNVTTTDPEYRPGALATFSCLPGYALEPPGPPNAIECVDPTEPHWNDTEPACKAMCGGELSEPAGVVLSPDWPQSYSPGQDCVWGVHVQEEKRILLQVEILNVREGDMLTLFDGDGPSARVLAQLRGPQPRRRLLSSGPDLTLQFQAPPGPPNPGLGQGFVLHFKEVPRNDTCPELPPPEWGWRTASHGDLIRGTVLTYQCEPGYELLGSDILTCQWDLSWSAAPPACQKIMTCADPGEIANGHRTASDAGFPVGSHVQYRCLPGYSLEGAAMLTCYSRDTGTPKWSDRVPKCALSCL

SEQ ID NO: 1031238 - protein, 519 aa, Homo sapiens
MVRSGGSPLSPVIYDSDMDDVPERGLISDAQSLYVELLSETPANPLLLSLRFEAFEEDRCFAPFLAHGNVTTTDPEYRPGALATFSCLPGYALEPPGPPNAIECVDPTEPHWNDTEPACKAMCGGELSEPAGVVLSPDWPQSYSPGQDCVWGVHVQEEKRILLQVEILNVREGDMLTLFDGDGPSARVLAQLRGPQPRRRLLSSGPDLTLQFQAPPGPPNPGLGQGFVLHFKEVPRNDTCPELPPPEWGWRTASHGDLIRGTVLTYQCEPGYELLGSDILTCQWDLSWSAAPPACQKIMTCADPGEIANGHRTASDAGFPVGSHVQYRCLPGYSLEGAAMLTCYSRDTGTPKWSDRVPKCALKYEPCLNPGVPENGYQTLYKHHYQAGESLRFFCYEGFELIGEVTITCVPGHPSQWTSQPPLCKVAYEELLDNRKLEVTQTTDPSRQLEGGNLALAILLPLGLVIVLGSGVYIYYTKLQGKSLFGFSGSHSYSPITVESDFSNPLYEAGDTREYEVSI

SEQ ID NO: 1031239 - protein, 899 aa, Homo sapiens
MGTPRAQHPPPPQLLFLILLSCPWIQGLPLKEEEILPEPGSETPTVASEALAELLHGALLRRGPEMGYLPGSDPDPTLATPPAGQTLAVPSLPRATEPGTGPLTTAVTPNGVRGAGPTAPELLTPPPGTTAPPPPSPASPGPPLGPEGGEEETTTTIITTTTVTTTVTSPVLCNNNISEGEGYVESPDLGSPVSRTLGLLDCTYSIHVYPGYGIEIQVQTLNLSQEEELLVLAGGGSPGLAPRLLANSSMLGEGQVLRSPTNRLLLHFQSPRVPRGGGFRIHYQAYLLSCGFPPRPAHGDVSVTDLHPGGTATFHCDSGYQLQGEETLICLNGTRPSWNGETPSCMASCGGTIHNATLGRIVSPEPGGAVGPNLTCRWVIEAAEGRRLHLHFERVSLDEDNDRLMVRSGGSPLSPVIYDSDMDDVPERGLISDAQSLYVELLSETPANPLLLSLRFEAFEEDRCFAPFLAHGNVTTTDPEYRPGALATFSCLPGYALEPPGPPNAIECVDPTEPHWNDTEPACKAMCGGELSEPAGVVLSPDWPQSYSPGQDCVWGVHVQEEKRILLQVEILNVREGDMLTLFDGDGPSARVLAQLRGPQPRRRLLSSGPDLTLQFQAPPGPPNPGLGQGFVLHFKEVPRNDTCPELPPPEWGWRTASHGDLIRGTVLTYQCEPGYELLGSDILTCQWDLSWSAAPPACQKIMTCADPGEIANGHRTASDAGFPVGSHVQYRCLPGYSLEGAAMLTCYSRDTGTPKWSDRVPKCALKYEPCLNPGVPENGYQTLYKHHYQAGESLRFFCYEGFELIGEVTITCVPGHPSQWTSQPPLCKVAYEELLDNRKLEVTQTTDPSRQLEGGNLALAILLPLGLVIVLGSGVYIYYTTTRRASLCASSAMRALSL

SEQ ID NO: 1031240 - protein, 853 aa, Homo sapiens
MGTPRAQHPPPPQLLFLILLSCPWIQGLPLKEEEILPEPGSETPTVASEALAELLHGALLRRGPEMGYLPGPPLGPEGGEEETTTTIITTTTVTTTVTSPVLCNNNISEGEGYVESPDLGSPVSRTLGLLDCTYSIHVYPGYGIEIQVQTLNLSQEEELLVLAGGGSPGLAPRLLANSSMLGEGQVLRSPTNRLLLHFQSPRVPRGGGFRIHYQAYLLSCGFPPRPAHGDVSVTDLHPGGTATFHCDSGYQLQGEETLICLNGTRPSWNGETPSCMASCGGTIHNATLGRIVSPEPGGAVGPNLTCRWVIEAAEGRRLHLHFERVSLDEDNDRLMVRSGGSPLSPVIYDSDMDDVPERGLISDAQSLYVELLSETPANPLLLSLRFEAFEEDRCFAPFLAHGNVTTTDPEYRPGALATFSCLPGYALEPPGPPNAIECVDPTEPHWNDTEPACKAMCGGELSEPAGVVLSPDWPQSYSPGQDCVWGVHVQEEKRILLQVEILNVREGDMLTLFDGDGPSARVLAQLRGPQPRRRLLSSGPDLTLQFQAPPGPPNPGLGQGFVLHFKEVPRNDTCPELPPPEWGWRTASHGDLIRGTVLTYQCEPGYELLGSDILTCQWDLSWSAAPPACQKIMTCADPGEIANGHRTASDAGFPVGSHVQYRCLPGYSLEGAAMLTCYSRDTGTPKWSDRVPKCALKYEPCLNPGVPENGYQTLYKHHYQAGESLRFFCYEGFELIGEVTITCVPGHPSQWTSQPPLCKVAYEELLDNRKLEVTQTTDPSRQLEGGNLALAILLPLGLVIVLGSGVYIYYTKLQGKSLFGFSGSHSYSPITVESDFSNPLYEAGDTREYEVSI

SEQ ID NO: 1031241 - protein, 809 aa, Homo sapiens [sequence omitted]

SEQ ID NO: 1031242 - protein, 92 aa, Homo sapiens
PPPTVSGPPRSFLVNIVVIPPGLQEFGTSGTVLPLGLVIVLGSGVYIYYTKLQGKSLFGFSGSHSYSPITVESDFSNPLYEAGDTREYEVSI

SEQ ID NO: 1031243 - protein, 87 aa, Homo sapiens
MNLEPPKAEFRSATRVAGGPVTPRKGPPKFKQRQTRQFKSKPPKKGVQGFGDDIPGMEGLGTDITVICPWEAFNHLELHELAQYGII

SEQ ID NO: 1031244 - protein, 226 aa, Homo sapiens
LALEGTQHCPCFCAWEDPQAPKGGGGSLFGFRSSRCKGPGVGGVRCEATAAGEGQAAEGFGDHEGGPFRDQAGSGKAVGRPKTADTVVASIWKMGSCRSLAVQGHTSLPVPAPSAGCPSLEPLTAPVPLLSIPWTLVVVPPLGAQQSHEGGTETPNQLMKSEIKAGAGTLRREAQHSQHSPLRPALHLFGDDIPGMEGLGTDITVICPWEAFNHLELHELAQYGII

SEQ ID NO: 1031245 - protein, 118 aa, Homo sapiens
AETLSLLTTATDRSRRESRSQGCRGVSVSLTMNLEPPKAEFRSATRVAGGPVTPRKGPPKFKQRQTRQFKSKPPKKGVQGFGDDIPGMEGLGTDITVICPWEAFNHLELHELAQYGII

SEQ ID NO: 1031246 - protein, 87 aa, Homo sapiens; identical to SEQ ID NO: 1031243

SEQ ID NO: 1031247 - protein, 223 aa, Homo sapiens
RSDALGTRPVGAWRPIEAGVHGRPGLSPGSGPGDCRRIRAEGWGWRGRSLPLARSSGGRRGRGPRGEETQPRGWHARPGPGPRSTGAMLFSLRELVQWLGFATFEIFVHLLALLVFSVLLALRVDGLVPGLSWWNVFVPFFAADGLSTYFTTIVSVRLFQDGEKRLAVLRLFWVLTVLSLKFVFEMLLCQKLAEQTRELWFGLITSPLFILLQLLMIRACRVN

SEQ ID NO: 1031248 - protein, 223 aa, Homo sapiens; identical to SEQ ID NO: 1031247

SEQ ID NO: 1031249 - protein, 136 aa, Homo sapiens
MLFSLRELVQWLGFATFEIFVHLLALLVFSVLLALRVDGLVPGLSWWNVFVPFFAADGLSTYFTTIVSVRLFQDGEKRLAVLRLFWVLTVLSLKFVFEMLLCQKLAEQTRELWFGLITSPLFILLQLLMIRACRVN

SEQ ID NO: 1031250 - protein, 69 aa, Homo sapiens
TDIQPIVAHHAVLRLGDLDVTQGAVITGAVVAAVMWRRKSSDRKGGSYSQAASSDSAQGSDVSLTACKV

SEQ ID NO: 1031251 - protein, 113 aa, Homo sapiens
GSWETRPAGDGTFQKWVAVVVPSGQEQRYTCHVQHEGLPKPLTLRWEPSSQPTIPIVGIIAGLVLFGAVITGAVVAAVMWRRKSSDRKGGSYSQAASSDSAQGSDVSLTACKV

SEQ ID NO: 1031252 - protein, 364 aa, Homo sapiens
AGRLRASRPVRGPRRRSRRSRRSRSRPAARPEPRVPRPGSRLPETRPACPAQPPEKMRLLPEWFLLLFGPWLLRKAVSAQIPESGRPQYLGLRPAAAGAGAPGQQLPEPRSSDGLGVGRAWSWAWPTNHTGALARAGAAGALPAQRTKRKPSIKAARAKKIFGWGDFYFRVHTLKFSLLVTGKIVDHVNGTFSVYFRHNSSSLGNLSVSIVPPSKRVEFGGVWLPGPVPHPLQSTLALEGVLPGLGPPLGMAAAAAGPGLGGSLGGALAGPLGGALGVPGAKESRAFNCHVEYEKTNRARKHRPCLYDPSQVCFTEHTQSQAAWLCAKPFKVICIFVSFLSFDYKLVQKVCPDYNFQSEHPYFG

SEQ ID NO: 1031253 - protein, 364 aa, Homo sapiens; identical to SEQ ID NO: 1031252

SEQ ID NO: 1031254 - protein, 364 aa, Homo sapiens; identical to SEQ ID NO: 1031252

SEQ ID NO: 1031255 - protein, 318 aa, Homo sapiens
  misc_feature (282)..(282): Xaa can be any naturally occurring amino acid
  misc_feature (285)..(285): Xaa can be any naturally occurring amino acid
  misc_feature (287)..(287): Xaa can be any naturally occurring amino acid
  misc_feature (292)..(294): Xaa can be any naturally occurring amino acid
  misc_feature (298)..(298): Xaa can be any naturally occurring amino acid
  misc_feature (300)..(301): Xaa can be any naturally occurring amino acid
  misc_feature (307)..(307): Xaa can be any naturally occurring amino acid
  misc_feature (309)..(310): Xaa can be any naturally occurring amino acid
  misc_feature (312)..(312): Xaa can be any naturally occurring amino acid
AGRLRASRPVRGPRRRSRRSRRSRSRPAARPEPRVPRPGSRLPETRPACPAQPPEKMRLLPEWFLLLFGPWLLRKAVSAQIPESGRPQYLGLRPAAAGAGAPGQQLPEPRSSDGLGVGRAWSWAWPTNHTGALARAGAAGALPAQRTKRKPSIKAARAKKIFGWGDFYFRVHTLKFSLLVTGKIVDHVNGTFSVYFRHNSSSLGNLSVSIVPPSKRVEFGGVWLPGPVPHPLQSTLALEGVLPGLGPPLGMAAAAAGPGLGGSLGGALAGPLGGALGILRPXVRXSXTRSVXXXPRAXPXXVLYAPXRXXQXPRANKK

SEQ ID NO: 1031256 - protein, 300 aa, Homo sapiens
MRDNTNVYRKQAVSAQIPESGRPQYLGLRPAAAGAGAPGQQLPEPRSSDGLGVGRAWSWAWPTNHTGALARAGAAGALPAQRTKRKPSIKAARAKKIFGWGDFYFRVHTLKFSLLVTGKIVDHVNGTFSVYFRHNSSSLGNLSVSIVPPSKRVEFGGVWLPGPVPHPLQSTLALEGVLPGLGPPLGMAAAAAGPGLGGSLGGALAGPLGGALGVPGAKESRAFNCHVEYEKTNRARKHRPCLYDPSQVCFTEHTQSQAAWLCAKPFKVICIFVSFLSFDYKLVQKVCPDYNFQSEHPYFG

SEQ ID NO: 1031257 - protein, 874 aa, Homo sapiens
MLKKFDKKDEESGGGSNPFQHLEKSAVLQEARVFNETPINPRKCAHILTKILYLINQGEHLGTTEATEAFFAMTKLFQSNDPTLRRMCYLTIKEMSCIAEDVIIVTSSLTKDMTGKEDNYRGPAVRALCQITDSTMLQAIERYMKQAIVDKVPSVSSSALVSSLHLLKCSFDVVKRWVNEAQEAASSDNIMVQYHALGLLYHVRKNDRLAVNKMISKVTRHGLKSPFAYCMMIRVASKQLEEEDGSRDSPLFDFIESCLRNKHEMVVYEAASAIVNLPGCSAKELAPAVSVLQLFCSSPKAALRYAAVRTLNKVAMKHPSAVTACNLDLENLVTDSNRSIATLAITTLLKTGSESSIDRLMKQISSFMSEISDEFKVVVVQAISALCQKYPRKHAVLMNFLFTMLREEGGFEYKRAIVDCIISIIEENSESKETGLSHLCEFIEDCEFTVLATRILHLLGQEGPKTTNPSKYIRFIYNRVVLEHEEVRAGAVSALAKFGAQNEEMLPSILVLLKRCVMDDDNEVRDRATFYLNVLEQKQKALNAGYILNGLTVSIPGLERALQQYTLEPSEKPFDLKSVPLATAPMAEQRTESTPITAVKQPEKVAATRQEIFQEQLAAVPEFRGLGPLFKSSPEPVALTESETEYVIRCTKHTFTNHMVFQFDCTNTLNDQTLENVTVQMEPTEAYEVLCYVPARSLPYNQPGTCYTLVALPKEDPTAVACTFSCMMKFTVKDCDPTTGETDDEGYEDEYVLEDLEVTVADHIQKVMKLNFEAAWDEVGDEFEKEETFTLSTIKTLEEAVGNIVKFLGMHPCERSDKVPDNKNTHTLLLAGVFRGGHDILVRSRLLLLDTVTMQVTARSLEELPVDIILASVG

SEQ ID NO: 1031258 - protein, 213 aa, Homo sapiens
SGGPGSGPCRTTVAPLLRAAPVEHCVAALRPTDSTMLKKFDKKDEESGGGSNPFQHLEKSAVLQEARVFNETPINPRKCAHILTKILYLINQGEHLGTTEATEAFFAMTKLFQSNDVSASTQLSLRGGSCNKVVGGPKRAGPPVSVGCLCGDRRYLLPTLALGEPGLIGLFPPISQPTLRRMCYLTIKEMSCIAEDVIIVTSRQSMGVWGGSF

SEQ ID NO: 1031259 - protein, 891 aa, Homo sapiens
SGGPGSGPCRTTVAPLLRAAPVEHCVAALRPTDSTMLKKFDKKDEESGGGSNPFQHLEKSAVLQEARVFNETPINPRKCAHILTKILYLINQGEHLGTTEATEAFFAMTKLFQSNDPTLRRMCYLTIKEMSCIAEDVIIVTSSLTKDMTGKEDNYRGPAVRALCQITDSTMLQAIERYMKQAIVDKVPSVSSSALVSSLHLLKCSFDVVKRWVNEAQEAASSDNIMVQYHALGLLYHVRKNDRLAVNKMISKVTRHGLKSPFAYCMMIRVASKQLEEEDGSRDSPLFDFIESCLRNKHEMVVYEAASAIVNLPGCSAKELAPAVSVLQLFCSSPKAALRYAAVRTLNKVAMKHPSAVTACNLDLENLVTDSNRSIATLAITTLLKTGSESSIDRLMKQISSFMSEISDEFKVVVVQAISALCQKYPRKHAVLMNFLFTMLREEGGFEYKRAIVDCIISIIEENSESKETGLSHLCEFIEDCEFTVLATRILHLLGQEGPKTTNPSKYIRFIYNRVVLEHEEVRAGAVSALAKFGAQNEEMLPSILVLLKRCVMDDDNEVRDRATFYLNVLEQKQKALNAGYILNGLTVSIPGLERALQQYTLEPSERTESTPITAVKQPEKVAATRQEIFQEQLAAVPEFRGLGPLFKSSPEPVALTESETEYVIRCTKHTFTNHMVFQFDCTNTLNDQTLENVTVQMEPTEAYEVLCYVPARSLPYNQPGTCYTLVALPKEDPTAVACTFSCMMKFTVKDCDPTTGETDDEGYEDEYVLEDLEVTVADHIQKVMKLNFEAAWDEVGDEFEKEETFTLSTIKTLEEAVGNIVKFLGMHPCERSDKVPDNKNTHTLLLAGVFRGGHDILVRSRLLLLDTVTMQVTARSLEELPVDIILASVG

SEQ ID NO: 1031260 - protein, 874 aa, Homo sapiens; identical to SEQ ID NO: 1031257

SEQ ID NO: 1031261 - protein, 558 aa, Homo sapiens
SGGPGSGPCRTTVAPLLRAAPVEHCVAALRPTDSTMLKKFDKKDEESGGGSNPFQHLEKSAVLQEARVFNETPINPRKCAHILTKILYLINQGEHLGTTEATEAFFAMTKLFQSNDPTLRRMCYLTIKEMSCIAEDVIIVTSSLTKDMTGKEDNYRGPAVRALCQITDSTMLQAIERYMKQAIVDKVPSVSSSALVSSLHLLKCSFDVVKRWVNEAQEAASSDNIMVQYHALGLLYHVRKNDRLAVNKMISKVTRHGLKSPFAYCMMIRVASKQLEEEDGSRDSPLFDFIESCLRNKHEMVVYEAASAIVNLPGCSAKELAPAVSVLQLFCSSPKAALRYAAVRTLNKVAMKHPSAVTACNLDLENLVTDSNRSIATLAITTLLKTGSESSIDRLMKQISSFMSEISDEFKVVVVQAISALCQKYPRKHAVLMNFLFTMLREEGGFEYKRAIVDCIISIIEENSESKETGLSHLCEFIEDCEFTVLATRILHLLGQEGPKTTNPSKYIRFIYNRVVLEHEEVRAGAVSALAKFGAQNEEMLRSSARVPRSWAPLQVLA

SEQ ID NO: 1031262 - protein, 797 aa, Homo sapiens
SGGPGSGPCRTTVAPLLRAAPVEHCVAALRPTDSTMLKKFDKKDEESGGGSNPFQHLEKSAVLQEARVFNETPINPRKCAHILTKILYLINQGEHLGTTEATEAFFAMTKLFQSNDPTLRRMCYLTIKEMSCIAEDVIIVTSSLTKDMTGKEDNYRGPAVRALCQITDSTMLQAIERYMKQAIVDKVPSVSSSALVSSLHLLKCSFDVVKRWVNEAQEAASSDNIMVQYHALGLLYHVRKNDRLAVNKMISKVTRHGLKSPFAYCMMIRVASKQLEEEDGSRDSPLFDFIESCLRNKHEMVVYEAASAIVNLPGCSAKELAPAVSVLQLFCSSPKAALRYAAVRTLNKVAMKHPSAVTACNLDLENLVTDSNRSIATLAITTLLKTGSESSIDRLMKQISSFMSEISDEFKVVVVQAISALCQKYPRKHAVLMNFLFTMLREEGGFEYKRAIVDCIISIIEENSESKETGLSHLCEFIEDCEFTVLATRILHLLGQEGPKTTNPSKYIRFIYNRVVLEHEEVRAGAVSALAKFGAQNEEMLPSILVLLKRCVMDDDNEVRDRATFYLNVLEQKQKALNAGYILNGLTVSIPGLERALQQYTLEPSEKPFDLKSVPLATAPMAEQRTESTPITAVKQPEKVTAVACTFSCMMKFTVKDCDPTTGETDDEGYEDEYVLEDLEVTVADHIQKVMKLNFEAAWDEVGDEFEKEETFTLSTIKTLEEAVGNIVKFLGMHPCERSDKVPDNKNTHTLLLAGVFRGGHDILVRSRLLLLDTVTMQVTARSLEELPVDIILASVG

SEQ ID NO: 1031263 - protein, 909 aa, Homo sapiens
SGGPGSGPCRTTVAPLLRAAPVEHCVAALRPTDSTMLKKFDKKDEESGGGSNPFQHLEKSAVLQEARVFNETPINPRKCAHILTKILYLINQGEHLGTTEATEAFFAMTKLFQSNDPTLRRMCYLTIKEMSCIAEDVIIVTSSLTKDMTGKEDNYRGPAVRALCQITDSTMLQAIERYMKQAIVDKVPSVSSSALVSSLHLLKCSFDVVKRWVNEAQEAASSDNIMVQYHALGLLYHVRKNDRLAVNKMISKVTRHGLKSPFAYCMMIRVASKQLEEEDGSRDSPLFDFIESCLRNKHEMVVYEAASAIVNLPGCSAKELAPAVSVLQLFCSSPKAALRYAAVRTLNKVAMKHPSAVTACNLDLENLVTDSNRSIATLAITTLLKTGSESSIDRLMKQISSFMSEISDEFKVVVVQAISALCQKYPRKHAVLMNFLFTMLREEGGFEYKRAIVDCIISIIEENSESKETGLSHLCEFIEDCEFTVLATRILHLLGQEGPKTTNPSKYIRFIYNRVVLEHEEVRAGAVSALAKFGAQNEEMLPSILVLLKRCVMDDDNEVRDRATFYLNVLEQKQKALNAGYILNGLTVSIPGLERALQQYTLEPSEKPFDLKSVPLATAPMAEQRTESTPITAVKQPEKVAATRQEIFQEQLAAVPEFRGLGPLFKSSPEPVALTESETEYVIRCTKHTFTNHMVFQFDCTNTLNDQTLENVTVQMEPTEAYEVLCYVPARSLPYNQPGTCYTLVALPKEDPTAVACTFSCMMKFTVKDCDPTTGETDDEGYEDEYVLEDLEVTVADHIQKVMKLNFEAAWDEVGDEFEKEETFTLSTIKTLEEAVGNIVKFLGMHPCERSDKVPDNKNTHTLLLAGVFRGGHDILVRSRLLLLDTVTMQVTARSLEELPVDIILASVG

SEQ ID NO: 1031264 - protein, 909 aa, Homo sapiens; identical to SEQ ID NO: 1031263

SEQ ID NO: 1031265 - protein, 482 aa, Homo sapiens
GRLLLLNSRPRRLREEGGFEYKRAIVDCIISIIEENSESKETGLSHLCEFIEDCEFTVLATRILHLLGQEGPKTTNPSKYIRFIYNRVVLEHEEVRAGAVSALAKFGAQNEEMLPSILVLLKRCVMDDDNEVRDRATFYLNVLEQKQKALNAGYILNGLTVSIPGLERALQQYTLEPSEKPFDLKSVPLATAPMAEQRTESTPITAVKQPEKVAATRQEIFQEQLAAVPEFRGLGPLFKSSPEPVALTESETEYVIRCTKHTFTNHMVFQFDCTNTLNDQTLENVTVQMEPTEAYEVLCYVPARSLPYNQPGTCYTLVALPKEDPTAVACTFSCMMKFTVKDCDPTTGETDDEGYEDEYVLEDLEVTVADHIQKVMKLNFEAAWDEVGDEFEKEETFTLSTIKTLEEAVGNIVKFLGMHPCERSDKVPDNKNTHTLLLAGVFRGGHDILVRSRLLLLDTVTMQVTARSLEELPVDIILASVG

SEQ ID NO: 1031266 - protein, 843 aa, Homo sapiens
SGGPGSGPCRTTVAPLLRAAPVEHCVAALRPTDSTMLKKFDKKDEESGGGSNPFQHLEKSAVLQEARVFNETPINPRKCAHILTKILYLINQGEHLGTTEATEAFFAMTKLFQSNDPTLRRMCYLTIKEMSCIAEDVIIVTSSLTKDMTGKEDNYRGPAVRALCQITDSTMLQAIERYMKQAIVDKVPSVSSSALVSSLHLLKCSFDVVKRWVNEAQEAASSDNIMVQYHALGLLYHVRKNDRLAVNKMISKVTRHGLKSPFAYCMMIRVASKQLEEEDGSRDSPLFDFIESCLRNKHEMVVYEAASAIVNLPGCSAKELAPAVSVLQLFCSSPKAALRYAAVRTLNKVAMKHPSAVTACNLDLENLVTDSNRSIATLAITTLLKTGSESSIDRLMKQISSFMSEISDEFKVVVVQAISALCQKYPRKHAVLMNFLFTMLREEGGFEYKRAIVDCIISIIEENSESKETGLSHLCEFIEDCEFTVLATRILHLLGQEGPKTTNPSKYIRFIYNRVVLEHEEVRAGAVSALAKFGAQNEEMLPSILVLLKRCVMDDDNEVRDRATFYLNVLEQKQKALNAGYILNGLTVSIPGLERALQQYTLEPSEKPFDLKSVPLATAPMAEQRTESTPITAVKQPEKVAATRQEIFQEQLAAVPEFRGLGPLFKSSPEPVALTESETEYVIRCTKHTFTNHMVFQFDCTNTLNDQTLENVTVQMEPTEAYEVLCYVPARSLPYNQPGTCYTLVALPKEDPTAVACTFSCMMKFTVKDCDPTTGETDDEGYEDEYVLEDLEVTVADHIQKVMKLNFEAAWDEVGDEFEKEETFTLSTIKTLEGKILGMPSLA

SEQ ID NO: 1031267 - protein, 359 aa, Homo sapiens
SGGPGSGPCRTTVAPLLRAAPVEHCVAALRPTDSTMLKKFDKKDEESGGGSNPFQHLEKSAVLQEARVFNETPINPRKCAHILTKILYLINQGEHLGTTEATEAFFAMTKLFQSNDPTLRRMCYLTIKEMSCIAEDVIIVTSSLTKDMTGKEDNYRGPAVRALCQITDSTMLQAIERYMKQAIVDKVPSVSSSALVSSLHLLKCSFDVVKRWVNEAQEAASSDNIMVQYHALGLLYHVRKNDRLAVNKMISKVTRHGLKSPSSSPRLSPWPSPSQRRSMSSAAPNTPSPTTWFFSLTAQTHSMTRPWRMSQCRWSPLRPMRCSVTCLPGACPTTSPGPATHWWHCPKKTPQLWPAHSAA

SEQ ID NO: 1031268 - protein, 559 aa, Homo sapiens
SGGPGSGPCRTTVAPLLRAAPVEHCVAALRPTDSTMLKKFDKKDEESGGGSNPFQHLEKSAVLQEARVFNETPINPRKCAHILTKILYLINQGEHLGTTEATEAFFAMTKLFQSNDPTLRRMCYLTIKEMSCIAEDVIIVTSSLTKDMTGKEDNYRGPAVRALCQITDSTMLQAIERYMKQAIVDKVPSVSSSALVSSLHLLKCSFDVVKRWVNEAQEAASSDNIMVQYHALGLLYHVRKNDRLAVNKMISKVTRHGLKSPFAYCMMIRVASKQLEEEDGSRDSPLFDFIESCLRNKHEMVVYEAASAIVNLPGCSAKELAPAVSVLQLFCSSPKAALRYAAVRTLNKVAMKHPSAVTACNLDLENLVTDSNRSIATLAITTLLKTGSESSIDRLMKQISSFMSEISDEFKVVVVQAISALCQKYPRKHAVLMNFLFTMLREEGGFEYKRAIVDCIISIIEENSESKETGLSHLCEFIEDCEFTVLATRILHLLGQEGPKTTNPSKYIRFIYNRVVLEHEEPALQPARDLLHTGGTAQRRPHSCGLHIQLHDEVHCQGL

SEQ ID NO: 1031269 - protein, 172 aa, Homo sapiens
SSALLDPDDLPKEDPTAVACTFSCMMKFTVKDCDPTTGETDDEGYEDEYVLEDLEVTVADHIQKVMKLNFEAAWDEVGDEFEKEETFTLSTIKTLEEAVGNIVKFLGMHPCERSDKVPDNKNTHTLLLAGVFRGGHDILVRSRLLLLDTVTMQVTARSLEELPVDIILASVG

SEQ ID NO: 1031270 - protein, 909 aa, Homo sapiens; identical to SEQ ID NO: 1031263

SEQ ID NO: 1031271 - protein, 933 aa, Homo sapiens
SGGPGSGPCRTTVAPLLRAAPVEHCVAALRPTDSTMLKKFDKKDEESGGGSNPFQHLEKSAVLQEARVFNETPINPRKCAHILTKILYLINQGEHLGTTEATEAFFAMTKLFQSNDPTLRRMCYLTIKEMSCIAEDVIIVTSSLTKDMTGKEDNYRGPAVRALCQITDSTMLQAIERYMKQAIVDKVPSVSSSALVSSLHLLKCSFDVVKRWVNEAQEAASSDNIMVQYHALGLLYHVRKNDRLAVNKMISKVTRHGLKSPFAYCMMIRVASKQLEEEDGSRDSPLFDFIESCLRNKHEMVVYEAASAIVNLPGCSAKELAPAVSVLQLFCSSPKAALRYAAVRTLNKVAMKHPSAVTACNLDLENLVTDSNRSIATLAITTLLKTGSESSIDRLMKQISSFMSEISDEFKVVVVQAISALCQKYPRKHAVLMNFLFTMLREEGGFEYKRAIVDCIISIIEENSESKETGLSHLCEFIEDCEFTVLATRILHLLGQEGPKTTNPSKYIRFIYNRVVLEHEEVRAGAVSALAKFGAQNEEMLPSILVLLKRCVMDDDNEVRDRATFYLNVLEQKQKALNAGYILNGLTVSIPGLERALQQYTLEPSEKPFDLKSVPLATAPMAEQRTESTPITAVKQPEKVAATRQEIFQEQLAAVPEFRGLGPLFKSSPEPVALTESETEYVIRCTKHTFTNHMVFQFDCTNTLNDQTLENVTVQMEPTEAYEVLCYVPARSLPYNQPGTCYTLVALPKEDPTAVACTFSCMMKFTVKDCDPTTGETDDEGYEDEYVSTVEDGRTFLELEMTPRQELLYDQLEDLEVTVADHIQKVMKLNFEAAWDEVGDEFEKEETFTLSTIKTLEEAVGNIVKFLGMHPCERSDKVPDNKNTHTLLLAGVFRGGHDILVRSRLLLLDTVTMQVTARSLEELPVDIILASVG

SEQ ID NO: 1031272 - protein, 913 aa, Homo sapiens
SGGPGSGPCRTTVAPLLRAAPVEHCVAALRPTDSTMLKKFDKKDEESGGGSNPFQHLEKSAVLQEARVFNETPINPRKCAHILTKILYLINQGEHLGTTEATEAFFAMTKLFQSNDPTLRRMCYLTIKEMSCIAEDVIIVTSSLTKDMTGKEDNYRGPAVRALCQITDSTMLQAIERYMKQAIVDKVPSVSSSALVSSLHLLKCSFDVVKRWVNEAQEAASSDNIMVQYHALGLLYHVRKNDRLAVNKMISKVTRHGLKSPFAYCMMIRVASKQLEEEDGSRDSPLFDFIESCLRNKHEMVVYEAASAIVNLPGCSAKELAPAVSVLQLFCSSPKAALRYAAVRTLNKVAMKHPSAVTACNLDLENLVTDSNRSIATLAITTLLKTGSESSIDRLMKQISSFMSEISDEFKVVVVQAISALCQKYPRKHAVLMNFLFTMLREEGGFEYKRAIVDCIISIIEENSESKETGLSHLCEFIEDCEFTVLATRILHLLGQEGPKTTNPSKYIRFIYNRVVLEHEEVRAGAVSALAKFGAQNEEMLPSILVLLKRCVMDDDNEVRDRATFYLNVLEQKQKALNAGYILNGLTVSIPGLERALQQYTLEPSEKPFDLKSVPLATAPMAEQRTESTPITAVKQPEKVAATRQEIFQEQLAAVPEFRGLGPLFKSSPEPVALTESETEYVIRCTKHTFTNHMVFQFDCTNTLNDQTLENVTVQMEPTEAYEVLCYVPARSLPYNQPGTCYTLVALPKEDPTAVACTFSCMMKFTVKDCDPTTGETDDEGYEDEYVLEDLEVTVADHIQKVMKLNFEAAWDEVGDEFEKEETFTLSTIKTLEEAVGNIVKFLGMHPCERSDKVPDNKNTHTLLLAGVFRGGHDILVRSRLLLLDTVTMQVTARSLEELPVDIILASVVGGGE

SEQ ID NO: 1031273 - protein, 559 aa, Homo sapiens; identical to SEQ ID NO: 1031268

SEQ ID NO: 1031274 - protein, 443 aa, Homo sapiens
MRSQVEAPTHSSTLRRVRYSRRPVYLMKLPSTLGNVPTSSPRFFIYNRVVLEHEEVRAGAVSALAKFGAQNEEMLPSILVLLKRCVMDDDNEVRDRATFYLNVLEQKQKALNAGYILNGLTVSIPGLERALQQYTLEPSEKPFDLKSVPLATAPMAEQRTESTPITAVKQPEKVAATRQEIFQEQLAAVPEFRGLGPLFKSSPEPVALTESETEYVIRCTKHTFTNHMVFQFDCTNTLNDQTLENVTVQMEPTEAYEVLCYVPARSLPYNQPGTCYTLVALPKEDPTAVACTFSCMMKFTVKDCDPTTGETDDEGYEDEYVLEDLEVTVADHIQKVMKLNFEAAWDEVGDEFEKEETFTLSTIKTLEEAVGNIVKFLGMHPCERSDKVPDNKNTHTLLLAGVFRGGHDILVRSRLLLLDTVTMQVTARSLEELPVDIILASVG

SEQ ID NO: 1031275 - protein, 668 aa, Homo sapiens
SGGPGSGPCRTTVAPLLRAAPVEHCVAALRPTDSTMLKKFDKKDEESGGGSNPFQHLEKSAVLQEARVFNETPINPRKCAHILTKILYLINQGEHLGTTEATEAFFAMTKLFQSNDPTLRRMCYLTIKEMSCIAEDVIIVTSSLTKDMTGKEDNYRGPAVRALCQITDSTMLQAIERYMKQAIVDKVPSVSSSALVSSLHLLKCSFDVVKRWVNEAQEAASSDNIMVQYHALGLLYHVRKNDRLAVNKMISKVTRHGLKSPFAYCMMIRVASKQLEEEDGSRDSPLFDFIESCLRNKHEMVVYEAASAIVNLPGCSAKELAPAVSVLQLFCSSPKAALRYAAVRTLNKVAMKHPSAVTACNLDLENLVTDSNRSIATLAITTLLKTGSESSIDRLMKQISSFMSEISDEFKVVVVQAISALCQKYPRKHAVLMNFLFTMLREEGGFEYKRAIVDCIISIIEENSESKETGLSHLCEFIEDCEFTVLATRILHLLGQEGPKTTNPSKYIRFIYNRVVLEHEEVRAGAVSALAKFGAQNEEMLPSILVLLKRCVMDDDNEVRDRATFYLNVLEQKQKALNAGYILNGLTVSIPGLERALQQYTLEPSEKPFDLKSVPLATAPMAEQRTESTPITAVKQPEKVAATRQEIFQEQLAAVPEFRGLGPSAVLG

SEQ ID NO: 1031276 - protein, 550 aa, Homo sapiens
SGGPGSGPCRTTVAPLLRAAPVEHCVAALRPTDSTMLKKFDKKDEESGGGSNPFQHLEKSAVLQEARVFNETPINPRKCAHILTKILYLINQGEHLGTTEATEAFFAMTKLFQSNDPTLRRMCYLTIKEMSCIAEDVIIVTSSLTKDMTGKEDNYRGPAVRALCQITDSTMLQAIERYMKQAIVDKVPSVSSSALVSSLHLLKCSFDVVKRWVNEAQEAASSDNIMVQYHALGLLYHVRKNDRLAVNKMISKVTRHGLKSPFAYCMMIRVASKQLEEEDGSRDSPLFDFIESCLRNKHEMVVYEAASAIVNLPGCSAKELAPAVSVLQLFCSSPKAALRYAAVRTLNKVAMKHPSAVTACNLDLENLVTDSNRSIATLAITTLLKTGSESSIDRLMKQISSFMSEISDEFKVVVVQAISALCQKYPRKHAVLMNFLFTMLREEGGFEYKRAIVDCIISIIEENSESKETGLSHLCEFIEDCEFTVLATRILHLLGQEGPKTTNPSKYIRFIYNRVVLEHEEVRAGAVSALAKFGAQNEEMLPSILVLLKR

SEQ ID NO: 1031277 - protein, 874 aa, Homo sapiens; identical to SEQ ID NO: 1031257

SEQ ID NO: 1031278 - protein, 955 aa, Homo sapiens
SGARGAGFSAAAARAAAMLWPRLAAAEWAALAWELLGASVLLIAVRWLVRRLGPRPGGLGRSGTPVPPPSAAAAPASGEMTMDALLARLKLLNPDDLREEIVKAGLKCGPITSTTRFIFEKKLAQALLEQGGRLSSFYHHEAGVTALSQDPQRILKPAEGNPTDQAGFSEDRDFGYSVGLNPPEEEAVTSKTCSVPPSDTDTYRAGATASKEPPLYYGVCPVYEDVPARNERIYVYENKKEALQAVKMIKGSRFKAFSTREDAEKFARGICDYFPSPSKTSLPLSPVKTAPLFSNDRLKDGLCLSESETVNKERANSYKNPRTQDLTAKLRKAVEKGEEDTFSDLIWSNPRYLIGSGDNPTIVQEGCRYNVMHVAAKENQASICQLTLDVLENPDFMRLMYPDDDEAMLQKRIRYVVDLYLNTPDKMGYDTPLHFACKFGNADVVNVLSSHHLIVKNSRNKYDKTPEDVICERSKNKSVELKERIREYLKGHYYVPLLRAEETSSPVIGELWSPDQTAEASHVSRYGGSPRDPVLTLRAFAGPLSPAKAEDFRKLWKTPPREKAGFLHHVKKSDPERGFERVGRELAHELGYPWVEYWEFLGCFVDLSSQEGLQRLEEYLTQQEIGKKAQQETGEREASCRDKATTSGSNSISVRAFLDEDDMSLEEIKNRQNAARNNSPPTVGAFGHTRCSAFPLEQEADLIEAAEPGGPHSSRNGLCHPLNHSRTLAGKRPKAPRGEEAHLPPVSDLTVEFDKLNLQNIGRSVSKTPDESTKTKDQILTSRINAVERDLLEPSPADQLGNGHRRTESEMSARIAKMSLSPSSPRHEDQLEVTREPARRLFLFGEEPSKLDQDVLAALECADVDPHQFPAVHRWKSAVLCYSPSDRQSWPSPAVKGRFKSQLPDLSGPHSYSPGRNSVAGSNPAKPGLGSPGRYSPVHGSQLRRMARLAELAAL

SEQ ID NO: 1031279 - protein, 876 aa, Homo sapiens
MTMDALLARLKLLNPDDLREEIVKAGLKCGPITSTTRFIFEKKLAQALLEQGGRLSSFYHHEAGVTALSQDPQRILKPAEGNPTDQAGFSEDRDFGYSVGLNPPEEEAVTSKTCSVPPSDTDTYRAGATASKEPPLYYGVCPVYEDVPARNERIYVYENKKEALQAVKMIKGSRFKAFSTREDAEKFARGICDYFPSPSKTSLPLSPVKTAPLFSNDRLKDGLCLSESETVNKERANSYKNPRTQDLTAKLRKAVEKGEEDTFSDLIWSNPRYLIGSGDNPTIVQEGCRYNVMHVAAKENQASICQLTLDVLENPDFMRLMYPDDDEAMLQKRIRYVVDLYLNTPDKMGYDTPLHFACKFGNADVVNVLSSHHLIVKNSRNKYDKTPEDVICERSKNKSVELKERIREYLKGHYYVPLLRAEETSSPVIGELWSPDQTAEASHVSRYGGSPRDPVLTLRAFAGPLSPAKAEDFRKLWKTPPREKAGFLHHVKKSDPERGFERVGRELAHELGYPWVEYWEFLGCFVDLSSQEGLQRLEEYLTQQEIGKKAQQETGEREASCRDKATTSGSNSISVRAFLDEDDMSLEEIKNRQNAARNNSPPTVGAFGHTRCSAFPLEQEADLIEAAEPGGPHSSRNGLCHPLNHSRTLAGKRPKAPRGEEAHLPPVSDLTVEFDKLNLQNIGRSVSKTPDESTKTKDQILTSRINAVERDLLEPSPADQLGNGHRRTESEMSARIAKMSLSPSSPRHEDQLEVTREPARRLFLFGEEPSKLDQDVLAALECADVDPHQFPAVHRWKSAVLCYSPSDRQSWPSPAVKGRFKSQLPDLSGPHSYSPGRNSVAGSNPAKPGLGSPGRYSPVHGSQLRRMARLAELAAL

SEQ ID NO: 1031280 - protein, 664 aa, Homo sapiens
MDLISKNTYGLCLSESETVNKERANSYKNPRTQDLTAKLRKAVEKGEEDTFSDLIWSNPRYLIGSGDNPTIVQEGCRYNVMHVAAKENQASICQLTLDVLENPDFMRLMYPDDDEAMLQKRIRYVVDLYLNTPDKMGYDTPLHFACKFGNADVVNVLSSHHLIVKNSRNKYDKTPEDVICERSKNKSVELKERIREYLKGHYYVPLLRAEETSSPVIGELWSPDQTAEASHVSRYGGSPRDPVLTLRAFAGPLSPAKAEDFRKLWKTPPREKAGFLHHVKKSDPERGFERVGRELAHELGYPWVEYWEFLGCFVDLSSQEGLQRLEEYLTQQEIGKKAQQETGEREASCRDKATTSGSNSISVRAFLDEDDMSLEEIKNRQNAARNNSPPTVGAFGHTRCSAFPLEQEADLIEAAEPGGPHSSRNGLCHPLNHSRTLAGKRPKAPRGEEAHLPPVSDLTVEFDKLNLQNIGRSVSKTPDESTKTKDQILTSRINAVERDLLEPSPADQLGNGHRRTESEMSARIAKMSLSPSSPRHEDQLEVTREPARRLFLFGEEPSKLDQDVLAALECADVDPHQFPAVHRWKSAVLCYSPSDRQSWPSPAVKGRFKSQLPDLSGPHSYSPGRNSVAGSNPAKPGLGSPGRYSPVHGSQLRRMARLAELAAL

SEQ ID NO: 1031281 - protein, 955 aa, Homo sapiens; identical to SEQ ID NO: 1031278

SEQ ID NO: 1031282 - protein, 860 aa, Homo sapiens
SGARGAGFSAAAARAAAMLWPRLAAAEWAALAWELLGASVLLIAVRWLVRRLGPRPGGLGRSGTPVPPPSAAAAPASGEMTMDALLARLKLLNPDDLREEIVKAGLKCGPITSTTRFIFEKKLAQALLEQGGRLSSFYHHEAGVTALSQDPQRILKPAEGNPTDQAGFSEDRDFGYSVGLNPPEEEAVTSKTCSVPPSDTDTYRAGATASKEPPLYYGVCPVYEDVPARNERIYVYENKKEALQAVKMIKGSRFKAFSTREDAEKFARGICDYFPSPSKTSLPLSPVKTAPLFSNDRLKDGLCLSESETVNKERANSYKNPRTQDLTAKLRKAVEKGEEDTFSDLIWSNPRYLIGSGDNPTIVQEGCRYNVMHVAAKENQASICQLTLDVLENPDFMRLMYPDDDEAMLQKRIRYVVDLYLNTPDKMGYDTPLHFACKFGNADVVNVLSSHHLIVKNSRNKYDKTPEDVICERSKNKSVELKERIREYLKGHYYVPLLRAEETSSPVIGELWSPDQTAEASHVSRYGGSPRDPVLTLRAFAGPLSPAKAEDFRKLWKTPPREKAGFLHHVKKSDPERGFERVGRELAHELGYPWVEYWEFLGCFVDLSSQEGLQRLEEYLTQQEIGKKAQQETGEREASCRDKATTSGSNSISVRAFLDEDDMSLEEIKNRQNAARNNSPPTVGAFGHTRCSAFPLEQEADLIEAAEPGGPHSSRNGLCHPLNHSRTLAGKRPKAPRGEEAHLPPVSDLTVEFDKLNLQNIGRSVSKTPDESTKTKDQILTSSLSCQISVALTATVRGETAWLEATPQSQAWAVLGATAPCTGASSAGWRAWLSLPPCRLGAGLSVCSSFLKKEGSYVYC

SEQ ID NO: 1031283 - protein, 955 aa, Homo sapiens; identical to SEQ ID NO: 1031278

SEQ ID NO: 1031284 - protein, 955 aa, Homo sapiens; identical to SEQ ID NO: 1031278

SEQ ID NO: 1031285 - protein, 585 aa, Homo sapiens
SGARGAGFSAAAARAAAMLWPRLAAAEWAALAWELLGASVLLIAVRWLVRRLGPRPGGLGRSGTPVPPPSAAAAPASGEMTMDALLARLKLLNPDDLREEIVKAGLKCGPITSTTRFIFEKKLAQALLEQGGRLSSFYHHEAGVTALSQDPQRILKPAEGNPTDQAGFSEDRDFGYSVGLNPPEEEAVTSKTCSVPPSDTDTYRAGATASKEPPLYYGVCPVYEDVPARNERIYVYENKKEALQAVKMIKGSRFKAFSTREDAEKFARGICDYFPSPSKTSLPLSPVKTAPLFSNDRLKDGLCLSESETVNKERANSYKNPRTQDLTAKLRKAVEKGEEDTFSDLIWSNPRYLIGSGDNPTIVQEGCRYNVMHVAAKENQASICQLTLDVLENPDFMRLMYPDDDEAMLQKRIRYVVDLYLNTPDKMGYDTPLHFACKFGNADVVNVLSSHHLIVKNSRNKYDKTPEDVICERSKNKSVELKERIREYLKGHYYVPLLRAEETSSPVIGELWSPDQTAEASHVSRYGGSPRDPVLTLRAFAGPLSPAKAEDFRKLWKTPPREKAGFLHHVKKSDPERGFERVGRY

SEQ ID NO: 1031286 - protein, 482 aa, Homo sapiens
SGARGAGFSAAAARAAAMLWPRLAAAEWAALAWELLGASVLLIAVRWLVRRLGPRPGGLGRSGTPVPPPSAAAAPASGEMTMDALLARLKLLNPDDLREEIVKAGLKCGPITSTTRFIFEKKLAQALLEQGGRLSSFYHHEAGVTALSQDPQRILKPAEGNPTDQAGFSEDRDFGYSVGLNPPEEEAVTSKTCSVPPSDTDTYRAGATASKEPPLYYGVCPVYEDVPARNERIYVYENKKEALQAVKMIKGSRFKAFSTREDAEKFARGICDYFPSPSKTSLPLSPVKTAPLFSNDRLKDGLCLSESETVNKERANSYKNPRTQDLTAKLRKAVEKGEEDTFSDLIWSNPRYLIGSGDNPTIVQEGCRYNVMHVAAKENQASICQLTLDVLENPDFMRLMYPDDDEAMLQKRIRYVVDLYLNTPDKMGYDTPLHFACKFGNADVVNVLSSHHLIVKNSRNKYDKTPEDELHLDPASQQKVCV

SEQ ID NO: 1031287 - protein, 708 aa, Homo sapiens
MIKGSRFKAFSTREDAEKFARGICDYFPSPSKTSLPLSPVKTAPLFSNDRLKDGLCLSESETVNKERANSYKNPRTQDLTAKLRKAVEKGEEDTFSDLIWSNPRYLIGSGDNPTIVQEGCRYNVMHVAAKENQASICQLTLDVLENPDFMRLMYPDDDEAMLQKRIRYVVDLYLNTPDKMGYDTPLHFACKFGNADVVNVLSSHHLIVKNSRNKYDKTPEDVICERSKNKSVELKERIREYLKGHYYVPLLRAEETSSPVIGELWSPDQTAEASHVSRYGGSPRDPVLTLRAFAGPLSPAKAEDFRKLWKTPPREKAGFLHHVKKSDPERGFERVGRELAHELGYPWVEYWEFLGCFVDLSSQEGLQRLEEYLTQQEIGKKAQQETGEREASCRDKATTSGSNSISVRAFLDEDDMSLEEIKNRQNAARNNSPPTVGAFGHTRCSAFPLEQEADLIEAAEPGGPHSSRNGLCHPLNHSRTLAGKRPKAPRGEEAHLPPVSDLTVEFDKLNLQNIGRSVSKTPDESTKTKDQILTSRINAVERDLLEPSPADQLGNGHRRTESEMSARIAKMSLSPSSPRHEDQLEVTREPARRLFLFGEEPSKLDQDVLAALECADVDPHQFPAVHRWKSAVLCYSPSDRQSWPSPAVKGRFKSQLPDLSGPHSYSPGRNSVAGSNPAKPGLGSPGRYSPVHGSQLRRMARLAELAAL

SEQ ID NO: 1031288 - protein, 955 aa, Homo sapiens; identical to SEQ ID NO: 1031278

SEQ ID NO: 1031289 - protein, 636 aa, Homo sapiens
SGARGAGFSAAAARAAAMLWPRLAAAEWAALAWELLGASVLLIAVRWLVRRLGPRPGGLGRSGTPVPPPSAAAAPASGEMTMDALLARLKLLNPDDLREEIVKAGLKCGPITSTTRFIFEKKLAQALLEQGGRLSSFYHHEAGVTALSQDPQRILKPAEGNPTDQAGFSEDRDFGYSVGLNPPEEEAVTSKTCSVPPSDTDTYRAGATASKEPPLYYGVCPVYEDVPARNERIYVYENKKEALQAVKMIKGSRFKAFSTREDAEKFARGICDYFPSPSKTSLPLSPVKTAPLFSNDRLKDGLCLSESETVNKERANSYKNPRTQDLTAKLRKAVEKGEEDTFSDLIWSNPRYLIGSGDNPTIVHLTKMNYLPPCLFLGWGVASDGGRVPVGPHSSRNGLCHPLNHSRTLAGKRPKAPRGEEAHLPPVSDLTVEFDKLNLQNIGRSVSKTPDESTKTKDQILTSRINAVERDLLEPSPADQLGNGHRRTESEMSARIAKMSLSPSSPRHEDQLEVTREPARRLFLFGEEPSKLDQDVLAALECADVDPHQFPAVHRWKSAVLCYSPSDRQSWPSPAVKGRFKSQLPDLSGPHSYSPGRNSVAGSNPAKPGLGSPGRYSPVHGSQLRRMARLAELAAL

SEQ ID NO: 1031290 - protein, 488 aa, Homo sapiens
MVICERSKNKSVELKERIREYLKGHYYVPLLRAEETSSPVIGELWSPDQTAEASHVSRYGGSPRDPVLTLRAFAGPLSPAKAEDFRKLWKTPPREKAGFLHHVKKSDPERGFERVGRELAHELGYPWVEYWEFLGCFVDLSSQEGLQRLEEYLTQQEIGKKAQQETGEREASCRDKATTSGSNSISVRAFLDEDDMSLEEIKNRQNAARNNSPPTVGAFGHTRCSAFPLEQEADLIEAAEPGGPHSSRNGLCHPLNHSRTLAGKRPKAPRGEEAHLPPVSDLTVEFDKLNLQNIGRSVSKTPDESTKTKDQILTSRINAVERDLLEPSPADQLGNGHRRTESEMSARIAKMSLSPSSPRHEDQLEVTREPARRLFLFGEEPSKLDQDVLAALECADVDPHQFPAVHRWKSAVLCYSPSDRQSWPSPAVKGRFKSQLPDLSGPHSYSPGRNSVAGSNPAKPGLGSPGRYSPVHGSQLRRMARLAELAAL

SEQ ID NO: 1031291 - protein, 955 aa, Homo sapiens; identical to SEQ ID NO: 1031278

SEQ ID NO: 1031292 - protein, 597 aa, Homo sapiens
SGARGAGFSAAAARAAAMLWPRLAAAEWAALAWELLGASVLLIAVRWLVRRLGPRPGGLGRSGTPVPPPSAAAAPASGEMTMDALLARLKLLNPDDLREEIVKAGLKCGPITSTTRFIFEKKLAQALLEQGGRLSSFYHHEAGVTALSQDPQRILKPAEGNPTDQAGFSEDRDFGYSVGLNPPEEEAVTSKTCSVPPSDTDTYRAGATASKEPPLYYGVCPVYEDVPARNERIYVYENKKEALQAVKMIKGSRFKAFSTREDAEKFARGICDYFPSPSKTSLPLSPVKTAPLFSNDRLKDGLCLSESETVNKERANSYKNPRTQDLTAKLRKAVEKGEEDTFSDLIWSNPRYLIGSGDNPTIVQEGCRYNVMHVAAKENQASICQLTLDVLENPDFMRLMYPDDDEAMLQKRIRYVVDLYLNTPDKMGYDTPLHFACKFGNADVVNVLSSHHLIVKNSRNKYDKTPEDVICERSKNKSVELKERIREYLKGHYYVPLLRAEETSSPVIGELWSPDQTAEASHVSRYGGSPRDPVLTLRAFAGPLSPAKVSCCRSFWKWCLAVPILCCWVFQPVALCVVSGTMSFGAPRLSSSQTIHQ

SEQ ID NO: 1031293 - protein, 635 aa, Homo sapiens
RDCSEERPGRAPPPPAFPRQPAAAAMDALLGTGPRRARGCLGAAGPTSSGRAARTPAAPWARFSAWLECVCVVTFDLELGQALELVYPNDFRLTDKEKSSICYLSFPDSHSGCLGDTQFSFRMRQCGGQRSPWHADDRHYNSRAPVALQREPAHYFGYVYFRQVKDSSVKRGYFQKSLVLVSRLPFVRLFQALLSLIAPEYFDKLAPCLEAVCSEIDQWPAPAPGQTLNLPVMGVVVQVRIPSRVDKSESSPPKQFDQENLLPAPVVLASVHELDLFRCFRPVLTHMQTLWELMLLGEPLLVLAPSPDVSSEMVLALTSCLQPLRFCCDFRPYFTIHDSEFKEFTTRTQAPTGPTSSESGSPRCQVRLPVRCRGCCSEASLSVGPPQSPWGWPELRALRPGHRACLVGDLPKQVKLKKPFKVEDPGHQARPLHRYTAHLHRDKALLKRLLKGVQKKRPSDVQSALLRRHLLELTQSFIIPLEHYMASLMPLQKSITPWKTPPQIQPFSQDDFLRSLEHAGPQLTCILKGDWLGLYRRFFKSPHFDGWYRQRHKEMALKLEALHLEAICEANIETWMKDKSEVEVVDLVLKLREKLVRAQGHQLPVKEATLQRAQLYIETVIGSLPKDLQAVLCPP

SEQ ID NO: 1031294 - protein, 610 aa, Homo sapiens
RDCSEERPGRAPPPPAFPRQPAAAAMDALLGTGPRRARGCLGAAGPTSSGRAARTPAAPWARFSAWLECVCVVTFDLELGQALELVYPNDFRLTDKEKSSICYLSFPDSHSGCLGDTQFSFRMRQCGGQRSPWHADDRHYNSRAPVALQREPAHYFGYVYFRQVKDSSVKRGYFQKSLVLVSRLPFVRLFQALLSLIAPEYFDKLAPCLEAVCSEIDQWPAPAPGQTLNLPVMGVVVQVRIPSRVDKSESSPPKQFDQENLLPAPVVLASVHELDLFRCFRPVLTHMQTLWELMLLGEPLLVLAPSPDVSSEMVLALTSCLQPLRFCCDFRPYFTIHDSEFKEFTTRTQAPPNVVLGVTNPFFIKTLQHWPHILRVGEPKMSGDLPKQVKLKKPSRLKTLDTKPGLYTAYTAHLHRDKALLKRLLKGVQKKRPSDVQSALLRRHLLELTQSFIIPLEHYMASLMPLQKSITPWKTPPQIQPFSQDDFLRSLEHAGPQLTCILKGDWLGLYRRFFKSPHFDGWYRQRHKEMALKLEALHLEAICEANIETWMKDKSEVEVVDLVLKLREKLVRAQGHQLPVKEATLQRAQLYIETVIGSLPKDLQAVLCPP

SEQ ID NO: 1031295 - protein, 656 aa, Homo sapiens
RDCSEERPGRAPPPPAFPRQPAAAAMDALLGTGPRRARGCLGAAGPTSSGRAARTPAAPWARFSAWLECVCVVTFDLELGQALELVYPNDFRLTDKEKSSICYLSFPDSHSGCLGDTQFSFRMRQCGGQRSPWHADDRHYNSRAPVALQREPAHYFGYVYFRQVKDSSVKRGYFQIRRSWGSCPVKLVGRATLGQLQSLVLVSRLPFVRLFQALLSLIAPEYFDKLAPCLEAVCSEIDQWPAPAPGQTLNLPVMGVVVQVRIPSRVDKSESSPPKQFDQENLLPAPVVLASVHELDLFRCFRPVLTHMQTLWELMLLGEPLLVLAPSPDVSSEMVLALTSCLQPLRFCCDFRPYFTIHDSEFKEFTTRTQAPTGPTSSESGSPRCQVRLPVRCRGCCSEASLSVGPPQSPWGWPELRALRPGHRACLVGDLPKQVKLKKPSRLKTLDTKPGLYTAYTAHLHRDKALLKRLLKGVQKKRPSDVQSALLRRHLLELTQSFIIPLEHYMASLMPLQKSITPWKTPPQIQPFSQDDFLRSLEHAGPQLTCILKGDWLGLYRRFFKSPHFDGWYRQRHKEMALKLEALHLEAICEANIETWMKDKSEVEVVDLVLKLREKLVRAQGHQLPVKEATLQRAQLYIETVIGSLPKDLQAVLCPP

SEQ ID NO: 1031296 - protein, 659 aa, Homo sapiens
RDCSEERPGRAPPPPAFPRQPAAAAMDALLGTGPRRARGCLGAAGPTSSGRAARTPAAPWARFSAWLECVCVVTFDLELGQALELVYPNDFRLTDKEKSSICYLSFPDSHSGCLGDTQFSFRMRQCGGQRSPWHADDRHYNSRAPVALQREPAHYFGYVYFRQVKDSSVKRGYFQKALGSSPTGRHPGSSVLGFLLSNNSGVQVRRSWGSCPVKLVGRATLGQLQSLVLVSRLPFVRLFQALLSLIAPEYFDKLAPCLEAVCSEIDQWPAPAPGQTLNLPVMGVVVQVRIPSRVDKSESSPPKQFDQENLLPAPVVLASVHELDLFRCFRPVLTHMQTLWELMLLGEPLLVLAPSPDVSSEMVLALTSCLQPLRFCCDFRPYFTIHDSEFKEFTTRTQAPPNVVLGVTNPFFIKTLQHWPHILRVGEPKMSGDLPKQVKLKKPSRLKTLDTKPGLYTAYTAHLHRDKALLKRLLKGVQKKRPSDVQSALLRRHLLELTQSFIIPLEHYMASLMPLQKSITPWKTPPQIQPFSQDDFLRSLEHAGPQLTCILKGDWLGLYRRFFKSPHFDGWYRQRHKEMALKLEALHLEAICEANIETWMKDKSEVEVVDLVLKLREKLVRAQGHQLPVKEATLQRAQLYIETVIGSLPKDLQAVLCPP

SEQ ID NO: 1031297 - protein, 714 aa, Homo sapiens
  misc_feature (228)..(228): Xaa can be any naturally occurring amino acid
RDCSEERPGRAPPPPAFPRQPAAAAMDALLGTGPRRARGCLGAAGPTSSGRAARTPAAPWARFSAWLECVCVVTFDLELGQALELVYPNDFRLTDKEKSSICYLSFPDSHSGCLGDTQFSFRMRQCGGQRSPWHADDRHYNSRAPVALQREPAHYFGYVYFRQVKDSSVKRGYFQKALGSSPTGRHPGSSVLGFLLSNNSGVQVRRSWGSCPVKLVGRATLGQLPGEXGFGGPRGLLSGEGEAWHWASTGPVALQSLVLVSRLPFVRLFQALLSLIAPEYFDKLAPCLEAVCSEIDQWPAPAPGQTLNLPVMGVVVQVRIPSRVDKSESSPPKQFDQENLLPAPVVLASVHELDLFRCFRPVLTHMQTLWELMLLGEPLLVLAPSPDVSSEMVLALTSCLQPLRFCCDFRPYFTIHDSEFKEFTTRTQAPTGPTSSESGSPRCQVRLPVRCRGCCSEASLSVGPPQSPWGWPELRALRPGHRACLVGDLPKQVKLKKPSRLKTLDTKPGLYTAYTAHLHRDKALLKRLLKGVQKKRPSDVQSALLRRHLLELTQSFIIPLEHYMASLMPLQKSITPWKTPPQIQPFSQDDFLRSLEHAGPQLTCILKGDWLGLYRRFFKSPHFDGWYRQRHKEMALKLEALHLEAICEANIETWMKDKSEVEVVDLVLKLREKLVRAQGHQLPVKEATLQRAQLYIETVIGSLPKDLQAVLCPP

SEQ ID NO: 1031298 - protein, 661 aa, Homo sapiens
RDCSEERPGRAPPPPAFPRQPAAAAMDALLGTGPRRARGCLGAAGPTSSGRAARTPAAPWARFSAWLECVCVVTFDLELGQALELVYPNDFRLTDKEKSSICYLSFPDSHSGCLGDTQFSFRMRQCGGQRSPWHADDRHYNSRAPVALQREPAHYFGYVYFRQVKDSSVKRGYFQKSLVLVSRLPFVRLFQALLSLIAPEYFDKLAPCLEAVCSEIDQWPAPAPGQTLNLPVMGVVVQVRIPSRVDKSESSPPKQFDQENLLPAPVVLASVHELDLFRCFRPVLTHMQTLWELMLLGEPLLVLAPSPDVSSEMVLALTSCLQPLRFCCDFRPYFTIHDSEFKEFTTRTQAPPNVVLGVTNPFFIKTLQHWPHILRVGEPKMSGQAPGEVQGVLLRSLVECGAASEPVGMARAAGTEAWPPGVSRGDLPKQVKLNTAHLHRDKALLKRLLKGVQKKRPSDVQSALLRRHLLELTQSFIIPLEHYMASLMPLQKSITPWKTPPQIQPFSQDDFLRSLEHAGPQLTCILKGDWLGLYRRFFKSPHFDGWYRQRHKEMALKLEALHLEAICEANIETWMKDKSEVEVVDLVLKLREKLVRCLPALSQRHQPGTELRLPWPWLPLQVRAQGHQLPVKEATLQRAQLYIETVIGSLPKDLQAVLCPP

SEQ ID NO: 1031299 - protein, 483 aa, Homo sapiens
RDCSEERPGRAPPPPAFPRQPAAAAMDALLGTGPRRARGCLGAAGPTSSGRAARTPAAPWARFSAWLECVCVVTFDLELGQALELVYPNDFRLTDKEKSSICYLSFPDSHSGCLGDTQFSFRMRQCGGQRSPWHADDRHYNSRAPVALQREPAHYFGYVYFRQVKDSSVKRGYFQKSLVLVSRLPFVRLFQALLSLIAPEYFDKLAPCLEAVCSEIDQWPAPAPGQTLNLPVMGVVVQVRIPSRVDKSESSPPKQFDQENLLPAPVVLASVHELDLFRCFRPVLTHMQTLWELMLLGEPLLVLAPSPDVSSEMVLALTSCLQPLRFCCDFRPYFTIHDSEFKEFTTRTQAPPNVVLGVTNPFFIKTLQHWPHILRVGEPKMSGDLPKQVKLKKPSRLKTLDTKPGLYTAYTAHLHRDKALLKRLLKGVQKKRPSDVQSALLRRHLLELTQSFIIPLEHYMASLIAPAEVRLGAEVRLGTDVRQ

SEQ ID NO: 1031300 - protein, 160 aa, Homo sapiens
RDCSEERPGRAPPPPAFPRQPAAAAMDALLGTGPRRARGCLGAAGPTSSGRAARTPAAPWARFSAWLECVCVVTFDLELGQALEVSGRERGRGRVGRAAPLGASPASLGALGRPALSLAFGRRLLEGPLLRAPEALPRPRREGELLGVGSCLHIGMEHFA

SEQ ID NO: 1031301 - protein, 579 aa, Homo sapiens
RDCSEERPGRAPPPPAFPRQPAAAAMDALLGTGPRRARGCLGAAGPTSSGRAARTPAAPWARFSAWLECVCVVTFDLELGQALELVYPNDFRLTDKEKSSICYLSFPDSHSGCLGDTQFSFRMRQCGGQRSPWHADDRHYNSRAPVALQREPAHYFGYVYFRQVKDSSVKRGYFQKSLVLVSRLPFVRLFQALLSLIAPEYFDKLAPCLEAVCSEIDQWPAPAPGQTLNLPVMGVVVQVRIPSRVDKSESSPPKQFDQENLLPAPVVLASVHELDLFRCFRPVLTHMQTLWELMLLGEPLLVLAPSPDVSSEMVLALTSCLQPLRFCCDFRPYFTIHDSEFKEFTTRTQAPGDLPKQVKLKKPSRLKTLDTKPGLYTAYTAHLHRDKALLKRLLKGVQKKRPSDVQSALLRRHLLELTQSFIIPLEHYMASLMPLQKSITPWKTPPQIQPFSQDDFLRSLEHAGPQLTCILKGDWLGLYRRFFKSPHFDGWYRQRHKEMALKLEALHLEAICEANIETWMKDKSEVEVVDLVLKLREKLVRAQGHQLPVKEATLQRAQLYIETVIGSLPKDLQAVLCPP

SEQ ID NO: 1031302 - protein, 652 aa, Homo sapiens
RDCSEERPGRAPPPPAFPRQPAAAAMDALLGTGPRRARGCLGAAGPTSSGRAARTPAAPWARFSAWLECVCVVTFDLELGQALELVYPNDFRLTDKEKSSICYLSFPDSHSGCLGDTQFSFRMRQCGGQRSPWHADDRHYNSRAPVALQREPAHYFGYVYFRQVKDSSVKRGYFQKSLVLVSRLPFVRLFQALLSLIAPEYFDKLAPCLEAVCSEIDQWPAPAPGQTLNLPVMGVVVQVRIPSRVDKSESSPPKQFDQENLLPAPVVLASVHELDLFRCFRPVLTHMQTLWELMLLGEPLLVLAPSPDVSSEMVLALTSCLQPLRFCCDFRPYFTIHDSEFKEFTTRTQAPPNVVLGVTNPFFIKTLQHWPHILRVGEPKMSGQAPGEVQGVLLRSLVECGAASEPVGMARAAGTEAWPPGVSRGDLPKQVKLKKPSRLKTLDTKPGLYTAYTAHLHRDKALLKRLLKGVQKKRPSDVQSALLRRHLLELTQSFIIPLEHYMASLMPLQKSITPWKTPPQIQPFSQDDFLRSLEHAGPQLTCILKGDWLGLYRRFFKSPHFDGWYRQRHKEMALKLEALHLEAICEANIETWMKDKSEVEVVDLVLKLREKLVRAQGHQLPVKEATLQRAQLYIETVIGSLPKDLQAVLCPP

SEQ ID NO: 1031303 - protein, 621 aa, Homo sapiens
RDCSEELARTRAAPARVSPATRGRRHGRAVGHRASPGSRLPGRGWTHVFRSRGADPGGALGALLRLAGVCVRGHLRPGAGPGAGAGVSERLPAHRQGGCLGDTQFSFRMRQCGGQRSPWHADDRHYNSRAPVALQREPAHYFGYVYFRQVKDSSVKRGYFQKSLVLVSRLPFVRLFQALLSLIAPEYFDKLAPCLEAVCSEIDQWPAPAPGQTLNLPVMGVVVQVRIPSRVDKSESSPPKQFDQENLLPAPVVLASVHELDLFRCFRPVLTHMQTLWELMLLGEPLLVLAPSPDVSSEMVLALTSCLQPLRFCCDFRPYFTIHDSEFKEFTTRTQAPTGPTSSESGSPRCQVRLPVRCRGCCSEASLSVGPPQSPWGWPELRALRPGHRACLVGDLPKQVKLKKPSRLKTLDTKPGLYTAYTAHLHRDKALLKRLLKGVQKKRPSDVQSALLRRHLLELTQSFIIPLEHYMASLMPLQKSITPWKTPPQIQPFSQDDFLRSLEHAGPQLTCILKGDWLGLYRRFFKSPHFDGWYRQRHKEMALKLEALHLEAICEANIETWMKDKSEVEVVDLVLKLREKLVRAQGHQLPVKEATLQRAQLYIETVIGSLPKDLQAVLCPP

SEQ ID NO: 1031304 - protein, 403 aa, Homo sapiens
MGVVVQVRIPSRVDKSESSPPKQFDQENLLPAPVVLASVHELDLFRCFRPVLTHMQTLWELMLLGEPLLVLAPSPDVSSEMVLALTSCLQPLRFCCDFRPYFTIHDSEFKEFTTRTQAPTGPTSSESGSPRCQVRLPVRCRGCCSEASLSVGPPQSPWGWPELRALRPGHRACLVGDLPKQVKLKKPSRLKTLDTKPGLYTAYTAHLHRDKALLKRLLKGVQKKRPSDVQSALLRRHLLELTQSFIIPLEHYMASLMPLQKSITPWKTPPQIQPFSQDDFLRSLEHAGPQLTCILKGDWLGLYRRFFKSPHFDGWYRQRHKEMALKLEALHLEAICEANIETWMKDKSEVEVVDLVLKLREKLVRAQGHQLPVKEATLQRAQLYIETVIGSLPKDLQAVLCPP

SEQ ID NO: 1031305 - protein, 439 aa, Homo sapiens
RDCSEERPGRAPPPPAFPRQPAAAAMDALLGTGPRRARGCLGAAGPTSSGRAARTPAAPWARFSAWLECVCVVTFDLELGQALELVYPNDFRLTDKEKSSICYLSFPDSHSGCLGDTQFSFRMRQCGGQRSPWHADDRHYNSRAPVALQREPAHYFGYVYFRQVKDSSVKRGYFQKSLVLVSRLPFVRLFQALLSLIAPEYFDKLAPCLEAVCSEIDQWPAPAPGQTLNLPVMGVVVQVRIPSRVDKSESSPPKQFDQENLLPAPVVLASVHELDLFRCFRPVLTHMQTLWELMLLGEPLLVLAPSPDVSSEMVLALTSCLQPLRFCCDFRPYFTIHDSEFKEFTTRTQAPGDLPKQVKLKKPSRLKTLDTKPGLYTAYTAHLHRDKALLKRLLKGVQKKRPSDVHSCTSRRSSAPCPKTCRLSCALPRTKPRATVPGP

SEQ ID NO: 1031306 - protein, 158 aa, Homo sapiens
MKPGDIRHAPNNLASDVLGILVALGFDDFRGEFCNQQPPEILVAFPFPKPALISHLERGEAPWGPDPWDTEILRGISQGGESWIKNEGLVIKQEASEETELHRMPVEDFSGTFLSTLILKGGPEADFQSNPNLILRGGMKLYECKNVGTLRYTKVFGR

SEQ ID NO: 1031307 - protein, 173 aa, Homo sapiens
MLQTTWPQESVTFEDVAVYFTQNQWASLDPAQRALYGEVMLENYANVASLVAFPFPKPALISHLERGEAPWGPDPWDTEILRGISQGGESWIKNEGLVIKQEASEETELHRMPVEDFSGTFLSTLILKGGPEADFQSNPNLILRGGMKLYECKNVGTPGIQRYSADDHKGRPL

SEQ ID NO: 1031308 - protein, 135 aa, Homo sapiens
MRTSSWMVPEWVWDTEGPAGGHWSPLGREESLSYHGVALALQVGGQLGVVVHALVGGIGQVHLGEGPRTDLLGGEQVAIVLALTHLLREGSLIQLLPAAALHGGQCMEGGVVVQFHQSWGAQLRPDLCQRAGARW

SEQ ID NO: 1031309 - protein, 80 aa, Homo sapiens
LDYIVNEPPPKLPSGVFSLEFQDFVNKCLIKNPAERADLKQLMVHAFIKRSDAEEVDFAGWLCSTIGLNQPSTPTHAAGV

SEQ ID NO: 1031310 - protein, 286 aa, Homo sapiens
MRRRPGASPVPGVCVSPRAVGKAGAVRRQEAKGTQDQTRGANSAGGPCTDHARSRTKARPVAVATARGVDAGAASRELSVQAHRLLGLRRIACACALLTRGRFCAPQWLPASIGEAELSVFYRTGSPDAAGGSSRPPSTHPPPLLHQDFISVTQSFGESYGNSKNCRRLLCCRVRTAPGGPRPGVAAPAALPACGSERGLGGQTRLPPTPPSPPLPRKKGQICFPGRGSRGRHACSGLSGPNSAGRWWWEEGLEPQQVVWASFDFRQGPGPGPSPSWSGSLWTCCS

SEQ ID NO: 1031311 - protein, 269 aa, Homo sapiens
MRRRPGASPVPGVCVSPRAVGKAGAVRRQEAKGTQDQTRGANSAGGPCTDHARSRTKARPVAVATARGVDAGAASRELSVQAHRLRGLRRIACACALLTRGRFCAPQWLPASIGEAELSVFYRTGSPDAAGGSSRPPSTHPPPLLHQDFISVTQSFGESYGNSKNCRRAAPAALPACGSERGLGGQTRLPPTPPSPPLPRKKGQICFPGRGSRGRHACSGLSGPNSAGRWWWEEGLEPQQVVWASFDFRQGPGPGPSPSWSGSLWTCCS

SEQ ID NO: 1031312 - protein, 132 aa, Homo sapiens
RWLERRDFLKVRDWPERPPLTVRGCRIPSAGDAAAEGGRGRPGGSRRGPWLGKYQDGSWQRRRARPRGRCPGARTYREEPRPLHPHVGTEPGGSRAGRRRRTPRSSPPSALTESPPRNLWRGRLALGEEAAR

SEQ ID NO: 1031313 - protein, 132 aa, Homo sapiens; identical to SEQ ID NO: 1031312

SEQ ID NO: 1031314 - protein, 120 aa, Homo sapiens
GTGPELSGSGSRPAVRCLLRSGGLSVMAWGGMPDRGPWLGKYQDGSWQRRRARPRGRCPGARTYREEPRPLHPHVGTEPGGSRAGRRRRTPRSSPPSALTESPPRNLWRGRLALGEEAAR

SEQ ID NO: 1031315 - protein, 132 aa, Homo sapiens; identical to SEQ ID NO: 1031312

SEQ ID NO: 1031316 - protein, 185 aa, Homo sapiens
  misc_feature (6)..(7): Xaa can be any naturally occurring amino acid
  misc_feature (17)..(17): Xaa can be any naturally occurring amino acid
  misc_feature (19)..(19): Xaa can be any naturally occurring amino acid
  misc_feature (28)..(28): Xaa can be any naturally occurring amino acid
  misc_feature (31)..(31): Xaa can be any naturally occurring amino acid
  misc_feature (38)..(38): Xaa can be any naturally occurring amino acid
  misc_feature (42)..(42): Xaa can be any naturally occurring amino acid
  misc_feature (54)..(54): Xaa can be any naturally occurring amino acid
EFGTSXXLGGHGRRPDXPXVKRAAGYPXARXRHRGAGXTRRXAATHPLAARVLXRFAQGARRFSSPDCCQRLPGGGSFLQRHHPGAQAPDGRRKFGTDHVEVGSQAGADGTRPPKASLPPELQPPTNCCMSGCPNCVWVEYADRLLQHFQDGGERALAALEEHVADENLKAFLRMEIRLHTRCGG

SEQ ID NO: 1031317 - protein, 132 aa, Homo sapiens; identical to SEQ ID NO: 1031312

SEQ ID NO: 1031318 - protein, 137 aa, Homo sapiens
  misc_feature (2)..(2): Xaa can be any naturally occurring amino acid
AXQVAAGPWLGARRFSSPDCCQRLPGGGSFLQRHHPGAQAPDGRRKFGTDHVEVGSQAGADGTRPPKASLPPELQPPTNCCMSGCPNCVWVEYADRLLQHFQDGGERALAALEEHVADENLKAFLRMEIRLHTRCGG

SEQ ID NO: 1031319 - protein, 71 aa, Homo sapiens
MSGCPNCVWVEYADRLLQHFQDGGERALAALEEHVADENLKAFLRMEIRLHTRCGVTSWWIPPRRVRRPGS

SEQ ID NO: 1031320 - protein, 132 aa, Homo sapiens; identical to SEQ ID NO: 1031312

SEQ ID NO: 1031321 - protein, 173 aa, Homo sapiens
RWLERRDFLKVRDWPERPPLTVRGCRIPSAGDAAAEGGRGRPGGSRRGPWLGKYQDGSWQRRRARPRGRCPGARTYREEPRPLHPHVGTEPGGSRAGRRRRTPRSSPPSALTESPPRNLWRGRLALGEEAARGLAGSPARTAARGFLEVAAFFKGTIPERKPLMGAENSGQTT

SEQ ID NO: 1031322 - protein, 132 aa, Homo sapiens; identical to SEQ ID NO: 1031312

SEQ ID NO: 1031323 - protein, 605 aa, Homo sapiens
MAAGQREARPQVSLTFEDVAVLFTRDEWRKLAPSQRNLYRDVMLENYRNLVSLGLPFTKPKVISLLQQGEDPWEVEKDGSGVSSLGSKSSHKTTKSTQTQDSSFQGLILKRSNRNVPWDLKLEKPYIYEGRLEKKQDKKGSFQIVSATHKKIPTIERSHKNTELSQNFSPKSVLIRQQILPREKTPPKCEIQGNSLKQNSQLLNQPKITADKRYKCSLCEKTFINTSSLRKHEKNHSGEKLFKCKECSKAFSQSSALIQHQITHTGEKPYICKECGKAFTLSTSLYKHLRTHTVEKSYRCKECGKSFSRRSGLFIHQKIHAEENPCKYNPGRKASSCSTSLSGCQRIHSRKKSYLCNECGNTFKSSSSLRYHQRIHTGEKPFKCSECGRAFSQSASLIQHERIHTGEKPYRCNECGKGFTSISRLNRHRIIHTGEKYYNCNECGKALSSHSTLIIHERIHTGEKPCKCKVCGKAFRQSSALIQHQRMHTGERPYKCNECGKTFRCNSSLSNHQRIHTGEKPYRCEECGISFGQSSALIQHRRIHTGEKPFKCNTCGKTFRQSSSRIAHQRIHTGEKPYECNTCGKLFNHRSSLTNHYKIHIEEDP

SEQ ID NO: 1031324 - protein, 132 aa, Homo sapiens
MAAGQREARPQVSLTFEDVAVLFTRDEWRKLAPSQRNLYRDVMLENYRNLVSLGLPFTKPKVISLLQQGEDPWEVEKDGSGVSSLGCKSTPKMTKSTQTQDSFQEQITDKIDKGMNPGTSYQKDPAYMNEDN

SEQ ID NO: 1031325 - protein, 712 aa, Homo sapiens
ELSGVGEPWPWWAQRVAAATAVQRPLRKPQACGAWACRAAQRCSGPRAPGSSRIPVRARGVLLSGSRGFRAADSRAGKQKGFFLAPFFWEICLLETAPSSRESQKEDMAAGQREARPQVSLTFEDVAVLFTRDEWRKLAPSQRNLYRDVMLENYRNLVSLGLPFTKPKVISLLQQGEDPWEVEKDGSGVSSLGSKSSHKTTKSTQTQDSSFQGLILKRSNRNVPWDLKLEKPYIYEGRLEKKQDKKGSFQIVSATHKKIPTIERSHKNTELSQNFSPKSVLIRQQILPREKTPPKCEIQGNSLKQNSQLLNQPKITADKRYKCSLCEKTFINTSSLRKHEKNHSGEKLFKCKECSKAFSQSSALIQHQITHTGEKPYICKECGKAFTLSTSLYKHLRTHTVEKSYRCKECGKSFSRRSGLFIHQKIHAEENPCKYNPGRKASSCSTSLSGCQRIHSRKKSYLCNECGNTFKSSSSLRYHQRIHTGEKPFKCSECGRAFSQSASLIQHERIHTGEKPYRCNECGKGFTSISRLNRHRIIHTGEKFYNCNECGKALSSHSTLIIHERIHTGEKPCKCKVCGKAFRQSSALIQHQRMHTGERPYKCNECGKTFRCNSSLSNHQRIHTGEKPYRCEECGISFGQSSALIQHRRIHTGEKPFKCNTCGKTFRQSSSRIAHQRIHTGEKPYECNTCGKLFNHRSSLTNHYKIHIEEDP

SEQ ID NO: 1031326 - protein, 605 aa, Homo sapiens; identical to SEQ ID NO: 1031323

SEQ ID NO: 1031327 - protein, 85 aa, Homo sapiens
MGTAKANHWAWLLVLRFLFGCSVLQILLPSFSFMSRVQRKDAEQESQTKAEIQDMKQELSAVNMMDKFARSAKLERKINKMMNKL

SEQ ID NO: 1031328 - protein, 80 aa, Homo sapiens
  misc_feature (16)..(16): Xaa can be any naturally occurring amino acid
NRNTCFLYYMANAGYXAAVVGVKLCPKVEKWVQRKDAEQESQTKAEIQDMKQELSAVNMMDKFARSAKLERKINKMMNKL

SEQ ID NO: 1031329 - protein, 339 aa, Homo sapiens
MTPLMSPSLAAGPAGVLTVELAGVRPTVAGAGVGAGVPLTLTRRRGVCVPWLEISDLDRQIEQLRRCELIKESEVKALCAKAMRDLGRGEQLCRGWTRQSQCAADIHGQFYDLKELFRVGGDVPENNYLFMGDFVDRGFYSVETFLLLLALKVRYPDRITLIRGNHESRQITQVYGFYDECLRKYGSVTVWRYCTEIFDYLSLSAIIDGKIFCVHGGLSPSIQTLDQIRTIERKQEVPHDGPMCDLLWSDPEDTTGWGVSPRRKPATYLAIDVVAQFTAHDIDLSWRASTGDGTGHSGTSRERGLCNRAQDCTGGTAGTGRETLQNITEGAQKGTQNRH

SEQ ID NO: 1031330 - protein, 140 aa, Homo sapiens
PAPTLEEVNAWAQSFDKLMVTPAGRNAFREFLRTEFSEENMLFWMACEELKKEANKNIIEEKARIIYEDYISILSPKEVSLDSRVREVINRNMVEPSQHIFDDAQLQIYTLMHRDSYPRFMNSAVYKDLLQSLSEKSIEA

SEQ ID NO: 1031331 - protein, 204 aa, Homo sapiens
WGTRGHIVSGSKHRTAKVWPLASGRLGQCLHTIQTEDRVWSIAISPLLSSFVTGTACCGHFSPLRIWDLNSGQLMTHLGSDFPPGAGVLDVMYESPFTLLSCGYDTYVRYWDLRTSVRKCVMEWEEPHDSTLYCLQTDGNHLLATGSSYYGVVRLWDRRQRACLHAFPLTSTPLSSPVYCLRLTTKHLYAALSYNLHVLDFQNP

SEQ ID NO: 1031332 - protein, 204 aa, Homo sapiens; identical to SEQ ID NO: 1031331

SEQ ID NO: 1031333 - protein, 94 aa, Homo sapiens
LHLGEGEVAKDVPRKGWKKPTMAHVPLPLGLGILGEGTPMSHLESSYHFLCPPFQAFPLTSTPLSSPVYCLRLTTKHLYAALSYNLHVLDFQNP

SEQ ID NO: 1031334 - protein, 204 aa, Homo sapiens; identical to SEQ ID NO: 1031331

SEQ ID NO: 1031335 - protein, 210 aa, Homo sapiens
WGTRGHIVSGSKHRTAKVWPLASGRLGQCLHTIQTEDRVWSIAISPLLSSFVTGTACCGHFSPLRIWDLNSGQLMTHLGSDFPPGAGVLDVMYESPFTLLSCGYDTYVRYWDLRTSVRKCVMEWEEPHDSTLYCLQTDGNHLLATGSSYYGVVRLWDRRQRACLHAFPLTSTPLSSPVYCLRPCLARARIWPGEAHPIPLIRAMTAYRVR

SEQ ID NO: 1031336 - protein, 197 aa, Homo sapiens
RIPMDQADGKVWPLASGRLGQCLHTIQTEDRVWSIAISPLLSSFVTGTACCGHFSPLRIWDLNSGQLMTHLGSDFPPGAGVLDVMYESPFTLLSCGYDTYVRYWDLRTSVRKCVMEWEEPHDSTLYCLQTDGNHLLATGSSYYGVVRLWDRRQRACLHAFPLTSTPLSSPVYCLRLTTKHLYAALSYNLHVLDFQNP

SEQ ID NO: 1031337 - protein, 185 aa, Homo sapiens
AGGWGEQAGAPQAGGCDHGGVLAPGWGPARPGTPGTARYSCFLSDFSPQTQSGQLMTHLGSDFPPGAGVLDVMYESPFTLLSCGYDTYVRYWDLRTSVRKCVMEWEEPHDSTLYCLQTDGNHLLATGSSYYGVVRLWDRRQRACLHAFPLTSTPLSSPVYCLRLTTKHLYAALSYNLHVLDFQNP

SEQ ID NO: 1031338 - protein, 204 aa, Homo sapiens; identical to SEQ ID NO: 1031331

SEQ ID NO: 1031339 - protein, 753 aa, Homo sapiens [sequence omitted]

SEQ ID NO: 1031340 - protein, 910 aa, Homo sapiens
MAATVEGPELEAAAAAGDASEDSDAGSRALPFLGGNRLSLDLYPGGCQQLLHLCVQQPLQLLQVEFLRLSTHEDPQLLEATLAQLPQSLSCLRSLVLKGGQRRDTLGACLRGALTNLPAGLSGLAHLAHLDLSFNSLETLPACVLQMRGLGALLLSHNCLSELPEALGALPALTFLTVTHNRLQTLPPALGALSTLQRLDLSQNLLDTLPPEIGGLGSLLELNLASNRLQSLPASLAGLRSLRLLVLHSNLLASVPADLARLPLLTRLDLRDNQLRDLPPELLDAPFVRLQGNPLGEASPDAPSSPVAALIPEMPRLFLTSDLDSFPVTPRGCSVTLACGVRLQFPAGATATPITIRYRLLLPEPGLVPLGPHDALLSHVLELQPHGVAFQQDVGLWLLFTPPQARRCREVVVRTRNDNSWGDLETYLEEEAPQRLWAHCQVPHFSWFLVVSRPVSNACLVPPEGTLLCSSGHPGVKVIFPPGATEEPRRVSMQVVRMAGRELQALLGEPEAAVSPLLCLSQSGPPSFLQPVTVQLPLPSGITGLSLDRSRLHLLYWAPPAATWDDITAQVVLELTHLYARFQVTHFSWYWLWYTTKNCVGGLARKAWERLRLHRVNLIALQRRRDPEQVLLQCLPRNKVDATLRRLLERYRGPEPSDTVEMFEGEEFFAAFERGIDVDADRPDCVEGRICFVFYSHLKNVKEVYVTTTLDREAQAVRGQVSFYRGAVPVRVPEEAEAARQRKGADALWMATLPIKLPRLRGSEGPRRGAGLSLAPLNLGDAETGFLTQSNLLSVAGRLGLDWPAVALHLGVSYREVQRIRHEFRDDLDEQIRHMLFSWAERQAGQPGAVGLLVQALEQSDRQDVAEEVRAVLELGRRKYQDSIRRMGLAPKDPALPGSSAPQPPEPAQA

SEQ ID NO: 1031341 - protein, 1005 aa, Homo sapiens
  misc_feature (270)..(270): Xaa can be any naturally occurring amino acid
MAATVEGPELEAAAAAGDASEDSDAGSRALPFLGGNRLSLDLYPGGCQQLLHLCVQQPLQLLQVEFLRLSTHEDPQLLEATLAQLPQSLSCLRSLVLKGGQRRDTLGACLRGALTNLPAGLSGLAHLAHLDLSFNSLETLPACVLQMRGLGALLLSHNCLSELPEALGALPALTFLTVTHNRLQTLPPALGALSTLQRLDLSQNLLDTLPPEIGGLGSLLELNLASNRLQSLPASLGLSSPCAPTHWPHGRVPEACLSSAGASAPTGLVXSCLLGCPSTSLAFETPSVASSEFSEPSCGGESETAALGGGSRSVPAPWAGLVPSLSQHLPAAGLRSLRLLVLHSNLLASVPADLARLPLLTRLDLRDNQLRDLPPELLDAPFVRLQGNPLGEASPDAPSSPVAALIPEMPRLFLTSDLDSFPVTPRGCSVTLACGVRLQFPAGATATPITIRYRLLLPEPGLVPLGPHDALLSHVLELQPHGVAFQQDVGLWLLFTPPQARRCREVVVRTRNDNSWGDLETYLEEEAPQRLWAHCQVPHFSWFLVVSRPVSNACLVPPEGTLLCSSGHPGVKVIFPPGATEEPRRVSMQVVRMAGRELQALLGEPEAAVSPLLCLSQSGPPSFLQPVTVQLPLPSGITGLSLDRSRLHLLYWAPPAATWDDITAQVVLELTHLYARFQVTHFSWYWLWYTTKNCVGGLARKAWERLRLHRVNLIALQRRRDPEQVLLQCLPRNKVDATLRRLLERYRGPEPSDTVEMFEGEEFFAAFERGIDVDADRPDCVEGRICFVFYSHLKNVKEVYVTTTLDREAQAVRGQVSFYRGAVPVRVPEEAEAARQRKGADALWMATLPIKLPRLRGSEGPRRGAGLSLAPLNLGDAETGFLTQSNLLSVAGRLGLDWPAVALHLGVSYREVQRIRHEFRDDLDEQIRHMLFSWAERQAGQPGAVGLLVQALEQSDRQDVAEEVRAVLELGRRKYQDSIRRMGLAPKDPALPGSSAPQPPEPAQA

SEQ ID NO: 1031342 - protein, 1025 aa, Homo sapiens
  misc_feature (290)..(290): Xaa can be any naturally occurring amino acid
MAATVEGPELEAAAAAGDASEDSDAGSRALPFLGGNRLSLDLYPGGCQQLLHLCVQQPLQLLQVEFLRLSTHEDPQLLEATLAQLPQSLSCLRSLVLKGSIWDLGPWLRGPHPPPPFPGGQRRDTLGACLRGALTNLPAGLSGLAHLAHLDLSFNSLETLPACVLQMRGLGALLLSHNCLSELPEALGALPALTFLTVTHNRLQTLPPALGALSTLQRLDLSQNLLDTLPPEIGGLGSLLELNLASNRLQSLPASLGLSSPCAPTHWPHGRVPEACLSSAGASAPTGLVXSCLLGCPSTSLAFETPSVASSEFSEPSCGGESETAALGGGSRSVPAPWAGLVPSLSQHLPAAGLRSLRLLVLHSNLLASVPADLARLPLLTRLDLRDNQLRDLPPELLDAPFVRLQGNPLGEASPDAPSSPVAALIPEMPRLFLTSDLDSFPVTPRGCSVTLACGVRLQFPAGATATPITIRYRLLLPEPGLVPLGPHDALLSHVLELQPHGVAFQQDVGLWLLFTPPQARRCREVVVRTRNDNSWGDLETYLEEEAPQRLWAHCQVPHFSWFLVVSRPVSNACLVPPEGTLLCSSGHPGVKVIFPPGATEEPRRVSMQVVRMAGRELQALLGEPEAAVSPLLCLSQSGPPSFLQPVTVQLPLPSGITGLSLDRSRLHLLYWAPPAATWDDITAQVVLELTHLYARFQVTHFSWYWLWYTTKNCVGGLARKAWERLRLHRVNLIALQRRRDPEQVLLQCLPRNKVDATLRRLLERYRGPEPSDTVEMFEGEEFFAAFERGIDVDADRPDCVEGRICFVFYSHLKNVKEVYVTTTLDREAQAVRGQVSFYRGAVPVRVPEEAEAARQRKGADALWMATLPIKLPRLRGSEGPRRGAGLSLAPLNLGDAETGFLTQSNLLSVAGRLGLDWPAVALHLGVSYREVQRIRHEFRDDLDEQIRHMLFSWAERQAGQPGAVGLLVQALEQSDRQDVAEEVRAVLELGRRKYQDSIRRMGLAPKDPALPGSSAPQPPEPAQA

SEQ ID NO: 1031343 - protein, 948 aa, Homo sapiens
  misc_feature (270)..(270): Xaa can be any naturally occurring amino acid
MAATVEGPELEAAAAAGDASEDSDAGSRALPFLGGNRLSLDLYPGGCQQLLHLCVQQPLQLLQVEFLRLSTHEDPQLLEATLAQLPQSLSCLRSLVLKGGQRRDTLGACLRGALTNLPAGLSGLAHLAHLDLSFNSLETLPACVLQMRGLGALLLSHNCLSELPEALGALPALTFLTVTHNRLQTLPPALGALSTLQRLDLSQNLLDTLPPEIGGLGSLLELNLASNRLQSLPASLGLSSPCAPTHWPHGRVPEACLSSAGASAPTGLVXSCLLGCPSTSLAFETPSVASSEFSEPSCGGESETAALGGGSRSVPAPWAGLVPSLSQHLPAAGLRSLRLLVLHSNLLASVPADLARLPLLTRLDLRDNQLRDLPPELLDAPFVRLQGNPLGEASPDAPSSPVAALIPEMPRLFLTSDLDSFPVTPRGCSVTLACGVRLQFPAGATATPITIRYRLLLPEPGLVPLGPHDALLSHVLELQPHGVAFQQDVGLWLLFTPPQARRCREVVVRTRNDNSWGDLETYLEEEAPQRLWAHCQVPHFSWFLVVSRPVSNACLVPPEGTLLCSSGHPGVKVIFPPGATEEPRRVSMQVVRMAGRELQALLGEPEAAVSPLLCLSQSGPPSFLQPVTVQLPLPSGITGLSLDRSRLHLLYWAPPAATWDDITAQVVLELTHLYARFQVTHFSWYWLWYTTKNCVGGLARKAWERLRLHRVNLIALQRRRDPEQVLLQCLPRNKVDATLRRLLERYRGPEPSDTVEMFEGEEFFAAFERGIDVDADRPDCVEGRICFVFYSHLKNVKEVYVTTTLDREAQAVRGQVSFYRGAVPVRVPEEAEAARQRKGADALWMATLPIKLPRLRGSEGPRRGAGLSLAPLNLGDAETGFLTQSNLLSVAGRLGLDWPAVALHLGVSYREVQRIRHEFRDDLDEQIRHMLFSWAERQAGQPPEPAQA

SEQ ID NO: 1031344 - protein, 581 aa, Homo sapiens
  misc_feature (270)..(270): Xaa can be any naturally occurring amino acid
MAATVEGPELEAAAAAGDASEDSDAGSRALPFLGGNRLSLDLYPGGCQQLLHLCVQQPLQLLQVEFLRLSTHEDPQLLEATLAQLPQSLSCLRSLVLKGGQRRDTLGACLRGALTNLPAGLSGLAHLAHLDLSFNSLETLPACVLQMRGLGALLLSHNCLSELPEALGALPALTFLTVTHNRLQTLPPALGALSTLQRLDLSQNLLDTLPPEIGGLGSLLELNLASNRLQSLPASLGLSSPCAPTHWPHGRVPEACLSSAGASAPTGLVXSCLLGCPSTSLAFETPSVASSEFSEPSCGGESETAALGGGSRSVPAPWAGLVPSLSQHLPAAGLRSLRLLVLHSNLLASVPADLARLPLLTRLDLRDNQLRDLPPELLDAPFVRLQGNPLGEASPDAPSSPVAALIPEMPRLFLTSDLDSFPVTPRGCSVTLACGVRLQFPAGATATPITIRYRLLLPEPGLVPLGPHDALLSHVLELQPHGVAFQQDVGLWLLFTPPQARRCREVVVRTRNDNSWGDLETYLEGRGPKGLVMAVPFSGLGSAGKLAGPGDAAPGREHSRAEDTSTRAGTKAEKGPGVAPE

SEQ ID NO: 1031345 - protein, 418 aa, Homo sapiens [sequence omitted]

SEQ ID NO: 1031346 - protein, 987 aa, Homo sapiens
  misc_feature (270)..(270): Xaa can be any naturally occurring amino acid
MAATVEGPELEAAAAAGDASEDSDAGSRALPFLGGNRLSLDLYPGGCQQLLHLCVQQPLQLLQVEFLRLSTHEDPQLLEATLAQLPQSLSCLRSLVLKGGQRRDTLGACLRGALTNLPAGLSGLAHLAHLDLSFNSLETLPACVLQMRGLGALLLSHNCLSELPEALGALPALTFLTVTHNRLQTLPPALGALSTLQRLDLSQNLLDTLPPEIGGLGSLLELNLASNRLQSLPASLGLSSPCAPTHWPHGRVPEACLSSAGASAPTGLVXSCLLGCPSTSLAFETPSVASSEFSEPSCGGESETAALGGGSRSVPAPWAGLVPSLSQHLPAAGLRSLRLLVLHSNLLASVPADLARLPLLTRLDLRDNQLRDLPPELLDAPFVRLQGNPLGEASPDAPSSPVAALIPEMPRLFLTSDLDSFPVTPRGCSVTLACGVRLQFPAGATATPITIRYRLLLPEPGLVPLGPHDALLSHVLELQPHGVAFQQDVGLWLLFTPPQARRCREVVVRTRNDNSWGDLETYLEEEAPQRLWAHCQVPHFSWFLVVSRPVSNACLVPPEGTLLCSSGHPGVKVIFPPGATEEPRRVSMQVVRMAGRELQALLGEPEAAVSPLLCLSQSGPPSFLQPVTVQLPLPSGITGLSLDRSRLHLLYWAPPAATWDDITAQVVLELTHLYARFQVTHFSWYWLWYTTKNCVGGLARKAWERLRLHRVNLIALQRRRDPEQVLLQCLPRNKVDATLRRLLERYRGPEPSDTVEMFEGEEFFAAFERGIDVDADRPDCVEGRICFVFYSHLKNVKEVYVTTTLDREAQAVRGQVSFYRGAVPVRVPEEAEAARQRKGADALWMATLPIKLPVGLRDSRGAGQDRGPGVTRVTWWSWGWSPGLNATFSFQQRLRGSEGPRRGAGLSLAPLNLGDAETGFLTQSNLLSVAGRLGLDWPAVALHLGVSYREVQRIRHEFRDDLDEQIRHMLFSWAERQAGQPPEPAQA

SEQ ID NO: 1031347 - protein, 107 aa, Homo sapiens
QSVVGGPGQVDRTLCRPSSACRDDLDEQIRHMLFSWAERQAGQPGAVGLLVQALEQSDRQDVAEEVRAVLELGRRKYQDSIRRMGLAPKDPALPGSSAPQPPEPAQA

SEQ ID NO: 1031348 - protein, 893 aa, Homo sapiens
MAATVEGPELEAAAAAGDASEDSDAGSRALPFLGGNRLSLDLYPGGCQQLLHLCVQQPLQLLQVEFLRLSTHEDPQLLEATLAQLPQSLSCLRSLVLKGGQRRDTLGACLRGALTNLPAGLSGLAHLAHLDLSFNSLETLPACVLQMRGLGALLLSHNCLSELPEALGALPALTFLTVTHNRLQTLPPALGALSTLQRLDLSQNLLDTLPPEIGGLGSLLELNLASNRLQSLPASLAGLRSLRLLVLHSNLLASVPADLARLPLLTRLDLRDNQLRDLPPELLDAPFVRLQGNPLGEASPDAPSSPVAALIPEMPRLFLTSDLDSFPVTPRGCSVTLACGVRLQFPAGATATPITIRYRLLLPEPGLVPLGPHDALLSHVLELQPHGVAFQQDVGLWLLFTPPQARRCREVVVRTRNDNSWGDLETYLEEEAPQRLWAHCQVPHFSWFLVVSRPVSNACLVPPEGTLLCSSGHPGVKVIFPPGATEEPRRVSMQVVRMAGRELQALLGEPEAAVSPLLCLSQSGPPSFLQPVTVQLPLPSGITGLSLDRSRLHLLYWAPPAATWDDITAQVVLELTHLYARFQVTHFSWYWLWYTTKNCVGGLARKAWERLRLHRVNLIALQRRRDPEQVLLQCLPRNKVDATLRRLLERYRGPEPSDTVEMFEGEEFFAAFERGIDVDADRPDCVEGRICFVFYSHLKNVKEVSFYRGAVPVRVPEEAEAARQRKGADALWMATLPIKLPRLRGSEGPRRGAGLSLAPLNLGDAETGFLTQSNLLSVAGRLGLDWPAVALHLGVSYREVQRIRHEFRDDLDEQIRHMLFSWAERQAGQPGAVGLLVQALEQSDRQDVAEEVRAVLELGRRKYQDSIRRMGLAPKDPALPGSSAPQPPEPAQA

SEQ ID NO: 1031349 - protein, 228 aa, Homo sapiens
MGYKDNDGEEEEREGGAAGPRGSRLPPITGGASELAKRKVKKKKRKKKTKGSGKGDDKHQSQSLKSQPLSSSFHDILSPCKERGPKPEHRQSKVEKKHLPSDSSTVSLPDFAEIENLANRINESLRWDGILADPEAEKERIRIYKLNRRKRYRCLALKGFHPDPEALKGFHTDPNAEEAPENLPYLSDKDGSSSHRQPTSKAECPNLCFEGNLTPKLLHSDLAPTLLE

SEQ ID NO: 1031350 - protein, 321 aa, Homo sapiens
MGYKDNDGEEEEREGGAAGPRGSRLPPITGGASELAKRKVKKKKRKKKTKGSGKGDDKHQSQSLKSQPLSSSFHDILSPCKERGPKPEHRQSKVEKKHLPSDSSTVSLPDFAEIENLANRINESLRWDGILADPEAEKERIRIYKLNRRGTGAWPSRLPPRPRGPQGFHPDPDALKASTPPRGPQGFHPDPKALKGFHPDPKALKGFHTDPEALKGFHPDPKALKGFHPDPEALKGFHPEPRKRYRCLALKGFHPDPEALKGFHTDPNAEEAPENLPYLSDKDGSSSHRQPTSKAECPNLCFEGNLTPKLLHSDLAPTLLE

SEQ ID NO: 1031351 - protein, 228 aa, Homo sapiens; identical to SEQ ID NO: 1031349

SEQ ID NO: 1031352 - protein, 150 aa, Homo sapiens
MARWCQNYNCSGLRRDGSDKHQSQSLKSQPLSSSFHDILSPCKERGPKPEHRQSKVEKKHLPSDSSTVSLPDFAEIENLANRINESLRWDGILADPEAEKERIRIYKLNRRDGSSSHRQPTSKAECPNLCFEGNLTPKLLHSDLAPTLLE

SEQ ID NO: 1031353 - protein, 228 aa, Homo sapiens; identical to SEQ ID NO: 1031349

SEQ ID NO: 1031354 - protein, 188 aa, Homo sapiens
MGYKDNDGEEEEREGGAAGPRGSRLPPITGGASELAKRKVKKKKRKKKTKGSGKGDDKHQSQSLKSQPLSSSFHDILSPCKERGPKPEHRQSKVEKKHLPSDSSTVSLPDFAEIENLANRINESLRWDGILADPEAEKERIRIYKLNRRDGSSSHRQPTSKAECPNLCFEGNLTPKLLHSDLAPTLLE

SEQ ID NO: 1031355 - protein, 254 aa, Homo sapiens
  misc_feature (17)..(17): Xaa can be any naturally occurring amino acid
  misc_feature (22)..(22): Xaa can be any naturally occurring amino acid
  misc_feature (36)..(36): Xaa can be any naturally occurring amino acid
  misc_feature (45)..(45): Xaa can be any naturally occurring amino acid
  misc_feature (68)..(68): Xaa can be any naturally occurring amino acid
QFAGSLSAAPRFSETAXTMGFXDLKSPAGLQVLNDXLAHTPLHPXVCALTKQLWQYLNALSSPPPAHXSHPLRWYNHIKSYEKEKRQPPGVKKALGKYGPADVEDTTGSGATDSKDDDDIDLFGSDDEEESEEAKRLREEPLAQYESKKAKKPALVAKSSILLDVKPWDDETDMAKLEECVRSIQADGLVWGSFKLGPVGYGIKKLQIQCVVEDDKVGTDMLEEQITAFERLCAVHDVAAFNNTKSILCILLAS

SEQ ID NO: 1031356 - protein, 314 aa, Homo sapiens
AAVVLVVRAQRLTGRIAFAAARPQTFVPGPSSPPPPPPPRPAELAPSPPADMSESKSGPEYASFFAVMGASAAMVFSALGAAYGTAKSGTGIAAMSVMRPEQIMKSIIPVVMAGIIAIYGLVVAVLIANSLNDDISLYKSFLQLGAGLSVGLSGLAAGFAIGIVGDAGVRGTAQQPRLFVGMILILIFAEVLGLYGLIVALIRLHKVDPLRAHQPQKYYCKDHPSSFQNEQPDYNTHGGASPDSGVYMPQCPSAIVCNHGQGDKKRAKENATTHRQERASSSNSPKTRDRNRPQTDTTNRRSTRDSRRRQNDNN

SEQ ID NO: 1031357 - protein, 63 aa, Homo sapiens
AAVVLVVRAQRLTGRIAFAAARPQTFVPGPSSPPPPHAANCPSPPQMSSPAHASAPPLLPAPP

SEQ ID NO: 1031358 - protein, 519 aa, Homo sapiens
MASSPAVDVSCRRREKRRQLDARRSKCRIRLGGHMEQWCLLKERLGFSLHSQLAKFLLDRYTSSGCVLCAGPEPLPPKGLQYLVLLSHAHSRECSLVPGLRGPGGQDGGLVWECSAGHTFSWGPSLSPTPSEAPKPASLPHTTRRSWCSEATSGQELADLESEHDERTQEARLPRRVGPPPETFPPPGEEEGEEEEDNDEDEEEMLSDASLWTYSSSPDDSEPDAPRLLPSPVTCTPKEGETPPAPAALSSPLAVPALSASSLSSRAPPPAEVRVQPQLSRTPQAAQQTEALASTGSQAQSAPTPAWDEDTAQIGPKRIRKAAKRELMPCDFPGCGRIFSNRQYLNHHKKYQHIHQKSFSCPEPACGKSFNFKKHLKEHMKLHSDTRDYICEFCARSFRTSSNLVIHRRIHTGEKPLQCEICGFTCRQKASLNWHQRKHAETVAALRFPCEFCGKRFEKPDSVAAHRSKSHPALLLAPQESPSGPLEPCPSISAPGPLGSSEGSRPSASPQAPTLLPQQ

SEQ ID NO: 1031359 - protein, 510 aa, Homo sapiens
WLSEAAGLKFRATAADAERHRFFLKEKRCAREPLVHMASSPAVDVSCRRREKRRQLDARRSKCRIRLGGHMEQWCLLKERLGFSLHSQLAKFLLDRYTSSGCVLCAGPEPLPPKGLQYLVLLSHAHSRECSLVPGLRGPGGQDGGLVWECSAGHTFSWGPSLSPTPSEAPKPASLPHTTRRSWCSEATSGQELADLESEHDERTQEARLPSSEPDAPRLLPSPVTCTPKEGETPPAPAALSSPLAVPALSASSLSSRAPPPAEVRVQPQLSRTPQAAQQTEALASTGSQAQSAPTPAWDEDTAQIGPKRIRKAAKRELMPCDFPGCGRIFSNRQYLNHHKKYQHIHQKSFSCPEPACGKSFNFKKHLKEHMKLHSDTRDYICEFCARSFRTSSNLVIHRRIHTGEKPLQCEICGFTCRQKASLNWHQRKHAETVAALRFPCEFCGKRFEKPDSVAAHRSKSHPALLLAPQESPSGPLEPCPSISAPGPLGSSEGSRPSASPQAPTLLPQQ

SEQ ID NO: 1031360 - protein, 241 aa, Homo sapiens [sequence omitted]

SEQ ID NO: 1031361 - protein, 315 aa, Homo sapiens
MLSDASLWTYSSSPDDSEPDAPRLLPSPVTCTPKEGETPPAPAALSSPLAVPALSASSLSSRAPPPAEVRVQPQLSRTPQAAQQTEALASTGSQAQSAPTPAWDEDTAQIGPKRIRKAAKRELMPCDFPGCGRIFSNRQYLNHHKKYQHIHQKSFSCPEPACGKSFNFKKHLKEHMKLHSDTRDYICEFCARSFRTSSNLVIHRRIHTGEKPLQCEICGFTCRQKASLNWHQRKHAETVAALRFPCEFCGKRFEKPDSVAAHRSKSHPALLLAPQESPSGPLEPCPSISAPGPLGSSEGSRPSASPQAPTLLPQQ

SEQ ID NO: 1031362 - protein, 192 aa, Homo sapiens
MPCDFPGCGRIFSNRQYLNHHKKYQHIHQKSFSCPEPACGKSFNFKKHLKEHMKLHSDTRDYICEFCARSFRTSSNLVIHRRIHTGEKPLQCEICGFTCRQKASLNWHQRKHAETVAALRFPCEFCGKRFEKPDSVAAHRSKSHPALLLAPQESPSGPLEPCPSISAPGPLGSSEGSRPSASPQAPTLLPQQ

SEQ ID NO: 1031363 - protein, 512 aa, Homo sapiens
MCECPGLRVAGHLSPDLPLLLLAGTLLQAVSSVQVGRGWQGVRARGKRDHRVTQKHPPFKGSPGPEPLPPKGLQYLVLLSHAHSRECSLVPGLRGPGGQDGGLVWECSAGHTFSWGPSLSPTPSEAPKPASLPHTTRRSWCSEATSGQELADLESEHDERTQEARLPRRVGPPPETFPPPGEEEGEEEEDNDEDEEEMLSDASLWTYSSSPDDSEPDAPRLLPSPVTCTPKEGETPPAPAALSSPLAVPALSASSLSSRAPPPAEVRVQPQLSRTPQAAQQTEALASTGSQAQSAPTPAWDEDTAQIGPKRIRKAAKRELMPCDFPGCGRIFSNRQYLNHHKKYQHIHQKSFSCPEPACGKSFNFKKHLKEHMKLHSDTRDYICEFCARSFRTSSNLVIHRRIHTGEKPLQCEICGFTCRQKASLNWHQRKHAETVAALRFPCEFCGKRFEKPDSVAAHRSKSHPALLLAPQESPSGPLEPCPSISAPGPLGSSEGSRPSASPQAPTLLPQQ

SEQ ID NO: 1031364 - protein, 398 aa, Homo sapiens
MASSPAVDVSCRRREKRRQLDARRSKCRIRLGGHMEQWCLLKERLGFSLHSQLAKFLLDRYTSSGCVLCAGPEPLPPKGLQYLVLLSHAHSRECSLVPGLRGPGGQDGGLVWECSAGHTFSWGPSLSPTPSEAPKPASLPHTTRRSWCSEATSGQELADLESEHDERTQEARLPRRVGPPPETFPPPGEEEGEEEEDNDEDEEEMLSDASLWTYSSSPDDSEPDAPRLLPSPVTCTPKEGETPPAPAALSSPLAVPALSASSLSSRAPPPAEVRVQPQLSRTPQAAQQTEALASTGSQAQSAPTPAWDEDTAQIGPKRIRKAAKRELMPCDFPGCGRIFSNRQYLNHHKKYQHIHQKSFSCPEPACGKSFNFKKHLKEHMKLHSGKGGPDGLHDLDNN

SEQ ID NO: 1031365 - protein, 120 aa, Homo sapiens
MWPSLEALCSLFAARSTGSQAQSAPTPAWDEDTAQIGPKRIRKAAKRELMPCDFPGCGRIFSNRQYLNHHKKYQHIHQKSFSCPEPACGKSFNFKKHLKEHMKLHSGKGGPDGLHDLDNN

SEQ ID NO: 1031366 - protein, 140 aa, Homo sapiens
MKLHSDTRDYICEFCARSFRTSSNLVIHRRIHTGEKPLQCEICGFTCRQKASLNWHQRKHAETVAALRFPCEFCGKRFEKPDSVAAHRSKSHPALLLAPQESPSGPLEPCPSISAPGPLGSSEGSRPSASPQAPTLLPQQ

SEQ ID NO: 1031367 - protein, 140 aa, Homo sapiens; identical to SEQ ID NO: 1031366

SEQ ID NO: 1031368 - protein, 519 aa, Homo sapiens; identical to SEQ ID NO: 1031358

SEQ ID NO: 1031369 - protein, 193 aa, Homo sapiens
  misc_feature (65)..(66): Xaa can be any naturally occurring amino acid
  misc_feature (68)..(68): Xaa can be any naturally occurring amino acid
MWPSLEALCSLFAARSTGSQAQSAPTPAWDEDTAQIGPKRILEMLAKMMMLDCLCCIFPLVSCCXXNXSSQSRARYFLNVTQQENVPMQTSSHLKKAFFFLAPRSASPCWGKFFFKLFNEQQPLRWEATFDMLCNKVTPPGDIQFLVKVSLQPRGPFPRNLAKQTPFVNSNKDSNSNNLGRKKTPPCKVVEDY

SEQ ID NO: 1031370 - protein, 116 aa, Homo sapiens
MGAEDVPSTLQPLVHMASSPAVDVSCRRREKRRQLDARRSKCRIRLGGHMEQWCLLKERLGFSLHSQLAKFLLDRLGAGRRAWGRVPRQQPLASSPGPVLLLFSTLRFLTLPGRPV

SEQ ID NO: 1031371 - protein, 197 aa, Homo sapiens
MAGGESQREEGPQGDPETPSFQREPPASSPSRVTQWSPRALSQHLCPWASGIQRGVQALCISSGSNPASSAMSSPPALALGSQTPGTEKEQQGEGLLEKCQMLGPQELRRQSAGWGQDWAVGELDYFSLPKGQNKQYFMQAKTTQNWQHKHQHRPPPGTTHHHDPPRHSRQTETRNDTDNSYSRETNTESTTTNESI

SEQ ID NO: 1031372 - protein, 350 aa, Homo sapiens
MASSPAVDVSCRRREKRRQLDARRSKCRIRLGGHMEQWCLLKERLGFSLHSQLAKFLLDRYTSSGCVLCAGPEPLPPKGLQYLVLLSHAQASSLSSRAPPPAEVRVQPQLSRTPQAAQQTEALASTGSQAQSAPTPAWDEDTAQIGPKRIRKAAKRELMPCDFPGCGRIFSNRQYLNHHKKYQHIHQKSFSCPEPACGKSFNFKKHLKEHMKLHSDTRDYICEFCARSFRTSSNLVIHRRIHTGEKPLQCEICGFTCRQKASLNWHQRKHAETVAALRFPCEFCGKRFEKPDSVAAHRSKSHPALLLAPQESPSGPLEPCPSISAPGPLGSSEGSRPSASPQAPTLLPQQ

SEQ ID NO: 1031373 - protein, 315 aa, Homo sapiens; identical to SEQ ID NO: 1031361

SEQ ID NO: 1031374 - protein, 241 aa, Homo sapiens [sequence omitted]

SEQ ID NO: 1031375 - protein, 192 aa, Homo sapiens; identical to SEQ ID NO: 1031362

SEQ ID NO: 1031376 - protein, 241 aa, Homo sapiens [sequence omitted]

SEQ ID NO: 1031377 - protein, 241 aa, Homo sapiens [sequence omitted]

SEQ ID NO: 1031378 - protein, 523 aa, Homo sapiens
MASSPAVDVSCRRREKRRQLDARRSKCRIRLGGHMEQWCLLKERLGFSLHSQLAKFLLDRYTSSGCVLCAGPEPLPPKGLQYLVLLSHAHSRECSLVPGLRGPGGQDGGLVWECSAGHTFSWGPSLSPTPSEAPKPASLPHTTRRSWCSEATSGQELADLESEHDERTQEARLPRRVGPPPETFPPPGEEEGEEEEDNDEDEEEMLSDASLWTYSSSPDDSEPDAPRLLPSPVTCTPKEGETPPAPAALSSPLAVPALSASSLSSRAPPPAEVRVQPQLSRTPQAAQQTEALASTGSQAQSAPTPAWDEDTAQIGPKRIRKAAKRELMPCDFPGCGRIFSNRQYLNHHKKYQHIHQKSFSCPEPACGKSFNFKKHLKEHMKLHSDTRDYICEFCARSFRTSSNLVIHRRIHTGEKPLQCEICGFTCRQKASLNWHQRKHAETVAALRFPCEFCGKRFEKPDSVAAHRSKSHPALLLAPQESPSGPLWDPARGPGPLHLLRLQPCFLSNELSSSFGFGKPDSRD

SEQ ID NO: 1031379 - protein, 140 aa, Homo sapiens; identical to SEQ ID NO: 1031366

SEQ ID NO: 1031380 - protein, 139 aa, Homo sapiens
WLSEAAGLKFRATAADAERHRFFLKEKRCAREVGPCLPAAPGLLARPGRRRRRRSGGEGAWGRTASGAHGFLPGGGRVLQAAGEAAAAGRAPQQVPHPPGRPHGAVVPPQGAAGLLPALAARQVPVGPVHFFRLCPLCR

SEQ ID NO: 1031381 - protein, 315 aa, Homo sapiens; identical to SEQ ID NO: 1031361

SEQ ID NO: 1031382 - protein, 219 aa, Homo sapiens
MEAARDYAGALIRPLTFMGSQTKRVLFTPLMHPARPFRVSNHDRSSRRGVMASSLQELISKTLDALVIATGLVTLVLEEDGTVVDTEEFFQTLGDNTHFMILEKGQKWMPGSQHVPTCSPPKRSGIARVTFDLYRLNPKDFIGCLNVKATMYEMYSVSYDIRCTGLKGLLRSLLRFLSYSAQVTGQFLIYLGTYMLRVLDDKEERPSLRSQAKGRFTCG

SEQ ID NO: 1031383 - protein, 322 aa, Homo sapiens
GARGQSESRPAPPHPLAAGHRYQVWLLRGARASANQVTAGEWLHASLAAAAVAGAEEGPVPGTPSKASAMRGDRASGGPGNHNGSWAREGPRLGPSWKRGLWSPRGGPNRPAEPSRPLTFMGSQTKRVLFTPLMHPARPFRVSNHDRSSRRGVMASSLQELISKTLDALVIATGLVTLVLEEDGTVVDTEEFFQTLGDNTHFMILEKGQKWMPGSQHVPTCSPPKRSGIARVTFDLYRLNPKDFIGCLNVKATMYEMYSVSYDIRCTGLKGLLRSLLRFLSYSAQVTGQFLIYLGTYMLRVLDDKEERPSLRSQAKGRFTCG

SEQ ID NO: 1031384 - protein, 242 aa, Homo sapiens
GARGQSESRPAPPHPLAAGHRYQVWLLRGARASANQVTAGEWLHASLAAAAVAGAEEGPVPGTPSKASAMRGDRASGGPGNHNGSWAREGPRLGPSWKRGLWSPRGGPNRPAEPSRPLTFMGSQTKRVLFTPLMHPARPFRVSNHDRSSRRGVMASSLQELISKTLDALVIATGLVTLVLEEDGTVVDTEEFFQTLGDNTHFMILEKGQKWMPESAAVPVLLRPGDGTVSHLSGHIHAPGAG

SEQ ID NO: 1031385 - protein, 120 aa, Homo sapiens
TTYRLSSEARCLMEQFGGPAGLSLASTDVGTGTDPGTLFQPPTALRFPLRCATSGTSLLGRSPCFWDLPAPVLWVVSSVLCQANRMSSQILSMKLFHRRGVQACLDHACVKLCTVQASYT

SEQ ID NO: 1031386 - protein, 120 aa, Homo sapiens; identical to SEQ ID NO: 1031385

SEQ ID NO: 1031387 - protein, 120 aa, Homo sapiens; identical to SEQ ID NO: 1031385

SEQ ID NO: 1031388 - protein, 120 aa, Homo sapiens; identical to SEQ ID NO: 1031385

SEQ ID NO: 1031389 - protein, 120 aa, Homo sapiens; identical to SEQ ID NO: 1031385

SEQ ID NO: 1031390 - protein, 120 aa, Homo sapiens; identical to SEQ ID NO: 1031385

SEQ ID NO: 1031391 - protein, 152 aa, Homo sapiens
MWLWKGVSPAFYPRDAGRGRKAAEGYEASPEDAKPAWRPRLSFQDNQGKPAEDEWGKTPDAMKAAMALEKKLNQALLGSLNPRVLQPTDTPISVTSVETHFLDEEVKLIKKMGDHLNKPQRLGAPKLAFSKILRKGTLTRLKSFGPKLSKAP

SEQ ID NO: 1031392 - protein, 120 aa, Homo sapiens; identical to SEQ ID NO: 1031385

SEQ ID NO: 1031393 - protein, 172 aa, Homo sapiens
  misc_feature (108)..(108): Xaa can be any naturally occurring amino acid
TTYRLSSEARCLMEQFGGPAGLSLASTDVGTGTDPGTLFQPPTALRFPLRLGRSPPGTDSVRRVHPSCVSWEPWHSIRFSRWIRRPFVGAIQAMKPPRSAITKSYSRXERVLRHGVNRCWFDQYRAGLLHLASLVGFYFDRDDVALEGREPSFLSARCWPRKKSSRGLRGVS

SEQ ID NO: 1031394 - protein, 115 aa, Homo sapiens
MRFCACVSMLRSKGPAGLSLASTDVGTGTDPGTLFQPPTALRFPLRLQTPGASSRPSPAVWELTAPVLWVVSSVLCQANRMSSQILSMKLFHRRGVQACLDHACVKLCTVQASYT

SEQ ID NO: 1031395 - protein, 105 aa, Homo sapiens
SEPFERYSPSPAPGTQPVEVGQVSPILLDKLHFLIQGYEASPEDAKPAWRPRLSFQDNQGKPAEDEWGKTPDAMKAAMALEKKLNQALLDLHCPWVSCPHGPPSL

SEQ ID NO: 1031396 - protein, 131 aa, Homo sapiens
MWLWKGVSPAFYPRDAGRGRKAAEGYEASPEDAKPAWRPRLSFQDNQGKPAEDEWGKTPDAMKAAMALEKKLNQALLDLHCPWVSCPHGEGPHLWNSWRCILDESEVSEDGDTEQLQVVASGGILSKSSRR

SEQ ID NO: 1031397 - protein, 105 aa, Homo sapiens
MGVENRPGDARARVCSACLANRHLGGVIALGDGHTPPSSSLTLPWYDIELSYDDSRCGSFHSDERLRSHTPGLELVAHGKSRRRTSDLDEDSGGKAHSQARLRAF

SEQ ID NO: 1031398 - protein, 120 aa, Homo sapiens; identical to SEQ ID NO: 1031385

SEQ ID NO: 1031399 - protein, 120 aa, Homo sapiens; identical to SEQ ID NO: 1031385

SEQ ID NO: 1031400 - protein, 120 aa, Homo sapiens; identical to SEQ ID NO: 1031385

SEQ ID NO: 1031401 - protein, 120 aa, Homo sapiens; identical to SEQ ID NO: 1031385

SEQ ID NO: 1031402 - protein, 120 aa, Homo sapiens; identical to SEQ ID NO: 1031385

SEQ ID NO: 1031403 - protein, 115 aa, Homo sapiens; identical to SEQ ID NO: 1031394

SEQ ID NO: 1031404 - protein, 116 aa, Homo sapiens
TTYRLSSEARCLMEQFGGPAGLSLASTDVGTGTDPGTLFQPPTALRFPLRCATSGTSLLGRSPCFWDLPRLAVFYVVITTSHSLTQSRTPWSSQIPWRDYLHRTVVVQTSHKSAGC

SEQ ID NO: 1031405 - protein, 86 aa, Homo sapiens
SEGTTREGDSVSEDKRQGVYAVSGRTSRRELKMSGVRTRDASAMKSLPLALEKKAEPGPCWIFIARGFLARTDPHLCDFRGDSLPR

SEQ ID NO: 1031406 - protein, 78 aa, Homo sapiens
SSGTVACWLSELASLCHVWSSTPISVTSVETHFLDEEVKLIKKMGDHLNQPPQAGWPGGWAGRVSLRKAHSQARLRAF

SEQ ID NO: 1031407 - protein, 121 aa, Homo sapiens
TTYRLSSEARCLMEQFGGPAGLSLASTDVGTGTDPGTLFQPPTALRFPLRCANLPGTHLLRPIFPWHFLGEPLGPKVQTPGVTLTDLPGGVSRGRVLHLTRGPLMSPHQNFYFAVFVGAPT

SEQ ID NO: 1031408 - protein, 166 aa, Homo sapiens
MPPKFDPNEIKVVYLRCTGGEGSVPLLPWPPRSAPWVCLQKKLVMTIAKATGDWKGLRITVKLTIQNRQAQIEVVPSASALIIKALKEPPRDRKKQKNIKHSGNITFDEIVNIARQMRHRSLARELSGTIKEILGTAQSVGCNVDGRHPHDIIDDINSGAVECPAS

SEQ ID NO: 1031409 - protein, 198 aa, Homo sapiens
TRGSTHAARRRPRCNFLRSSRIRVHPTPAASTMPPKFDPNEIKVVYLRCTGGEGSVPLLPWPPRSAPWVCLQKKLVMTIAKATGDWKGLRITVKLTIQNRQAQIEVVPSASALIIKALKEPPRDRKKQKNIKHSGNITFDEIVNIARQMRHRSLARELSGTIKEILGTAQSVGCNVDGRHPHDIIDDINSGAVECPAS

SEQ ID NO: 1031410 - protein, 198 aa, Homo sapiens; identical to SEQ ID NO: 1031409

SEQ ID NO: 1031411 - protein, 205 aa, Homo sapiens
PLRLVRGWVWNRPTARRRPRCNFLRSSRIRVHPTPAASTMPPKFDPNEIKVVYLRCTGGEGSVPLLPWPPRSAPWVCLQKKLVMTIAKATGDWKGLRITVKLTIQNRQAQIEVVPSASALIIKALKEPPRDRKKQKNIKHSGNITFDEIVNIARQMRHRSLARELSGTIKEILGTAQSVGCNVDGRHPHDIIDDINSGAVECPAS

SEQ ID NO: 1031412 - protein, 126 aa, Homo sapiens
ASALIIKALKDHLNLGLRITVKLTIQNRQAQIEVVPSASALIIKALKEPPRDRKKQKNIKHSGNITFDEIVNIARQMRHRSLARELSGTIKEILGTAQSVGCNVDGRHPHDIIDDINSGAVECPAS

SEQ ID NO: 1031413 - protein, 259 aa, Homo sapiens
MVCRSVRCFNSVTGLWGLYLRSGVAGSTKQRSTMPPKFDPNEIKVVYLRCTGGEWSVPLLPWPPRSAPWVCLQKKLVMTIAKATGDWKGLRITVKLTIQNRQAQIEVVPSASALIIKALKEPPRDRKKQKNIKHSAETSLSSLLSLWGCKKIPPGEITAKSACSGRDGMRAGGPRPIPSRGARGRVLTKSAEGDHKLTMAAKGHLSSGHLNTSFFQKTWAVVEECPSNAVKKRNSGQPIPLWNLKKRGVLKHGKGIAAY

SEQ ID NO: 1031414 - protein, 203 aa, Homo sapiens
RPPTTTKFAAASARRRPRCNFLRSSRIRVHPTPAASTMPPKFDPNEIKVVYLRCTGGEGSVPLLPWPPRSAPWVCLQKKLVMTIAKATGDWKGLRITVKLTIQNRQAQIEVVPSASALIIKALKEPPRDRKKQKNIKHSGNITFDEIVNIARQMRHRSLARELSGTIKEILGTAQSVGCNVDGRHPHDIIDDINSGAVECPAS

SEQ ID NO: 1031415 - protein, 214 aa, Homo sapiens
MHRTSRVESDEASLSLSLSLSLSARRRPRCNFLRSSRIRVHPTPAASTMPPKFDPNEIKVVYLRCTGGEGSVPLLPWPPRSAPWVCLQKKLVMTIAKATGDWKGLRITVKLTIQNRQAQIEVVPSASALIIKALKEPPRDRKKQKNIKHSGNITFDEIVNIARQMRHRSLARELSGTIKEILGTAQSVGCNVDGRHPHDIIDDINSGAVECPAS

SEQ ID NO: 1031416 - protein, 166 aa, Homo sapiens; identical to SEQ ID NO: 1031408

SEQ ID NO: 1031417 - protein, 166 aa, Homo sapiens; identical to SEQ ID NO: 1031408

SEQ ID NO: 1031418 - protein, 166 aa, Homo sapiens; identical to SEQ ID NO: 1031408

SEQ ID NO: 1031419 - protein, 166 aa, Homo sapiens; identical to SEQ ID NO: 1031408

SEQ ID NO: 1031420 - protein, 166 aa, Homo sapiens; identical to SEQ ID NO: 1031408

SEQ ID NO: 1031421 - protein, 166 aa, Homo sapiens
DLLLCVDLLLCVDLLLCVDLLLCVDLLPWPPRSAPWVCLQKKLVMTIAKATGDWKGLRITVKLTIQNRQAQIEVVPSASALIIKALKEPPRDRKKQKNIKHSGNITFDEIVNIARQMRHRSLARELSGTIKEILGTAQSVGCNVDGRHPHDIIDDINSGAVECPAS

SEQ ID NO: 1031422 - protein, 124 aa, Homo sapiens
MVGATSALAPKIGPLRITVKLTIQNRQAQIEVVPSASALIIKALKEPPRDRKKQKNIKHSGNITFDEIVNIARQMRHRSLARELSGTIKEILGTAQSVGCNVDGRHPHDIIDDINSGAVECPAS

SEQ ID NO: 1031423 - protein, 205 aa, Homo sapiens; identical to SEQ ID NO: 1031411

SEQ ID NO: 1031424 - protein, 166 aa, Homo sapiens; identical to SEQ ID NO: 1031408

SEQ ID NO: 1031425 - protein, 128 aa, Homo sapiens
  misc_feature (11)..(11): Xaa can be any naturally occurring amino acid
GGRGRVAHTDXRLERPEFLRITVKLTIQNRQAQIEVVPSASALIIKALKEPPRDRKKQKNIKHSGNITFDEIVNIARQMRHRSLARELSGTIKEILGTAQSVGCNVDGRHPHDIIDDINSGAVECPAS

SEQ ID NO: 1031426 - protein, 117 aa, Homo sapiens
  misc_feature (19)..(19): Xaa can be any naturally occurring amino acid
  misc_feature (24)..(24): Xaa can be any naturally occurring amino acid
RTTAPNERPDPLPLKEEKXRLIMXLVPSASALIIKALKEPPRDRKKQKNIKHSGNITFDEIVNIARQMRHRSLARELSGTIKEILGTAQSVGCNVDGRHPHDIIDDINSGAVECPAS

SEQ ID NO: 1031427 - protein, 166 aa, Homo sapiens; identical to SEQ ID NO: 1031408

SEQ ID NO: 1031428 - protein, 166 aa, Homo sapiens; identical to SEQ ID NO: 1031408

SEQ ID NO: 1031429 - protein, 166 aa, Homo sapiens; identical to SEQ ID NO: 1031408

SEQ ID NO: 1031430 - protein, 166 aa, Homo sapiens; identical to SEQ ID NO: 1031408

SEQ ID NO: 1031431 - protein, 166 aa, Homo sapiens; identical to SEQ ID NO: 1031408

SEQ ID NO: 1031432 - protein, 166 aa, Homo sapiens; identical to SEQ ID NO: 1031408

SEQ ID NO: 1031433 - protein, 187 aa, Homo sapiens
RLDEASQSLSSRIGHRHQPLTMPRKIDPNEIKVVYLRCTGGEGSVPLLPWPPRSAPWVCLQKKLVMTIAKATGDWKGLRITVKLTIQNRQAQIEVVPSASALIIKALKEPPRDRKKQKNIKHSGNITFDEIVNIARQMRHRSLARELSGTIKEILGTAQSVGCNVDGRHPHDIIDDINSGAVECPAS

SEQ ID NO: 1031434 - protein, 197 aa, Homo sapiens
  misc_feature (1)..(1): Xaa can be any naturally occurring amino acid
  misc_feature (3)..(3): Xaa can be any naturally occurring amino acid
  misc_feature (6)..(6): Xaa can be any naturally occurring amino acid
  misc_feature (11)..(11): Xaa can be any naturally occurring amino acid
  misc_feature (17)..(18): Xaa can be any naturally occurring amino acid
XRXAGXKELEXPPGGLXXARRRPRCNFLRSSRIRVHPTPAASTMPPKFDPNEIKVVYLRCTGGEGSVPLLPWPPRSAPWVCLQKKLVMTIAKATGDWKGLRITVKLTIQNRQAQIEVVPSASALIIKALKEPPRDRKKQKNIKHSGQMRHRSLARELSGTIKEILGTAQSVGCNVDGRHPHDIIDDINSGAVECPAS

SEQ ID NO: 1031435 - protein, 165 aa, Homo sapiens [sequence omitted]

SEQ ID NO: 1031436 - protein, 220 aa, Homo sapiens
DPSGETVTVLWDLYNDLSPLRSQILMLGPARRRPRCNFLRSSRIRVHPTPAASTMPPKFDPNEIKVVYLRCTGGEGSVPLLPWPPRSAPWVCLQKKLVMTIAKATGDWKGLRITVKLTIQNRQAQIEVVPSASALIIKALKEPPRDRKKQKNIKHSGNITFDEIVNIARQMRHRSLARELSGTIKEILGTAQSVGCNVDGRHPHDIIDDINSGAVECPAS

SEQ ID NO: 1031437 - protein, 154 aa, Homo sapiens
MPPKFDPNEIKVVYLRCTGGEGSVPLLPWPPRSAPWVCLQKKLVMTIAKATGDWKGLRITVKLTIQNRQAQIEVVPSASALIIKALKEPPRDRKKQKNIKHSGQMRHRSLARELSGTIKEILGTAQSVGCNVDGRHPHDIIDDINSGAVECPAS

SEQ ID NO: 1031438 - protein, 1183 aa, Homo sapiens
PLCDRRAYLAMRRGLLRATTAALLLEAQAASGFLVDPVRNQRLYVHEAVKAGVVGPELHEQLLSAEKAVTGYRDPYSGSTISLFQAMQKGLVLRQHGIRLLEAQIATGGIIDPVHSHRVPVDVAYQRGYFSEEMNRVLADPSDDTKGFFDPNTHENLTYLQLLERCVEDPETGLRLLPLKGAEKAEVVETTQVYTEEETRRAFEETQIDIPGGGSHGGSTMSLWEVMQSDLIPEEQRAQLMADFQAGRVTKERMIIIIIEIIEKTEIIRQQGLASYDYVRRRLTAEDLFEARIISLETYNLLREGTRSLREALEAESAWCYLYGTGSVAGVYLPGSRQTLSIYQALKKGLLSAEVARLLLEAQAATGFLLDPVKGERLTVDEAVRKGLVGPELHDRLLSAERAVTGYRDPYTEQTISLFQAMKKELIPTEEALRLLDAQLATGGIVDPRLGFHLPLEVAYQRGYLNKDTHEQLSEPSEVRSYVDPSTDERLSYTQLLRRCRRDDGTGQLLLPLSDARKLTFRGLRKQITMEELVRSQVMDEATALQLREGLTSIEEVTKNLQKFLEGTSCIAGVFVDATKERLSVYQAMKKGIIRPGTAFELLEAQAATGYVIDPIKGLKLTVEEAVRMGIVGPEFKDKLLSAERAVTGYKDPYSGKLISLFQAMKKGLILKDHGIRLLEAQIATGGIIDPEESHRLPVEVAYKRGLFDEEMNEILTDPSDDTKGFFDPNTEENLTYLQLMERCITDPQTGLCLLPLKEKKRERKTSSKSSVRKRRVVIVDPETGKEMSVYEAYRKGLIDHQTYLELSEQECEWEEITISSSDGVVKSMIIDRRSGRQYDIDDAIAKNLIDRSALDQYRAGTLSITEFADMLSGNAGGFRSRSSSVGSSSSYPISPAVSRTQLASWSDPTEETGPVAGILDTETLEKVSITEAMHRNLVDNITGQRLLEAQACTGGIIDPSTGERFPVTDAVNKGLVDKIMVDRINLAQKAFCGFEDPRTKTKMSAAQALKKGWLYYEAGQRFLEVQYLTGGLIEPDTPGRVPLDEALQRGTVDARTAQKLRDVGAYSKYLTCPKTKLKISYKDALDRSMVEEGTGLRLLEAAAQSTKGYYSPYSVSGSGSTAGSRTGSRTGSRAGSRRGSFDATGSGFSMTFSSSSYSSSGYGRRYASGSSASLGGPESAVA

SEQ ID NO: 1031439 - protein, 1183 aa, Homo sapiens; identical to SEQ ID NO: 1031438

SEQ ID NO: 1031440 - protein, 1183 aa, Homo sapiens; identical to SEQ ID NO: 1031438

SEQ ID NO: 1031441 - protein, 1183 aa, Homo sapiens; identical to SEQ ID NO: 1031438

SEQ ID NO: 1031442 - protein, 114 aa, Homo sapiens
MSASNPRPRGPRPSGEDGWELQTCPPGGSRGPSSLWSPTLGCRLPVSLPWSPSPLWAQGHQPGSVLTLLLHPALVSAATTPASTLRALHVPLTPGGWQVEVSGCWRLCKGRTLT

SEQ ID NO: 1031443 - protein, 368 aa, Homo sapiens
PLCDRRAYLAMRRGLLRATTAALLLEAQAASGFLVDPVRNQRLYVHEAVKAGVVGPELHEQLLSAEKAVTGYRDPYSGSTISLFQAMQKGLVLRQHGIRLLEAQIATGGIIDPVHSHRVPVDVAYQRGYFSEEMNRVLADPSDDTKGFFDPNTHENLTYLQLLERCVEDPETGLRLLPLKGAEKAEVVETTQVYTEEETRRAFEETQIDIPGGGSHGGSTMSLWEVMQSDLIPEEQRAQLMADFQAGRVTKERMIIIIIEIIEKTEIIRQQGLASYDYVRRRLTAEDLFEARIISLETYNLLREGTRSLREALEAESAWCYLYGTVWTLGTVWTLGTVWTLGTVWTLGTVWTLGTVWTLGTVWTLGTV

SEQ ID NO: 1031444 - protein, 1183 aa, Homo sapiens; identical to SEQ ID NO: 1031438

SEQ ID NO: 1031445 - protein, 1183 aa, Homo sapiens; identical to SEQ ID NO: 1031438

SEQ ID NO: 1031446 - protein, 1183 aa, Homo sapiens; identical to SEQ ID NO: 1031438

SEQ ID NO: 1031447 - protein, 5065 aa, Homo sapiens
MAATLGAGTPPRPQARSIAGVYVEASGQAQSVYAAMEQGLLPAGLGQALLEAQAATGGLVDLARGQLLPVSKALQQGLVGLELKEKLLAAERATTGYPDPYGGEKLALFQAIGKEVVDRALGQSWLEVQLATGGLVDPAQGVLVAPEPACHQGLLDRETWHKLSELEPGTGDLRFLNPNTLERLTYHQLLERCVRAPGSGLALLPLKITFRSMGGAVSAAELLEVGILDEQAVQGLREGRLAAVDVSARAEVRRYLEGTGSVAGVVLLPEGHKKSFFQAATEHLLPMGTALPLLEAQAATHTLVDPITGQRLWVDEAVRAGLVSPELHEQLLVAEQAVTGHHDPFSGSQIPLFQAMKKGLVDRPLALRLLDAQLATGGLVCPARRLRLPLEAALRCGCLDEDTQRQLSQAGSFSDGTHGGLRYEQLLALCVTDPETGLAFLPLSGGPRGGEPQGPPFIKYSTRQALSTATATVSVGKFRGRPVSLWELLFSEAISSEQRAMLAQQYQEGTLSVEKLAAELSATLEQAAATARVTFSGLRDTVTPGELLKAEIIDQDLYERLEHGQATAKDVGSLASAQRYLQGTGCIAGLLLPGSQERLSIYEARCKGLLRPGTALILLEAQAATGFIIDPKANKGHSVEEALRAAVIGPDVFAKLLSAERAVTGYTDPYTGQQISLFQAMQKGLIVREHGIRLLEAQIATGGVIDPVHSHRVPVDVAYRRGYFDQMLNLILLDPSDDTKGFFDPNTHENLTYLQLLERCVRDPETGLYLLPLSSTQSPLVDSATQQAFQNLLLSVKYGRFQGQRVSAWELINSEYFSEGRRRQLLRRYRQREVTLGQVAKLLEAETQRQADIMLPALRSRVTVHQLLEAGIIDQQLLDQVLAGTISPEALLLMDGVRRYLCGLGAVGGVRLLPSGQRLSLYQAMRQKLLGPRVALALLEAQAATGTIMDPHSPESLSVDEAVRRGVVGPELYGRLKRAEGAIAGFRDPFSGKQVSVFQAMKKGLIPWEQAARLLEAQVATGGIIDPTSHHHLPMPVAIQRGYVDQEMETALSSSSETFPTPDGQGRTSYAQLLEECPRDETSGLHLLPLPESAPALPTEEQVQRSLQAVPGAKDGTSLWDLLSSCHFTEEQRRGLLEDVQEGRTTVPQLLASVQRWVQETKLLAQARVMVPGPRGEVPAVWLLDAGIITQETLEALAQGTQSPAQVAEQPAVKACLWGTGCVAGVLLQPSGAKASIAQAVRDGLLPTGLGQRLLEAQVASGFLVDPLNNQRLSVEDAVKVGLVGRELSEQLGQAERAAAGYPDPYSRASLSLWQAMEKGLVPQNEGLPLLQVQLATGGVVDPVHGVHLPQAAACRLGLLDTQTSQVLTAVDKDNKFFFDPSARDQVTYQQLRERCVCDSETGLLLLPLPSDTVLEVDDHTAVALRAMKVPVSTGRFKGCSVSLWDLLLSEYVGADKRRELVALCRSGRAAALRQVVSAVTALVEAAERQPLQATFRGLRKQVSARDLFRAQLISRKTLDELSQGTTTVKEVAEMDSVKRSLEGGNFIAGVLIQGTQERMSIPEALRRHILRPGTALVLLEAQAATGFIIDPAENRKLTVEEAFKAGMFGKETYVKLLSAERAVTGYTDPYTGQQISLFQAMQKDLIVREHGIRLLEAQIATGGIIDPVHSHRVPVDVAYRCGYFDEEMNRILADPSDDTKGFFDPNTHENLTYLQLLERCVEDPETGLYLLQIIKKGENYVYINEATRHVLQSRTAKMRVGRFADQVVSFWDLLSSPYFTEDRKRELIQEYGAQSGGLEKLLEIITTTIEETETQNQGIKVAAIRGEVTAADLFNSRVIDQKTLHTLRVGRTGGQALSTLECVKPYLEGSDCIAGVTVPSTREVMSLHEASRKELIPAAFATWLLEAQAATGFLLDPCTRQKLSVDEAVDVGLVNEELRERLLKAERAATGYRDPATGDTIPLFQAMQKQLIEKAEALRLLEVQVATGGVIDPQHHHRLPLETAYRRGCLHKDIYALISDQKHMRKRFVDPNTQEKVSYRELQERCRPQEDTGWVLFPVNKAARDSEHIDDETRRALEAEQVEITVGRFRGQKPTLWALLNSEYVTEEKKLQLVRMYRTHTRRALQTVAQLILELIEKQETSNKHLWFQGIRRQITASELLSSAIITEEMLQDLETGRSTTQELMEDDRVKRYLEGTSCIAGVLVPAKDQPGRQEKMSIYQAMWKGVLRPGTALVLLEAQAATGFVIDPVRNLRLSVEEPVPAGVVGSEIQEKLLSAERAVTGYTDPYTGQQISLFQAMQKDLIVREHGIRLLEAQIATGGVIDPVHSHRVPVDVAYRRGYFDEEMNRVLADPSDDTKGFFDPNTHENLTYVQLLRRCVPDPDTGLYMLQLAGRGSAVHQLSEELRCALRDARVTPGSGALQGQSVSVWELLFYREVSEDRRQDLLSRYRAGTLTVEELGATLTSLLAQAQAQARAEAEAGSPRPDPREALRAATMEVKVGRLRGRAVPVWDVLASGYVSRAAREELLAEFGSGTLDLPALTRRLTAIIEEAEEAPGARPQLQDARRGPREPGPAGRGDGDSGRSQREGQGEGETQEAAAAAAAARRQEQTLRDATMEVQRGQFQGRPVSVWDVLFSSYLSEARRDELLAQHAAGALGLPDLVAVLTRVIEETEERLSKVSFRGLRRQVSASELHTSGILGPETLRDLAQGTKTLQEVTEMDSVKRYLEGTSCIAGVLVPAKDQPGRQEKMSIYQAMWKGVLRPGTALVLLEAQAATGFVIDPVRNLRLSVEEAVAAGVVGGEIQEKLLSAERAVTGYTDPYTGQQISLFQAMQKDLIVREHGIRLLEAQIATGGVIDPVHSHRVPVDVAYRRGYFDEEMNRVLADPSDDTKGFFDPNTHENLTYVQLLRRCVPDPDTGLYMLQLAGRGSAVHQLSEELRCALRDARVTPGSGALQGQSVSVWELLFYREVSEDRRQDLLSRYRAGTLTVEELGATLTSLLAQAQAQARAEAEAGSPRPDPREALRAATMEVKVGRLRGRAVPVWDVLASGYVSGAAREELLAEFGSGTLDLPALTRRLTAIIEEAEEAPGARPQLQDAWRGPREPGPAGRGDGDSGRSQREGQGEGETQEAAAAAAAARRQEQTLRDATMEVQRGQFQGRPVSVWDVLFSSYLSEARRDELLAQHAAGALGLPDLVAVLTRVIEETEERLSKVSFRGLRRQVSASELHTSGILGPETLRDLAQGTKTLQEVTEMDSVKRYLEGTSCIAGVLVPAKDQPGRQEKMSIYQAMWKGVLRPGTALVLLEAQAATGFVIDPVRNLRLSVEEAVAAGVVGGEIQEKLLSAERAVTGYTDPYTGQQISLFQAMQKDLIVREHGIRLLEAQIATGGVIDPVHSHRVPVDVAYRRGYFDEEMNRVLADPSDDTKGFFDPNTHENLTYVQLLRRCVPDPDTGLYMLQLAGRGSAVHQLSEELRCALRDARVTPGSGALQGQSVSVWELLFYREVSEDRRQDLLSRYRAGTLTVEELGATLTSLLAQAQAQARAEAEAGSPRPDPREALRAATMEVKVGRLRGRAVPVWDVLASGYVSGAAREELLAEFGSGTLDLPALTRRLTAIIEEAEEAPGARPQLQDAWRGPREPGPAGRGDGDSGRSQREGQGEGETQEAAAAAAAARRQEQTLRDATMEVQRGQFQGRPVSVWDVLFSSYLSEARRDELLAQHAAGALGLPDLVAVLTRVIEETEERLSKVSFRGLRRQVSASELHTSGILGPETLRDLAQGTKTLQEVTEMDSVKRYLEGTSCIAGVLVPAKDQPGRQEKMSIYQAMWKGVLRPGTALVLLEAQAATGFVIDPVRNLRLSVEEAVAAGVVGGEIQEKLLSAERAVTGYTDPYTGQQISLFQAMQKDLIVREHGIRLLEAQIATGGVIDPVHSHRVPVDVAYRRGYFDEEMNRVLADPSDDTKGFFDPNTHENLTYVQLLRRCVPDPDTGLYMLQLAGRGSAVHQLSEELRCALRDARVTPGSGALQGQSVSVWELLFYREVSEDRRQDLLSRYRASTLTVEELGATLTSLLAQAQAQARAEAEAGSPRPDPREALRAATMEVKVGRLRGRAVPVWDVLASGYVSRAAREELLAEFGSGTLDLPALTRRLTAIIEEAEEAPGARPQLQDAWRGPREPGPAGRGDGDSGRSQREGQGEGETQEAAAATAAARRQEQTLRDATMEVQRGQFQGRPVSVWDVLFSSYLSEARRDELLAQHAAGALGLPDLVAVLTRVIEETEERLSKVSFRGLRRQVSASELHTSGILGPETLRDLAQGTKTLQEVTEMDSVKRYLEGTSCIAGVLVPAKDQPGRQEKMSIYQAMWKGVLRPGTALVLLEAQAATGFVIDPVRNLRLSVEEAVAAGVVGGEIQEKLLSAERAVTGYTDPYTGQQISLFQAMQKDLIVREHGIRLLEAQIATGGVIDPVHSHRVPVDVAYRRGYFDEEMNRVLADPSDDTKGFFDPNTHENLTYVQLLRRCVPDPDTGLYMLQLAGRGSAVHQLSEELRCALRDARVTPGSGALQGQSVSVWELLFYREVSEDRRQDLLSRYRAGTLTVEELGATLTSLLAQAQAQARAEAEAGSPRPDPREALRAATMEVKVGRLRGRAVPVWDVLASGYVSGAAREELLAEFGSGTLDLPALTRRLTAIIEEAEEAPGARPQLQDAWRGPREPGPAGRGDGDSGRSQREGQGEGETQEAAAAAAAARRQEQTLRDATMEVQRGQFQGRPVSVWDVLFSSYLSEARRDELLAQHAAGALGLPDLVAVLTRVIEETEERLSKVSFRGLRRQVSASELHTSGILGPETLRDLAQGTKTLQEVTEMDSVKRYLEGTSCIAGVLVPAKDQPGRQEKMSIYQAMWKGVLRPGTALVLLEAQAATGFVIDPVRNLRLSVEEAVAAGVVGGEIQEKLLSAERAVTGYTDPYTGQQISLFQAMQKDLIVREHGIRLLEAQIATGGVIDPVHSHRVPVDVAYRRGYFDEEMNRVLADPSDDTKGFFDPNTHENLTYLQLLQRATLDPETGLLFLSLSLQ

SEQ ID NO: 1031448 - protein, 559 aa, Homo sapiens
MATATIALQVNGQQGGGSEPAAAAAVVAAGDKWKPPQGTDSIKMENGQSTAAKLGLPPLTPEQQEALQKAKKYAMEQSIKSVLVKQTIAHQQQQLTNLQMAAVTMGFGDPLSPLQSMAAQRQRALAIMCRVYVGSIYYELGEDTIRQAFAPFGPIKSIDMSWDSVTMKHKGFAFVEYEVPEAAQLALEQMNSVMLGGRNIKVGRPSNIGQAQPIIDQLAEEARAFNRIYVASVHQDLSDDDIKSVFEAFGKIKSCTLARDPTTGKHKGYGFIEYEKAQSSQDAVSSMNLFDLGGQYLRVGKAVTPPMPLLTPATPGGLPPAAAVAAAAATAKITAQEAVAGAAVLGTLGTPGLVSPALTLAQPLGTLPQAVMAAQAPGVITGVTPARPPIPVTIPSVGVVNPILASPPTLGLLEPKKEKEEEELFPESERPEMLSEQEHMSISGSSARHMVMQKLLRKQESTVMVLRNMVDPKDIDDDLEGEVTEECGKFGAVNRVIIYQEKQGEEEDAEIIVKIFVEFSIASETHKAIQALNGRWFAGRKVVAEVYDQERFDNSDLSA

SEQ ID NO: 1031449 - protein, 542 aa, Homo sapiens
MATATIALQVNGQQGGGSEPAAAAAVVAAGDKWKPPQGTDSIKMENGQSTAAKLGLPPLTPEQQEALQKAKKYAMEQSIKSVLVKQTIAHQQQQLTNLQMAAQRQRALAIMCRVYVGSIYYELGEDTIRQAFAPFGPIKSIDMSWDSVTMKHKGFAFVEYEVPEAAQLALEQMNSVMLGGRNIKVGRPSNIGQAQPIIDQLAEEARAFNRIYVASVHQDLSDDDIKSVFEAFGKIKSCTLARDPTTGKHKGYGFIEYEKAQSSQDAVSSMNLFDLGGQYLRVGKAVTPPMPLLTPATPGGLPPAAAVAAAAATAKITAQEAVAGAAVLGTLGTPGLVSPALTLAQPLGTLPQAVMAAQAPGVITGVTPARPPIPVTIPSVGVVNPILASPPTLGLLEPKKEKEEEELFPESERPEMLSEQEHMSISGSSARHMVMQKLLRKQESTVMVLRNMVDPKDIDDDLEGEVTEECGKFGAVNRVIIYQEKQGEEEDAEIIVKIFVEFSIASETHKAIQALNGRWFAGRKVVAEVYDQERFDNSDLSA

SEQ ID NO: 1031450 - protein, 559 aa, Homo sapiens; identical to SEQ ID NO: 1031448

SEQ ID NO: 1031451 - protein, 559 aa, Homo sapiens; identical to SEQ ID NO: 1031448

SEQ ID NO: 1031452 - protein, 516 aa, Homo sapiens
MENGQSTAAKLGLPPLTPEQQEALQKAKKYAMEQSIKSVLVKQTIAHQQQQLTNLQMAAVTMGFGDPLSPLQSMAAQRQRALAIMCRVYVGSIYYELGEDTIRQAFAPFGPIKSIDMSWDSVTMKHKGFAFVEYEVPEAAQLALEQMNSVMLGGRNIKVGRPSNIGQAQPIIDQLAEEARAFNRIYVASVHQDLSDDDIKSVFEAFGKIKSCTLARDPTTGKHKGYGFIEYEKAQSSQDAVSSMNLFDLGGQYLRVGKAVTPPMPLLTPATPGGLPPAAAVAAAAATAKITAQEAVAGAAVLGTLGTPGLVSPALTLAQPLGTLPQAVMAAQAPGVITGVTPARPPIPVTIPSVGVVNPILASPPTLGLLEPKKEKEEEELFPESERPEMLSEQEHMSISGSSARHMVMQKLLRKQESTVMVLRNMVDPKDIDDDLEGEVTEECGKFGAVNRVIIYQEKQGEEEDAEIIVKIFVEFSIASETHKAIQALNGRWFAGRKVVAEVYDQERFDNSDLSA

SEQ ID NO: 1031453 - protein, 516 aa, Homo sapiens; identical to SEQ ID NO: 1031452

SEQ ID NO: 1031454 - protein, 494 aa, Homo sapiens
MATATIALQVNGQQGGGSEPAAAAAVVAAGDKWKPPQGTDSIKMENGQSTAAKLGLPPLTPEQQEALQKAKKYAMEQSIKSVLVKQTIAHQQQQLTNLQMAAVTMGFGDPLSPLQSMAAQRQRALAIMCRVYVGSIYYELGEDTIRQAFAPFGPIKSIDMSWDSVTMKHKGFAFVEYEVPEAAQLALEQMNSVMLGGRNIKVGRPSNIGQAQPIIDQLAEEARAFNRIYVASVHQDLSDDDIKSVFEAFGKIKSCTLARDPTTGKHKGYGFIEYEKAQSSQDAVSSMNLFDLGGQYLRVGKAVTPPMPLLTPGVITGVTPARPPIPVTIPSVGVVNPILASPPTLGLLEPKKEKEEEELFPESERPEMLSEQEHMSISGSSARHMVMQKLLRKQESTVMVLRNMVDPKDIDDDLEGEVTEECGKFGAVNRVIIYQEKQGEEEDAEIIVKIFVEFSIASETHKAIQALNGRWFAGRKVVAEVYDQERFDNSDLSA

SEQ ID NO: 1031455 - protein, 550 aa, Homo sapiens
MATATIALQVNGQQGGGSEPAAAAAVVAAGDKWKPPQGTDSIKMENGQSTAAKLGLPPLTPEQQEALQKAKKYAMEQSIKSVLVKQTIAHQQQQLTNLQMAAVTMGFGDPLSPLQSMAAQRQRALAIMCRVYVGSIYYELGEDTIRQAFAPFGPIKSIDMSWDSVTMKHKGFAFVEYEVPEAAQLALEQMNSVMLGGRNIKVGRPSNIGQAQPIIDQLAEEARAFNRIYVASVHQDLSDDDIKSVFEAFGKIKSCTLARDPTTEYEKAQSSQDAVSSMNLFDLGGQYLRVGKAVTPPMPLLTPATPGGLPPAAAVAAAAATAKITAQEAVAGAAVLGTLGTPGLVSPALTLAQPLGTLPQAVMAAQAPGVITGVTPARPPIPVTIPSVGVVNPILASPPTLGLLEPKKEKEEEELFPESERPEMLSEQEHMSISGSSARHMVMQKLLRKQESTVMVLRNMVDPKDIDDDLEGEVTEECGKFGAVNRVIIYQEKQGEEEDAEIIVKIFVEFSIASETHKAIQALNGRWFAGRKVVAEVYDQERFDNSDLSA

SEQ ID NO: 1031456 - protein, 525 aa, Homo sapiens
MATATIALQVNGQQGGGSEPAAAAAVVAAGDKWKPPQGTDSIKMENGQSTAAKLGLPPLTPEQQEALQKAKKYAMEQSIKSVLVKQTIAHQQQQLTNLQMAAVTMGFGDPLSPLQSMAAQRQRALAIMCRVYVGSIYYELGEDTIRQAFAPFGPIKSIDMSWDSVTMKHKGFAFVEYEVPEAAQLALEQMNSVMLGGRNIKVGRPSNIGQAQPIIDQLAEEARAFNRIYVASVHQDLSDDDIKSVFEAFGKIKSCTLARDPTTGKHKGYGFIEYEKAQSSQDAVSSMNLFDLGGQYLRVGKAVTPPMPLLTPATPGGLPPAAAVAAAAATAKITAQEAVAGAAVLGTLGTPGLVSPALTLAQPLGTLPQAVMAAQAPGVITGVTPARPPIPVTIPSVGVVNPILASPPTLGLLEPKKEKEEEELFPESERPEMLSEQEHMSISGSSARHMVMQKLLRKQESTVMVLRNMVDPKDIDDDLEGEVTEECGKFGAVNRVIIYQEKQGEGGGWRINVRVLGGFHKPLKT

SEQ ID NO: 1031457 - protein, 499 aa, Homo sapiens
MENGQSTAAKLGLPPLTPEQQEALQKAKKYAMEQSIKSVLVKQTIAHQQQQLTNLQMAAQRQRALAIMCRVYVGSIYYELGEDTIRQAFAPFGPIKSIDMSWDSVTMKHKGFAFVEYEVPEAAQLALEQMNSVMLGGRNIKVGRPSNIGQAQPIIDQLAEEARAFNRIYVASVHQDLSDDDIKSVFEAFGKIKSCTLARDPTTGKHKGYGFIEYEKAQSSQDAVSSMNLFDLGGQYLRVGKAVTPPMPLLTPATPGGLPPAAAVAAAAATAKITAQEAVAGAAVLGTLGTPGLVSPALTLAQPLGTLPQAVMAAQAPGVITGVTPARPPIPVTIPSVGVVNPILASPPTLGLLEPKKEKEEEELFPESERPEMLSEQEHMSISGSSARHMVMQKLLRKQESTVMVLRNMVDPKDIDDDLEGEVTEECGKFGAVNRVIIYQEKQGEEEDAEIIVKIFVEFSIASETHKAIQALNGRWFAGRKVVAEVYDQERFDNSDLSA

SEQ ID NO: 1031458 - protein, 579 aa, Homo sapiens
MEQLNLADSGLVGKEARRCRRASPPMGMPSAWWLQNEAGCLFAARQVNGQQGGGSEPAAAAAVVAAGDKWKPPQGTDSIKMENGQSTAAKLGLPPLTPEQQEALQKAKKYAMEQSIKSVLVKQTIAHQQQQLTNLQMAAQRQRALAIMCRVYVGSIYYELGEDTIRQAFAPFGPIKSIDMSWDSVTMKHKGFAFVEYEVPEAAQLALEQMNSVMLGGRNIKVGRPSNIGQAQPIIDQLAEEARAFNRIYVASVHQDLSDDDIKSVFEAFGKIKSCTLARDPTTGKHKGYGFIEYEKAQSSQDAVSSMNLFDLGGQYLRVGKAVTPPMPLLTPATPGGLPPAAAVAAAAATAKITAQEAVAGAAVLGTLGTPGLVSPALTLAQPLGTLPQAVMAAQAPGVITGVTPARPPIPVTIPSVGVVNPILASPPTLGLLEPKKEKEEEELFPESERPEMLSEQEHMSISGSSARHMVMQKLLRKQESTVMVLRNMVDPKDIDDDLEGEVTEECGKFGAVNRVIIYQEKQGEEEDAEIIVKIFVEFSIASETHKAIQALNGRWFAGRKVVAEVYDQERFDNSDLSA

SEQ ID NO: 1031459 - protein, 443 aa, Homo sapiens [sequence omitted]

SEQ ID NO: 1031460 - protein, 425 aa, Homo sapiens
MATATIALQVNGQQGGGSEPAAAAAVVAAGDKWKPPQGTDSIKMENGQSTAAKLGLPPLTPEQQEALQKAKKYAMEQSIKSVLVKQTIAHQQQQLTNLQMAAVTMGFGDPLSPLQSMAAQRQRALAIMCRVYVGSIYYELGEDTIRQAFAPFGPIKSIDMSWDSVTMKHKGFAFVEYEVPEAAQLALEQMNSVMLGGRNIKVGRPSNIGQAQPIIDQLAEEARAFNRIYVASVHQDLSDDDIKSVFEAFGKIKSCTLARDPTTGKHKGYGFIEYEKAQSSQDAVSSMNLFDLGGQYLRVGKAVTPPMPLLTPATPGGLPPAAAVAAAAATAKITAQEAVAGAAVLGTLGTPGLVSPALTLAQPLGTLPQAVMAAQAPGVITGVTPARPPIPVTIPSVGVVNPILARTSSVGSYGCPVGGGSRIFV

SEQ ID NO: 1031461 - protein, 582 aa, Homo sapiens
MATATIALQVNGQQGGGSEPAAAAAVVAAGDKWKPPQGTDSIKMENGQSTAAKLGLPPLTPEQQEALQKAKKYAMEQSIKSVLVKQTIAHQQQQLTNLQMAAQRQRALAIMCRVYVGSIYYELGEDTIRQAFAPFGPIKSIDMSWDSVTMKHKGFAFVEYEVPEAAQLALEQMNSVMLGGRNIKVRQGSQGLDPHALQACHPRKPFCGRACVDRSFHLTGIFTQVGRPSNIGQAQPIIDQLAEEARAFNRIYVASVHQDLSDDDIKSVFEAFGKIKSCTLARDPTTGKHKGYGFIEYEKAQSSQDAVSSMNLFDLGGQYLRVGKAVTPPMPLLTPATPGGLPPAAAVAAAAATAKITAQEAVAGAAVLGTLGTPGLVSPALTLAQPLGTLPQAVMAAQAPGVITGVTPARPPIPVTIPSVGVVNPILASPPTLGLLEPKKEKEEEELFPESERPEMLSEQEHMSISGSSARHMVMQKLLRKQESTVMVLRNMVDPKDIDDDLEGEVTEECGKFGAVNRVIIYQEKQGEEEDAEIIVKIFVEFSIASETHKAIQALNGRWFAGRKVVAEVYDQERFDNSDLSA

SEQ ID NO: 1031462 - protein, 302 aa, Homo sapiens
MSRRGDDASHDVSLKHAGLSSPETPPAQEGPALSPASWGRASGRRTDSVFSKKGREEKRSSGRKGDGRRRVLRTPASATRRDTPDSSPAAHAPETPEVRGPRPSPGQEHAPSVAPPGGVYRSSPPRKRVLTSFLARVPCTGTQIARDSGRSKSGRRARRPRRTQDGDGDHSSPGQWPARRGVRAGGGGGSGGSGRQMETSTGHRLHQDGERAEHSRQAGAASPDARAAGGPSEGQEVRHGAEHQECAGEADHRAPAAAAHQPADGSSDNGLWRSSLTFAIDGGSAAAGAGHHVPRLRGLYLL

SEQ ID NO: 1031463 - protein, 347 aa, Homo sapiens
MATATIALQVNGQQGGGSEPAAAAAVVAAGDKWKPPQGTDSIKMENGQSTAAKLGLPPLTPEQQEALQKAKKYAMEQSIKSVLVKQTIAHQQQQLTNLQMAAVTMGFGDPLSPLQSMAAQRQRALAIMCRVYVGSIYYELGEDTIRQAFAPFGPIKSIDMSWDSVTMKHKGFAFVEYEVPEAAQLALEQMNSVMLGGRNIKVGRPSNIGQAQPIIDQLAEEARAFNRIYVASVHQDLSDDDIKSVFEAFGKIKSCTLARDPTTGKHKGYGFIEYEKAQSSQDAGSHELLTGGSLAVECNGCYTQAGPPPVGGLPANSEGGRGRQRAEGRLREDGERRIRSQRLKTHR

SEQ ID NO: 1031464 - protein, 382 aa, Homo sapiens
MSRRGDDASHDVSLKHAGLSSPETPPAQEGPALSPASWGRASGRRTDSVFSKKGREEKRSSGRKGDGRRRVLRTPASATRRDTPDSSPAAHAPETPEVRGPRPSPGQEHAPSVAPPGGVYRSSPPRKRVLTSFLREFRAPAPRSRETAEGARVGGARGGRDGRKMATATIALQVNGQQGGGSEPAAAAAVVAAGDKWKPPQGTDSIKMENGQSTAAKLGLPPLTPEQQEALQKAKKYAMEQSIKSVLVKQTIAHQQQQLTNLQMAAVTMGFGDPLSPLQSMAAQRQRALAIMCRVYVGSIYYELGEDTIRQAFAPFGPIKSIDMSWDSVTMKHKGFAFVEYEVPEAAQLALEQMNSVMLGGRNIKGGAGPQPTNRGQGPTPI

SEQ ID NO: 1031465 - protein, 318 aa, Homo sapiens
MSRRGDDASHDVSLKHAGLSSPETPPAQEGPALSPASWGRASGRRTDSVFSKKGREEKRSSGRKGDGRRRVLRTPASATRRDTPDSSPAAHAPETPEVRGPRPSPGQEHAPSVAPPGGVYRSSPPRKRVLTSFLREFRAPAPRSRETAEGARVGGARGGRDGRKMATATIALQVNGQQGGGSEPAAAAAVVAAGDKWKPPQGTDSIKMENGQSTAAKLGLPPLTPEQQEALQKAKKYAMEQSIKSVLVKQTIAHQQQQLTNLQMAAVTMGFGDPLSPLQSMAAQRQRALAIMCRVYVGSIYYELGEDTIRQAFAPLPL

SEQ ID NO: 1031466 - protein, 335 aa, Homo sapiens
MSRRGDDASHDVSLKHAGLSSPETPPAQEGPALSPASWGRASGRRTDSVFSKKGREEKRSSGRKGDGRRRVLRTPASATRRDTPDSSPAAHAPETPEVRGPRPSPGQEHAPSVAPPGGVYRSSPPRKRVLTSFLREFRAPAPRSRETAEGARVGGARGGRDGRKMATATIALQVNGQQGGGSEPAAAAAVVAAGDKWKPPQGTDSIKMENGQSTAAKLGLPPLTPEQQEALQKAKKYAMEQSIKSVLVKQTIAHQQQQLTNLQMAAVTMGFGDPLSPLQSINRNAHFFRGSCPESGLEGGSAAHVLGTLLPWPVLPASSGRAQQSARRGGAGGVG

SEQ ID NO: 1031467 - protein, 559 aa, Homo sapiens; identical to SEQ ID NO: 1031448

SEQ ID NO: 1031468 - protein, 559 aa, Homo sapiens; identical to SEQ ID NO: 1031448

SEQ ID NO: 1031469 - protein, 560 aa, Homo sapiens
MATATIALQVNGQQGGGSEPAAAAAVVAAGDKWKPPQGTDSIKMENGQSTAAKLGLPPLTPEQQEALQKAKKYAMEQSIKSVLVKQTIAHQQQQLTNLQMAAVTMGFGDPLSPLQSMAAQRQRALAIMCRVYVGSIYYELGEDTIRQAFAPFGPIKSIDMSWDSVTMKHKGFAFVEYEVPEAAQLALEQMNSVMLGGRNIKVGRPSNIGQAQPIIDQLAEEARAFNRIYVASVHQDLSDDDIKSVFEAFGKIKSCTLARDPTTLGSTQATGPAEYEKAQSSQDAVSSMNLFDLGGQYLRVGKAVTPPMPLLTPATPGGLPPAAAVAAAAATAKITAQEAVAGAAVLGTLGTPGLVSPALTLAQPLGTLPQAVMAAQAPGVITGVTPARPPIPVTIPSVGVVNPILASPPTLGLLEPKKEKEEEELFPESERPEMLSEQEHMSISGSSARHMVMQKLLRKQESTVMVLRNMVDPKDIDDDLEGEVTEECGKFGAVNRVIIYQEKQGEEEDAEIIVKIFVEFSIASETHKAIQALNGRWFAGRKVVAEVYDQERFDNSDLSA

SEQ ID NO: 1031470 - protein, 513 aa, Homo sapiens
MATATIALGTDSIKMENGQSTAAKLGLPPLTPEQQEALQKAKKYAMEQSIKSVLVKQTIAHQQQQLTNLQMAAQRQRALAIMCRVYVGSIYYELGEDTIRQAFAPFGPIKSIDMSWDSVTMKHKGFAFVEYEVPEAAQLALEQMNSVMLGGRNIKVGRPSNIGQAQPIIDQLAEEARAFNRIYVASVHQDLSDDDIKSVFEAFGKIKSCTLARDPTTGKHKGYGFIEYEKAQSSQDAVSSMNLFDLGGQYLRVGKAVTPPMPLLTPATPGGLPPAAAVAAAAATAKITAQEAVAGAAVLGTLGTPGLVSPALTLAQPLGTLPQAVMAAQAPGVITGVTPARPPIPVTIPSVGVVNPILASPPTLGLLEPKKEKEEEELFPESERPEMLSEQEHMSISGSSARHMVMQKLLRKQESTVMVLRNMVDPKDIDDDLEGEVTEECGKFGAVNRVIIYQEKQGEEEDAEIIVKIFVEFSIASETHKAIQALNGRWFAGRKVVAEVYDQERFDNSDLSA

SEQ ID NO: 1031471 - protein, 481 aa, Homo sapiens
MATATIALQVNGQQGGGSEPAAAAAVVAAGDKWKPPQGTDSIKMENGQSTAAKLGLPPLTPEQQEALQKAKKYAMEQSIKSVLVKQTIAHQQQQLTNLQMAAVTMGFGDPLSPLQSMAAQRQRALAIMCRVYVGSIYYELGEDTIRQAFAPFGPIKSIDMSWDSVTMKHKGFAFVEYEVPEAAQLALEQMNSVMLGGRNIKVGRPSNIGQAQPIIDQLAEEARAFNRIYVASVHQDLSDDDIKSVFEAFGKIKSCTLARDPTTGKHKGYGFIEYEKAQSSQDAVSSMNLFDLGGQYLRVGKAVTPPMPLLTPATPGGLPPAAAVAAAAATAKITAQEAVAGAAVLGTLGTPGLVSPALTLAQPLGTLPQAVMAAQAPGVITGVTPARPPIPVTIPSVGVVNPILASPPTLGLLEPKKEKEEEELFPESERPEMLSEQEHMSISGSSARHMVMQKLLRKQESRRGGGCRNHCQDLCGVFHSL

SEQ ID NO: 1031472 - protein, 543 aa, Homo sapiens
MATATIALQVNGQQGGGSEPAAAAAVVAAGDKWKPPQGTDSIKMENGQSTAAKLGLPPLTPEQQEALQKAKKYAMEQSIKSVLVKQTIAHQQQQLTNLQMAAVTMGFGDPLSPLQSMAAQRQRALAIMCRVYVGSIYYELGEDTIRQAFAPFGPIKSIDMSWDSVTMKHKGFAFVEYEVPEAAQLALEQMNSVMLGGRNIKVGRPSNIGQAQPIIDQLADLSDDDIKSVFEAFGKIKSCTLARDPTTGKHKGYGFIEYEKAQSSQDAVSSMNLFDLGGQYLRVGKAVTPPMPLLTPATPGGLPPAAAVAAAAATAKITAQEAVAGAAVLGTLGTPGLVSPALTLAQPLGTLPQAVMAAQAPGVITGVTPARPPIPVTIPSVGVVNPILASPPTLGLLEPKKEKEEEELFPESERPEMLSEQEHMSISGSSARHMVMQKLLRKQESTVMVLRNMVDPKDIDDDLEGEVTEECGKFGAVNRVIIYQEKQGEEEDAEIIVKIFVEFSIASETHKAIQALNGRWFAGRKVVAEVYDQERFDNSDLSA

SEQ ID NO: 1031473 - protein, 469 aa, Homo sapiens
LSSSPGVSSGQWLPCLLTSSLLATKPMAAQRQRALAIMCRVYVGSIYYELGEDTIRQAFAPFGPIKSIDMSWDSVTMKHKGFAFVEYEVPEAAQLALEQMNSVMLGGRNIKVGRPSNIGQAQPIIDQLAEEARAFNRIYVASVHQDLSDDDIKSVFEAFGKIKSCTLARDPTTGKHKGYGFIEYEKAQSSQDAVSSMNLFDLGGQYLRVGKAVTPPMPLLTPATPGGLPPAAAVAAAAATAKITAQEAVAGAAVLGTLGTPGLVSPALTLAQPLGTLPQAVMAAQAPGVITGVTPARPPIPVTIPSVGVVNPILASPPTLGLLEPKKEKEEEELFPESERPEMLSEQEHMSISGSSARHMVMQKLLRKQESTVMVLRNMVDPKDIDDDLEGEVTEECGKFGAVNRVIIYQEKQGEEEDAEIIVKIFVEFSIASETHKAIQALNGRWFAGRKVVAEVYDQERFDNSDLSA

SEQ ID NO: 1031474 - protein, 543 aa, Homo sapiens
MATATIALQVNGQQGGGSEPAAAAAVVAAGDKWKPPQGTDSIKMENGQSTAAKLGLPPLTPEQQEALQKAKKYAMEQSIKSVLVKQTIAHQQQQLTNLQMAAQRQRALAIMCRVYVGSIYYELGEDTIRQAFAPFGPIKSIDMSWDSVTMKHKGFAFVEYEVPEAAQLALEQMNSVMLGGRNIKVGRPSNIGQAQPIIDQLAEEARAFNRIYVASVHQDLSDDDIKSVFEAFGKIKSCTLARDPTTQWEAQGYGFIEYEKAQSSQDAVSSMNLFDLGGQYLRVGKAVTPPMPLLTPATPGGLPPAAAVAAAAATAKITAQEAVAGAAVLGTLGTPGLVSPALTLAQPLGTLPQAVMAAQAPGVITGVTPARPPIPVTIPSVGVVNPILASPPTLGLLEPKKEKEEEELFPESERPEMLSEQEHMSISGSSARHMVMQKLLRKQESTVMVLRNMVDPKDIDDDLEGEVTEECGKFGAVNRVIIYQEKQGEEEDAEIIVKIFVEFSIASETHKAIQALNGRWFAGRKVVAEVYDQERFDNSDLSA

SEQ ID NO: 1031475 - protein, 378 aa, Homo sapiens
MASKEGGPSRRRRRQWWQREVGRPSNIGQAQPIIDQLAEEARAFNRIYVASVHQDLSDDDIKSVFEAFGKIKSCTLARDPTTGKHKGYGFIEYEKAQSSQDAVSSMNLFDLGGQYLRVGKAVTPPMPLLTPATPGGLPPAAAVAAAAATAKITAQEAVAGAAVLGTLGTPGLVSPALTLAQPLGTLPQAVMAAQAPGVITGVTPARPPIPVTIPSVGVVNPILASPPTLGLLEPKKEKEEEELFPESERPEMLSEQEHMSISGSSARHMVMQKLLRKQESTVMVLRNMVDPKDIDDDLEGEVTEECGKFGAVNRVIIYQEKQGEEEDAEIIVKIFVEFSIASETHKAIQALNGRWFAGRKVVAEVYDQERFDNSDLSA

SEQ ID NO: 1031476 - protein, 327 aa, Homo sapiens
MATATIALQVNGQQGGGSEPAAAAAVVAAGDKWKPPQGTDSIKMENGQSTAAKLGLPPLTPEQQEALQKAKKYAMEQSIKSVLVKQTIAHQQQQLTNLQMAAQRQRALAIMCRVYVGSIYYELGEDTIRQAFAPFGPIKSIDMSWDSVTMKHKGFAFVEYEVPEAAQLALEQMNSVMLGGRNIKVGRPSNIGQAQPIIDQLAEEARAFNRIYVASVHQDLSDDDIKSVFEAFGKIKSCTLARDPTTGKHKGYGFIEYEKAQSSQDAVSSMNLFDLGGQYLRVGKAVTPPMPLLNPARLEAPPAVWATQNHCRNRQKQAEQVRPEHCM

SEQ ID NO: 1031477 - protein, 233 aa, Homo sapiens
MPEVRGPRPSPGQEHAPSVAPPGGVYRSSPPRKRVLTSFLARVPCTGTQIARDSGRSKSGRRARRPRRTQDGDGDHSSPGQWPARRGVRAGGGGGSGGSGRQMETSTGHRLHQDGERAEHSRQAGAASPDARAAGGPSEGQEVRHGAEHHDDLEGEVTEECGKFGAVNRVIIYQEKQGEEEDAEIIVKIFVEFSIASETHKAIQALNGRWFAGRKVVAEVYDQERFDNSDLSA

SEQ ID NO: 1031478 - protein, 516 aa, Homo sapiens; identical to SEQ ID NO: 1031452

SEQ ID NO: 1031479 - protein, 516 aa, Homo sapiens; identical to SEQ ID NO: 1031452

SEQ ID NO: 1031480 - protein, 516 aa, Homo sapiens; identical to SEQ ID NO: 1031452

SEQ ID NO: 1031481 - protein, 516 aa, Homo sapiens; identical to SEQ ID NO: 1031452

SEQ ID NO: 1031482 - protein, 160 aa, Homo sapiens [sequence omitted]

SEQ ID NO: 1031483 - protein, 160 aa, Homo sapiens [sequence omitted]

SEQ ID NO: 1031484 - protein, 160 aa, Homo sapiens [sequence omitted]

SEQ ID NO: 1031485 - protein, 160 aa, Homo sapiens [sequence omitted]

SEQ ID NO: 1031486 - protein, 160 aa, Homo sapiens [sequence omitted]

SEQ ID NO: 1031487 - protein, 160 aa, Homo sapiens [sequence omitted]

SEQ ID NO: 1031488 - protein, 160 aa, Homo sapiens [sequence omitted]

SEQ ID NO: 1031489 - protein, 160 aa, Homo sapiens [sequence omitted]

SEQ ID NO: 1031490 - protein, 106 aa, Homo sapiens
PYPSGSSKYSNENFEGRRVKGSRRVKGSRRVKGSRRVKGSRRVKGSRRVKGSRRVKGSRRVKGSRRVKGSRGLRAPGGLRAPGGLRAPGGLRAPGGLRAPGGLRAP

SEQ ID NO: 1031491 - protein, 459 aa, Homo sapiens
AARGSGCATAGLPCPSAQAGGPGALVPAEAATVAPLLIMNRGFSRKSHTFLPKIFFRKMSSSGAKDKPELQFPFLQDEDTVATLLECKTLFILRGLPGSGKSTLARVIVDKYRDGTKMVSADAYKITPGARGAFSEEYKRLDEDLAAYCRRRDIRILVLDDTNHERERLEQLFEMADQYQYQVVLVEPKTAWRLDCAQLKEKNQWQLSADDLKKLKPGLEKDFLPLYFGWFLTKKSSETLRKAGQVFLEELGNHKAFKKELRQFVPGDEPREKMDLVTYFGKRPPGVLHCTTKFCDYGKAPGAEEYAQQDVLKKSYSKAFTLTISALFVTPKTTGARVELSEQQLQLWPSDVDKLSPTDNLPRGSRAHITLGCAADVEAVQTGLDLLEILRQEKGGSRGEEVGELSRGKLYSLGNGRWMLTLAKNMEVRAIFTGYYGKGKPVPTQGSRKGGALQSCTII

SEQ ID NO: 1031492 - protein, 401 aa, Homo sapiens
MSSSGAKDKPELQFPFLQDEDTVATLLECKTLFILRGLPGSGKSTLARVIVDKYRDGTKMVSADAYKITPGARGAFSEEYKRLDEDLAAYCRRRDIRILVLDDTNHERERLEQLFEMADQYQYQVVLVEPKTAWRLDCAQLKEKNQWQLSADDLKKLKPGLEKDFLPLYFGWFLTKKSSETLRKAGQVFLEELGNHKAFKKELRQFVPGDEPREKMDLVTYFGKRPPGVLHCTTKFCDYGKAPGAEEYAQQDVLKKSYSKAFTLTISALFVTPKTTGARVELSEQQLQLWPSDVDKLSPTDNLPRGSRAHITLGCAADVEAVQTGLDLLEILRQEKGGSRGEEVGELSRGKLYSLGNGRWMLTLAKNMEVRAIFTGYYGKGKPVPTQGSRKGGALQSCTII

SEQ ID NO: 1031493 - protein, 401 aa, Homo sapiens; identical to SEQ ID NO: 1031492

SEQ ID NO: 1031494 - protein, 459 aa, Homo sapiens; identical to SEQ ID NO: 1031491

SEQ ID NO: 1031495 - protein, 459 aa, Homo sapiens; identical to SEQ ID NO: 1031491

SEQ ID NO: 1031496 - protein, 459 aa, Homo sapiens; identical to SEQ ID NO: 1031491

SEQ ID NO: 1031497 - protein, 68 aa, Homo sapiens
SGTRLGLCHRWTPVSLRAGGRPRSAGAGRGGDGGAPPHHEQRLLPKKPHIPAQDLLPQDVILRGQGQA

SEQ ID NO: 1031498 - protein, 512 aa, Homo sapiens
AARGSGCATAGLPCPSAQAGGPGALVPAEAATVAPLLIMNRGFSRKSHTFLPKIFFRKMSSSGAKDKPELQFPFLQDEDTVATLLECKTLFILRGLPGSGKSTLARVIVDKYRDGTKMVSADAYKITPGARGAFSEEYKRLDEDLAAYCRRRDIRILVLDDTNHERERLEQLFEMADQYQYQVVLVEPKTAWRLDCAQLKEKNQWQLSADDLKKLKPGLEKDFLPLYFGWFLTKKSSETLRKAGQVFLEELGNHKAFKKELRQFVPGDEPREKMDLVTYFGKRPPGVLHCTTKFCDYGKAPGAEEYAQQDVLKKSYSKAFTLTISALFVTPKTTGARVELSEQQLQLWPSDVDKLSPTDNLPRGSRAHITLGCAADVEAVQTGLDLLEILRQEKGGSRGEEVGELSRGKLYSLGNGRWMLTLAKNMEVRAIFTGYYGKGKPVPTQGSRKGGALQSCTLPTQGGQGGTIQEPGPKLTRLGQARDGATARTPSPTSRFWLAQPQPSPAALPRAG

SEQ ID NO: 1031499 - protein, 235 aa, Homo sapiens
SGTRLGLCHRWTPVSLRAGGRPRSAGAGRGGDGGAPPHHVVPGDEPREKMDLVTYFGKRPPGVLHCTTKFCDYGKAPGAEEYAQQDVLKKSYSKAFTLTISALFVTPKTTGARVELSEQQLQLWPSDVDKLSPTDNLPRGSRAHITLGCAADVEAVQTGLDLLEILRQEKGGSRGEEVGELSRGKLYSLGNGRWMLTLAKNMEVRAIFTGYYGKGKPVPTQGSRKGGALQSCTII

SEQ ID NO: 1031500 - protein, 459 aa, Homo sapiens; identical to SEQ ID NO: 1031491

SEQ ID NO: 1031501 - protein, 399 aa, Homo sapiens
AARGSGCATAGLPCPSAQAGGPGALVPAEAATVAPLLIMNRGFSRKSHTFLPKIFFRKMSSSGAKDKPELQFPFLQDEDTVATLLECKTLFILRGLPGSGKSTLARVIVDKYRDGTKMVSADAYKITPGARGAFSEEYKRLDEDLAAYCRRRDIRILVLDDTNHERERLEQLFEMADQYQYQVVLVEPKTAWRLDCAQLKEKNQWQLSADDLKKLKPGLEKDFLPLYFGWFLTKKSSETLRKAGQVFLEELGNHKAFKKELRQFVPGDEPREKMDLVTYFGKRPPGVLHCTTKFCDYGKAPGAEEYAQQDVLKKSYSKAFTLTISALFVTPKTTGARVELSEQQLQLWPSDANQDGWDGCSYLAFLSAVRPHQYSRAYNSYQGPEQRQLRSFIVIAHKS

SEQ ID NO: 1031502 - protein, 271 aa, Homo sapiens
AARGSGCATAGLPCPSAQAGGPGALVPAEAATVAPLLIMNRGFSRKSHTFLPKIFFRKMSSSGAKDKPELQFPFLQDEDTVATLLECKTLFILRGLPGSGKSTLARVIVDKYRDGTKMVSADAYKITPGARGAFSEEYKRLDEDLAAYCRRRDIRILVLDDTNHERERLEQLFEMADQYQYQVVLVEPKTAWRLDCAQLKEKNQWQLSADDLKKLKPGLEKDFLPLYFGWFLTKKSSETLRKAGQVFLEELGNHKAFKKELRQCRWQVGAL

SEQ ID NO: 1031503 - protein, 421 aa, Homo sapiens
MNRGFSRKSHTFLPKIFFRKMSSSGAKDKPELQFPFLQDEDTVATLLECKTLFILRGLPGSGKSTLARVIVDKYRDGTKMVSADAYKITPGARGAFSEEYKRLDEDLAAYCRRRDIRILVLDDTNHERERLEQLFEMADQYQYQVVLVEPKTAWRLDCAQLKEKNQWQLSADDLKKLKPGLEKDFLPLYFGWFLTKKSSETLRKAGQVFLEELGNHKAFKKELRQFVPGDEPREKMDLVTYFGKRPPGVLHCTTKFCDYGKAPGAEEYAQQDVLKKSYSKAFTLTISALFVTPKTTGARVELSEQQLQLWPSDVDKLSPTDNLPRGSRAHITLGCAADVEAVQTGLDLLEILRQEKGGSRGEEVGELSRGKLYSLGNGRWMLTLAKNMEVRAIFTGYYGKGKPVPTQGSRKGGALQSCTII

SEQ ID NO: 1031504 - protein, 401 aa, Homo sapiens; identical to SEQ ID NO: 1031492

SEQ ID NO: 1031505 - protein, 421 aa, Homo sapiens; identical to SEQ ID NO: 1031503

SEQ ID NO: 1031506 - protein, 401 aa, Homo sapiens; identical to SEQ ID NO: 1031492

SEQ ID NO: 1031507 - protein, 85 aa, Homo sapiens
MNTHPGEGAQLDAGRRRGCVLDKKREAPHRRGETHILNSEEDRGVRNTQANVEGRKQHWGGEDHQGEKQHTSGRGSTIRGRHNTE

SEQ ID NO: 1031508 - protein, 421 aa, Homo sapiens; identical to SEQ ID NO: 1031503

SEQ ID NO: 1031509 - protein, 401 aa, Homo sapiens; identical to SEQ ID NO: 1031492

SEQ ID NO: 1031510 - protein, 401 aa, Homo sapiens; identical to SEQ ID NO: 1031492

SEQ ID NO: 1031511 - protein, 211 aa, Homo sapiens [sequence omitted]

SEQ ID NO: 1031512 - protein, 264 aa, Homo sapiens
GESTVVTTSRCRHGSLRLLPSNAAHTDLVSSCGEMVCNQGARSEDSRTAMWNCSGVALRQGGGAAAALAAHGGEGVEQGAAQRAQSVVQVGPEPRRRTRSTARPKQLHKRQAQLLTRPRAGGARARGRAKRAASAGSRRGKGNRGDAQARRRPRSSRCTASARQPSAGSLRQRSKRGSSRRAQGPWKAVGSAAGPGSSSARRRASKARRRPGLLSASSPGSRRLRARLSSTASAVSAPSAGCGAATASATPSAAILPASAGHPA

SEQ ID NO: 1031513 - protein, 91 aa, Homo sapiens
EDTFREELVALVLDCGCGGVGPGMTCPHPPPTESLEKWERLTVADALEPVQFEDGEKIVVQGEPGDDFYIITEKNLPGVVAHACNPSYLGG

SEQ ID NO: 1031514 - protein, 381 aa, Homo sapiens
MASPPACPSEEDESLKGCELYVQLHGIQQVLKDCIVHLCISKPERPMKFLREHFEKLEKEENRQILARQKSNSQSDSHDEEVSPTPPNPVVKARRRRGGVSAEVYTEEDAVSYVRKVIPKDYKTMTALAKAISKNVLFAHLDDNERSDIFDAMFPVTHIAGETVIQQGNEGDNFYVVDQGEVDVYVNGEWVTNISEGGSFGELALIYGTPRAATVKAKTDLKLWGIDRDSYRRILMGSTLRKRKMYEEFLSKVSILESLEKWERLTVADALEPVQFEDGEKIVVQGEPGDDFYIITEGTASVLQRRSPNEEYVEVGRLGPSDYFGEIALLLNRPRAATVVARGPLKCVKLDRPRFERVLGPCSEILKRNIQRYNSFISLTV

SEQ ID NO: 1031515 - protein, 442 aa, Homo sapiens
GGVGGAACLLLRRVGAGVEGGAAAVRGPARSLASRPRAPRPAQPPPGLGRRASRKEAATLAMASPPACPSEEDESLKGCELYVQLHGIQQVLKDCIVHLCISKPERPMKFLREHFEKLEKEENRQILARQKSNSQSDSHDEEVSPTPPNPVVKARRRRGGVSAEVYTEEDAVSYVRKVIPKDYKTMTALAKAISKNVLFAHLDDNERSDIFDAMFPVTHIAGETVIQQGNEGDNFYVVDQGEVDVYVNGEWVTNISEGGSFGELALIYGTPRAATVKAKTDLKLWGIDRDSYRRILMGSTLRKRKMYEEFLSKVSILESLEKWERLTVADALEPVQFEDGEKIVVQGEPGDDFYIITEGTASVLQRRSPNEEYVEVGRLGPSDYFGEIALLLNRPRAATVVARGPLKCVKLDRPRFERVLGPCSEILKRNIQRYNSFISLTV

SEQ ID NO: 1031516 - protein, 376 aa, Homo sapiens
MGPPLPLLLLLLLLLPPRVLPAAPSSVPRGRQLPGRLGCLLEEGLCGASEACVKEENRQILARQKSNSQSDSHDEEVSPTPPNPVVKARRRRGGVSAEVYTEEDAVSYVRKVIPKDYKTMTALAKAISKNVLFAHLDDNERSDIFDAMFPVTHIAGETVIQQGNEGDNFYVVDQGEVDVYVNGEWVTNISEGGSFGELALIYGTPRAATVKAKTDLKLWGIDRDSYRRILMGSTLRKRKMYEEFLSKVSILESLEKWERLTVADALEPVQFEDGEKIVVQGEPGDDFYIITEGTASVLQRRSPNEEYVEVGRLGPSDYFGEIALLLNRPRAATVVARGPLKCVKLDRPRFERVLGPCSEILKRNIQRYNSFISLTV

SEQ ID NO: 1031517 - protein, 154 aa, Homo sapiens
MQQQHWEQLCRLHSGPHHPVGDVVAQGREDLGEVPEDELPAAQHRAALMWRVMGWGGRGKVQLVLQVLLILLLPLQANVLPEAGSQLPDLRHLVVEATEQQRDELVEEGVTVTQTQQPAAHHGGHRPPDLRDVIKQSLSKMGKHGRRGREFSSS

SEQ ID NO: 1031518 - protein, 160 aa, Homo sapiens
MWACASSVAMAARCGWRASRGQPRMAEASTRRPEAEGVFFSVDKISFRNTSGLTNVPTSSADLVQLWTTAASSSVQAWNRVRRTTSRCCVAWSSACSSSTGSSCADFTRVPTTQSVMSWHRAGRILERFLKTSSRQPGVGPPRPPPPPAPPSCPRQPATP

SEQ ID NO: 1031519 - protein, 376 aa, Homo sapiens
GGVGGAACLLLRRVGAGVEGGAAAVRGPARSLASRPRAPRPAQPPPGLGRRASRKEAATLAMASPPACPSEEDESLKGCELYVQLHGIQQVLKDCIVHLCISKPERPMKFLREHFEKLEKEENRQILARQKSNSQSDSHDEEVSPTPPNPVVKARRRRGGVSAEVYTEEDAVSYVRKVIPKDYKTMTALAKAISKNVLFAHLDDNERSDIFDAMFPVTHIAGETVIQQGNEGDNFYVVDQGEVDVYVNGEWVTNISEGGSFGELALIYGTPRAATVKAKTDLKLWGIDRDSYRRILMGSTLRKRKMYEEFLSKVSILESLEKWERLTVADALEPVQFEDGEKIVVQGEPGDDFYIITEKNLPGVVAHACNPSYLGG

SEQ ID NO: 1031520 - protein, 602 aa, Homo sapiens
  misc_feature (401)..(401): Xaa can be any naturally occurring amino acid
  misc_feature (406)..(406): Xaa can be any naturally occurring amino acid
GGVGGAACLLLRRVGAGVEGGAAAVRGPARSLASRPRAPRPAQPPPGLGRRASRKEAATLAMASPPACPSEEDESLKGCELYVQLHGIQQVLKDCIVHLCISKPERPMKFLREHFEKLEKEENRQILARQKSNSQSDSHDEEVSPTPPNPVVKARRRRGGVSAEVYTEEDAVSYVRKVIPKDYKTMTALAKAISKNVLFAHLDDNERSDIFDAMFPVTHIAGETVIQQGNEGDNFYVVDQGEVDVYVNGEWVTNISEGGSFGELALIYGTPRAATVKAKTDLKLWGIDRDSYRSPLPVMETARRGAKAAYDVTQEFTFSDRVIHSYEVHGSKVSAWSDHVSGSAAGESHASLVVLRACEEEINLVCTKGKSPAGQNLYTFHRRDVLHSDPVTDERPVTAKXEVTIXFGRVGARSLLANHRRTYVSCVDDFGHRVAGNLGPRECGSALISGSCRGHHTKKWVVERREQTEAAGYLLKSGGGLGGVPLDVLWKDSHLDNGKPICEGVVTRRRLSRSTHFNPVTCRPFMFAPVRFAMYTQGVPPQHVLGSGRCGSPGVVYWLLKRGTRSWQDTYWLLDGWWCARGLPAVGGATGPVVAGCFRPYE

SEQ ID NO: 1031521 - protein, 154 aa, Homo sapiens; identical to SEQ ID NO: 1031517

SEQ ID NO: 1031522 - protein, 155 aa, Homo sapiens
MPLQIGGQDVLCHRLEVAGKLPLGVDGVRGSEQHGGQDGEQLQAHLRVLGGLQTGPQRGHDVWQGFSQGRACLRSQRELPLAAQTLPPGPRVCPPSASSCSLQGYFRPGHVSTFQARALLLADTSARSHVSALPALALLLAAGTLPRDHVSALPA

SEQ ID NO: 1031523 - protein, 442 aa, Homo sapiens; identical to SEQ ID NO: 1031515

SEQ ID NO: 1031524 - protein, 477 aa, Homo sapiens
GKALSSRLPVADMDHCACCLQMPLTRTLSVLVAKWSAIRGPRSEDSRTAMWNWSGVALRQGGGAAAALAAHGGEGVEQEQRSARRASSRKEAATLAMASPPACPSEEDESLKGCELYVQLHGIQQVLKDCIVHLCISKPERPMKFLREHFEKLEKEENRQILARQKSNSQSDSHDEEVSPTPPNPVVKARRRRGGVSAEVYTEEDAVSYVRKVIPKDYKTMTALAKAISKNVLFAHLDDNERSDIFDAMFPVTHIAGETVIQQGNEGDNFYVVDQGEVDVYVNGEWVTNISEGGSFGELALIYGTPRAATVKAKTDLKLWGIDRDSYRRILMGSTLRKRKMYEEFLSKVSILESLEKWERLTVADALEPVQFEDGEKIVVQGEPGDDFYIITEGTASVLQRRSPNEEYVEVGRLGPSDYFGEIALLLNRPRAATVVARGPLKCVKLDRPRFERVLGPCSEILKRNIQRYNSFISLTV

SEQ ID NO: 1031525 - protein, 229 aa, Homo sapiens
MFPVTHIAGETVIQQGNEGDNFYVVDQGEVDVYVNGEWVTNISEGGSFGELALIYGTPRAATVKAKTDLKLWGIDRDSYRRILMGSTLRKRKMYEEFLSKVSILESLEKWERLTVADALEPVQFEDGEKIVVQGEPGDDFYIITEGTASVLQRRSPNEEYVEVGRLGPSDYFGEIALLLNRPRAATVVARGPLKCVKLDRPRFERVLGPCSEILKRNIQRYNSFISLTV

SEQ ID NO: 1031526 - protein, 170 aa, Homo sapiens
  misc_feature (141)..(141): Xaa can be any naturally occurring amino acid
MQQQHWEQLCRLHSGPHHPVGDVVAQGREDLGEVPEDELPAAQHRAALMWRVMGWGGRGKVQLVLQVLLILLLPLQANVLPEAGSQLPDLRHLVVEATEQQRDELVEEGVTVTQTQQPAAHHGGHRPPDLRMRGRDKDSCXQRGCRGCRHGAALSAAIRTLPEAEARAGP

SEQ ID NO: 1031527 - protein, 381 aa, Homo sapiens
  misc_feature (367)..(367): Xaa can be any naturally occurring amino acid
  misc_feature (375)..(375): Xaa can be any naturally occurring amino acid
GGVGGAACLLLRRVGAGVEGGAAAVRGPARSLASRPRAPRPAQPPPGLGRRASRKEAATLAMASPPACPSEEDESLKGCELYVQLHGIQQVLKDCIVHLCISKPERPMKFLREHFEKLEKEENRQILARQKSNSQSDSHDEEVSPTPPNPVVKARRRRGGVSAEVYTEEDAVSYVRKVIPKDYKTMTALAKAISKNVLFAHLDDNERSDIFDAMFPVTHIAGETVIQQGNEGDNFYVVDQGEVDVYVNGEWVTNISEGGSFGELALIYGTPRAATVKAKTDLKLWGIDRDSYRRILMGSTLRKRKMYEEFLSKVSILESLEKWERLTVADALEPVQFEDGEKIVVQGEPGDDFYIITEGHRVPWLAXARVPPQWXEVTLGK

SEQ ID NO: 1031528 - protein, 154 aa, Homo sapiens; identical to SEQ ID NO: 1031517

SEQ ID NO: 1031529 - protein, 154 aa, Homo sapiens; identical to SEQ ID NO: 1031517

SEQ ID NO: 1031530 - protein, 100 aa, Homo sapiens
MAASDTERDGLAPEKTSPDRDKKKEQSEVSVSPRASKHHYSRSRSRSRERKRKSDNEGRKHRSRSRSKEGRRHESKDKSKNRSSFSSKTNTGLPAERHIR

SEQ ID NO: 1031531 - protein, 193 aa, Homo sapiens
MAASDTERDGLAPEKTSPDRDKKKEQSEVSVSPRASKHHYSRSRSRSRERKRKSDNEGRKHRSRSRSKEGRRHESKDKSSKKHKSEEHNDKEHSSDKGRERLNSSENGEDRHKRKERKSSRGRSHSRSRSRERRHRSRSRERKKSRSRSRERKKSRSTTTHTNKSTSTTTQTKPPITSPSPSNSNTHPYHDNH

SEQ ID NO: 1031532 - protein, 206 aa, Homo sapiens
MAASDTERDGLAPEKTSPDRDKKKEQSEVSVSPRASKHHYSRSRSRSRERKRKSDNEGRKHRSRSRSKEGRRHESKDKSSKKHKSEEHNDKEHSSDKGRERLNSSENGEDRHKRKERKSSRGRSHSRSRSRERRHRSRSRERKKSRSRSRERKKSRSRSRERKKSRSRRRDKKTGDQVSLPAQEITNSAGAHTGLHTGGLRTKRDV

SEQ ID NO: 1031533 - protein, 208 aa, Homo sapiens
MAASDTERDGLAPEKTSPDRDKKKEQSEVSVSPRASKHHYSRSRSRSRERKRKSDNEGRKHRSRSRSKEGRRHESKDKSSKKHKSEEHNDKEHSSDKGRERLNSSENGEDRHKRKERKSSRGRSHSRSRSRERRHRSRSRERKKSRSRSRERKKSRSRSRERKKSRSRSGTRKRGIRSRFPLKIKTTRHSDSDGSELGTRDGTEPTIR

SEQ ID NO: 1031534 - protein, 147 aa, Homo sapiens
MIRTNFFLKQGRRHESKDKSSKKHKSEEHNDKEHSSDKGRERLNSSENGEDRHKRKERKSSRGRSHSRSRSRERRHRSRSRERKKSRSRSRERKKSRSRSRERKKSRSRRRDKKTGDQVSLPAQEITNSAGAHTGLHTGGLRTKRDV

SEQ ID NO: 1031535 - protein, 131 aa, Homo sapiens
RQTACGTVGKQCCLYINYSEEIKSNIQRLHEASENLKNVPLLDWQGIFAKVGDWFRSWGYVLLIVLFCLFIFVLIYVRVFRKSRRSLNSQPLNLALSPQQSAQLLVSETSCQVSNRAMKGLTTHQYDTSLL

SEQ ID NO: 1031536 - protein, 143 aa, Homo sapiens
AHECAHPLPSSTAAASFFCRSWCCLCARLVRTWYLFCEAAAEETPALAMADEKPKEGVKTENNDHINLKVAGQDGSVVQFKIKRHTPLSKLMKAYCERQGLSMRQIRFRFDGQPINETDTPAQLEMEDEDTIDVFQQQTGGVY

SEQ ID NO: 1031537 - protein, 134 aa, Homo sapiens
AHECAHPLPSSTAAASFFCRSWCCLCARLVRTWYLFCEAGKTPGLRKPELTENNDHINLKVAGQDGSVVQFKIKRHTPLSKLMKAYCERQGLSMRQIRFRFDGQPINETDTPAQLEMEDEDTIDVFQQQTGGVY

SEQ ID NO: 1031538 - protein, 143 aa, Homo sapiens; identical to SEQ ID NO: 1031536

SEQ ID NO: 1031539 - protein, 158 aa, Homo sapiens [sequence omitted]

SEQ ID NO: 1031540 - protein, 163 aa, Homo sapiens
  misc_feature (152)..(152): Xaa can be any naturally occurring amino acid
MVKYFLGQSVLRSSWDQVFAAFWQRYPNPYSKHVLTEDIVHREVTPDQKLLSRRLLTKTNRMPRWAERLFPANVAHSVYVLEDSIVDPQNQTMTTFTWNINHARLMVVEERCVYCVNSDNSGWTEIRREAWVSSSLFGVSRSFPDFCLSPFXPFPFLDGFVFL

SEQ ID NO: 1031541 - protein, 219 aa, Homo sapiens; identical to SEQ ID NO: 897559

SEQ ID NO: 1031542 - protein, 265 aa, Homo sapiens
MVKYFLGQSVLRSSWDQVFAAFWQRYPNPYSVVRQEEAAVWELGGILELEILFLCPWRFPGVQEIMRSIPARRQESSKHVLTEDIVHREVTPDQKLLSRRLLTKTNRMPRWAERLFPANVAHSVYVLEDSIVDPQNQTMTTFTWNINHARLMVVEERCVYCVNSDNSGWTEIRREAWVSSSLFGVSRAVQEFGLARFKSNVTKTMKGFEYILAKLQGEAPSKTLVETAKEAKEKAKETALAATEKAKDLASKAATKKQQQQQQFV

SEQ ID NO: 1031543 - protein, 161 aa, Homo sapiens
MVKYFLGQSVLRSSWDQVFAAFWQRYPNPYSKHVLTEDIVHREVTPDQKLLSRRLLTKTNRMPRWAERLFPANVAHSVYVLEDSIVDPQNQTMTTFTWNINHARLMVVEERCVYCVNSDNSGWTEIRREAWVSSSLFGVSRPFPIFGLARFFPGLHQSFRG

SEQ ID NO: 1031544 - protein, 296 aa, Homo sapiens
MVKYFLGQSVLRSSWDQVFAAFWQRYPNPYSKHVLTEDIVHREVTPDQKLLSRRLLTKTNRMPRWAERLFPANVAHSVYVLEDSIVDPQNQTMTTFTWNINHARLMVVEERCVYCVNSDNSGWTEIRREAWVSSSLFGVSRAVQEFGLARFKSNVTKTMKGFEYILAKLQGKLGWSFRHLLKAATCRSRQARPLPKHLLRQPRKPRRRQRRRHWQLQRRPRTSPARRPPRSSSSSNSLCSQSTTTTAPQTARLSPSALPSLYFIIKNQLPALSAVYVVGCGDAVWHLQYTKHMIHV

SEQ ID NO: 1031545 - protein, 147 aa, Homo sapiens
MIPPLLSRRRGRRLHAEFAAERDWEQFHQPRNLLLALVGEVGELAELFQWKTDGEPGPQGWSPRERAALQEELSDVLIYLVALAARCRVDLPLAVLSKMDINRRRYPAHLARSSSRKYTELPHGAISEDQAVGPADIPCDSTGQTST

SEQ ID NO: 1031546 - protein, 205 aa, Homo sapiens
LVWPGSYGIFERGSWVFREVAVQRWAACLWPVGRFVGTRGERTLLLPAGSASARSPRSRTCKQAWPSSGRRLHAEFAAERDWEQFHQPRNLLLALVGEVGELAELFQWKTDGEPGPQGWSPRERAALQEELSDVLIYLVALAARCRVDLPLAVLSKMDINRRRYPAHLARSSSRKYTELPHGAISEDQAVGPADIPCDSTGQTST

SEQ ID NO: 1031547 - protein, 102 aa, Homo sapiens
  misc_feature (60)..(60): Xaa can be any naturally occurring amino acid
  misc_feature (86)..(86): Xaa can be any naturally occurring amino acid
WGDSVVDTGGRRDTDCFPERVHAIKTPVRPHSIEMTNPYAYPNAVTVLLVYLNDRLWVDXISKSSLRGILPSMGTLCMCGRCVVEXYGQETIHLYDVMEKEL

SEQ ID NO: 1031548 - protein, 170 aa, Homo sapiens
MSVAGGEIRGDTGGEDTAAPGRFSFSPEPTLEDIRRLHAEFAAERDWEQFHQPRNLLLALVGEVGELAELFQWKTDGEPGPQGWSPRERAALQEELSDVLIYLVALAARCRVDLPLAVLSKMDINRRRYPAHLARSSSRKYTELPHGAISEDQAVGPADIPCDSTGQTST

SEQ ID NO: 1031549 - protein, 170 aa, Homo sapiens; identical to SEQ ID NO: 1031548

SEQ ID NO: 1031550 - protein, 371 aa, Homo sapiens
MLGSRAAGFARGLRALALAWLPGWRGRSFALARAAGAPHGGDLQPPACPEPRGRQLSLSAAAVVDSAPRPLQPYLRLMRLDKPIGTWLLYLPCTWSIGLAAEPGCFPDWYMLSLFGTGAILMRGAGCTINDMWDQDYDKKVTRTANRPIAAGDISTFQSFVFLGGQLTLALGVLLCLNYYSIALGAGSLLLVITYPLMKRISYWPQLALGLTFNWGALLGWSAIKGSCDPSVCLPLYFSGVMWTLIYDTIYAHQDKRDDVLIGLKSTALRFGENTKPWLSGFSVAMLGALSLVGVNSGQTAPYYAALGAVGAHLTHQIYTLDIHRPEDCWNKFISNRTLGLIVFLGIVLGNLWKEKKTDKTKKGIENKIEN

SEQ ID NO: 1031551 - protein, 344 aa, Homo sapiens
GRGMTSIRARPGLTSAMLGSRAAGFARGLRALALAWLPGWRGRSFALARAAGAPHGGDLQPPACPEPRGRQLSLSAAAVVDSAPRPLQPYLRLMRLDKPIGTWLLYLPCTWSIGLAAEPGCFPDWYMLSLFGTGAILMRGAGCTINDMWDQDYDKKVTRTANRPIAAGDISTFQSFVFLGGQLTLALGVLLCLNYYSIALGAGSLLLVITYPLMKRISYWPQLALGLTFNWGALLGWSAIKGSCDPSVCLPLYFSGVMWTLIYDTIYAHQDKRDDVLIGLKSTALRFGENTKPWLSGFSVAMLGALSLVGVNSGQTAPYYAALGAVGAHLTHQKWGLEILPRLV

SEQ ID NO: 1031552 - protein, 229 aa, Homo sapiens
GRGMTSIRARPGLTSAMLGSRAAGFARGLRALALAWLPGWRGRSFALARAAGAPHGGDLQPPACPEPRGRQLSLSAAAVVDSAPRPLQPYLRLMRLDKPIGTWLLYLPCTWSIGLAAEPGCFPDWYMLSLFGTGAILMRGAGCTINDMWDQDYDKKVTRTANRPIAAGDISTFQSFVFLGGQLTLALGVLLCLNYYSIALGAGSLLLVITYPLMKRISYWPQLALGQKR

SEQ ID NO: 1031553 - protein, 113 aa, Homo sapiens
GRGMTSIRARPGLTSAMLGSRAAGFARGLRALALAWLPGWRGRSFALARAAGAPHGGDLQPPACPEPRGRQLSLSAAAVVDSAPRPLQPYLRLMRLDKPIGECGRAGSPGICK

SEQ ID NO: 1031554 - protein, 299 aa, Homo sapiens
LPSFTDETKTYSLKILYCLVSLNLQVADIELRSLLTFPFTVGTLVICRGALQIPIRTWLLYLPCTWSIGLAAEPGCFPDWYMLSLFGTGAILMRGAGCTINDMWDQDYDKKVTRTANRPIAAGDISTFQSFVFLGGQLTLALGVLLCLNYYSIALGAGSLLLVITYPLMKRISYWPQLALGLTFNWGALLGWSAIKGSCDPSVCLPLYFSGVMWTLIYDTIYAHQDKRDDVLIGLKSTALRFGENTKPWLSGFSVAMLGALSLVGVNSGQTAPYYAALGAVGAHLTHQKWGLEILPRLV

SEQ ID NO: 1031555 - protein, 378 aa, Homo sapiens
GRGMTSIRARPGLTSAMLGSRAAGFARGLRALALAWLPGWRGRSFALARAAGAPHGGDLQPPACPEPRGRQLSLSAAAVVDSAPRPLQPYLRLMRLDKPIGTWLLYLPCTWSIGLAAEPGCFPDWYMLSLFGTGAILMRGAGCTINDMWDQDYDKKVTRTANRPIAAGDISTFQSFVFLGGQLTLALGVLLCLNYYSIALGAGSLLLVITYPLMKRISYWPQLALGLTFNWGALLGWSAIKGSCDPSVCLPLYFSGVMWTLIYDTIYAHQDKRDDVLIGLKSTALRFGENTKPWLSGFSVAMLGALSLVGVNSGQTAPYYAALGAVGAHLTHQIYTLDIHRPEDCWNKFISNRTLGLIVFLGIVLGNLWKERRRQQEV

SEQ ID NO: 1031556 - protein, 371 aa, Homo sapiens; identical to SEQ ID NO: 1031550

SEQ ID NO: 1031557 - protein, 344 aa, Homo sapiens; identical to SEQ ID NO: 1031551

SEQ ID NO: 1031558 - protein, 344 aa, Homo sapiens; identical to SEQ ID NO: 1031551

SEQ ID NO: 1031559 - protein, 81 aa, Homo sapiens
SPTEKALKLWALPSSLSLRPVEDGQPETRRAWPHAFRQVPSEWLVELGKLEEKMKALMMEKEQLQQQLQQHGPVSCTCCVL

SEQ ID NO: 1031560 - protein, 81 aa, Homo sapiens; identical to SEQ ID NO: 1031559

SEQ ID NO: 1031561 - protein, 185 aa, Homo sapiens
  misc_feature (39)..(39): Xaa can be any naturally occurring amino acid
  misc_feature (41)..(42): Xaa can be any naturally occurring amino acid
  misc_feature (48)..(51): Xaa can be any naturally occurring amino acid
  misc_feature (53)..(53): Xaa can be any naturally occurring amino acid
AVQKAAPGSQRYSQTGNYELAVALSRWVFKEEGVLRVGXVXXHRVGEXXXXNXYTVTDLVEYSIVIQQLSNGKWVPFDGDDIQLEFVRIDPFVRTFLKKKGGKYSVQFKLPDVYGVFQFKVDYNRLGYTHLYSSTQVSVRPLQHTQYERFIPSAYPYYASAFSMMLGLFIFSIVFLHMKEKEKSD

SEQ ID NO: 1031562 - protein, 129 aa, Homo sapiens
MWSCTLYLYPFFLYCGKWVPFDGDDIQLEFVRIDPFVRTFLKKKGGKYSVQFKLPDVYGVFQFKVDYNRLGYTHLYSSTQVSVRPLQHTQYERFIPSAYPYYASAFSMMLGLFIFSIVFLHMKEKEKSD

SEQ ID NO: 1031563 - protein, 303 aa, Homo sapiens
SVSNPRGYVARPGWRAAVVVAEGDSDSRPGQELLVAWNTVSTGLVPPAALGLVSSRTSGAVPPKEEELRAAVEVLRGHGLHSVLEEWFVEVLQNDLQANISPEFWNAISQCENSADEPQCLLLLLDAFGLLESRLDPYLRSLELLEKWTRLGLLMGTGAQGLREEVHTMLRGVLFFSTPRTFQEMIQRLYGCFLRVYMQSKRKGEGGTDPELEGELDSRYARRRYYRLLQSPLCAGCSSDKQQCWCRQALEQFHQLSQVFTRVRWWEGLPSGPTCQVPESGRPGGTGPREPVGVRPKFRRAIG

SEQ ID NO: 1031564 - protein, 90 aa, Homo sapiens
MVTKTKIDNMGLIKLKSFCIARRNYHQSEQATYRMGENFCIYSSDKRLISRIAPKSRIAPKSRIAPKSRIAPKSRIAPKSRIAPKSRIAP

SEQ ID NO: 1031565 - protein, 837 aa, Homo sapiens
SPRAAPSESRSRWVQMAAAVVVAEGDSDSRPGQELLVAWNTVSTGLVPPAALGLVSSRTSGAVPPKEEELRAAVEVLRGHGLHSVLEEWFVEVLQNDLQANISPEFWNAISQCENSADEPQCLLLLLDAFGLLESRLDPYLRSLELLEKWTRLGLLMGTGAQGLREEVHTMLRGVLFFSTPRTFQEMIQRLYGCFLRVYMQSKRKGEGGTDPELEGELDSRYARRRYYRLLQSPLCAGCSSDKQQCWCRQALEQFHQLSQVLHRLSLLERVSAEAVTTTLHQVTRERMEDRCRGEYERSFLREFHKWIERVVGWLGKVFLQDGPARPASPEAGNTLRRWRCHVQRFFYRIYASLRIEELFSIVRDFPDSRPAIEDLKYCLERTDQRQQLLVSLKAALETRLLHPGVNTCDIITLYISAIKALRVLDPSMVILEVACEPIRRYLRTREDTVRQIVAGLTGDSDGTGDLAVELSKTDPASLETGQDSEDDSGEPEDWVPDPVDADPGKSSSKRRSSDIISLLVSIYGSKDLFINEYRSLLADRLLHQFSFSPEREIRNVELLKLRFGEAPMHFCEVMLKDMADSRRINANIREEDEKRPAEEQPPFGVYAVILSSEFWPPFKDEKLEVPEDIRAALEAYCKKYEQLKAMRTLSWKHTLGLVTMDVELADRTLSVAVTPVQAVILLYFQDQASWTLEELSKAVKMPVALLRRRMSVWLQQGVLREEPPGTFSVIEEERPQDRDNMVLIDSDDESDSGMASQADQKEEELLLFWTYIQAMLTNLESLSLDRIYNMLRMFVVTGPALAEIDLQELQGYLQKKVRDQQLVYSAGVYRLPKNCS

SEQ ID NO: 1031566 - protein, 835 aa, Homo sapiens
SVSNPRGYVARPGWRAAVVVAEGDSDSRPGQELLVAWNTVSTGLVPPAALGLVSSRTSGAVPPKEEELRAAVEVLRGHGLHSVLEEWFVEVLQNDLQANISPEFWNAISQCENSADEPQCLLLLLDAFGLLESRLDPYLRSLELLEKWTRLGLLMGTGAQGLREEVHTMLRGVLFFSTPRTFQEMIQRLYGCFLRVYMQSKRKGEGGTDPELEGELDSRYARRRYYRLLQSPLCAGCSSDKQQCWCRQALEQFHQLSQVLHRLSLLERVSAEAVTTTLHQVTRERMEDRCRGEYERSFLREFHKWIERVVGWLGKVFLQDGPARPASPEAGNTLRRWRCHVQRFFYRIYASLRIEELFSIVRDFPDSRPAIEDLKYCLERTDQRQQLLVSLKAALETRLLHPGVNTCDIITLYISAIKALRVLDPSMVILEVACEPIRRYLRTREDTVRQIVAGLTGDSDGTGDLAVELSKTDPASLETGQDSEDDSGEPEDWVPDPVDADPGKSSSKRRSSDIISLLVSIYGSKDLFINEYRSLLADRLLHQFSFSPEREIRNVELLKLRFGEAPMHFCEVMLKDMADSRRINANIREEDEKRPAEEQPPFGVYAVILSSEFWPPFKDEKLEVPEDIRAALEAYCKKYEQLKAMRTLSWKHTLGLVTMDVELADRTLSVAVTPVQAVILLYFQDQASWTLEELSKAVKMPVALLRRRMSVWLQQGVLREEPPGTFSVIEEERPQDRDNMVLIDSDDESDSGMASQADQKEEELLLFWTYIQAMLTNLESLSLDRIYNMLRMFVVTGPALAEIDLQELQGYLQKKVRDQQLVYSAGVYRLPKNCS

SEQ ID NO: 1031567 - protein, 836 aa, Homo sapiens
MPRSVLGFISSRGHGCGSCGGASEPPSSRPGQELLVAWNTVSTGLVPPAALGLVSSRTSGAVPPKEEELRAAVEVLRGHGLHSVLEEWFVEVLQNDLQANISPEFWNAISQCENSADEPQCLLLLLDAFGLLESRLDPYLRSLELLEKWTRLGLLMGTGAQGLREEVHTMLRGVLFFSTPRTFQEMIQRLYGCFLRVYMQSKRKGEGGTDPELEGELDSRYARRRYYRLLQSPLCAGCSSDKQQCWCRQALEQFHQLSQVLHRLSLLERVSAEAVTTTLHQVTRERMEDRCRGEYERSFLREFHKWIERVVGWLGKVFLQDGPARPASPEAGNTLRRWRCHVQRFFYRIYASLRIEELFSIVRDFPDSRPAIEDLKYCLERTDQRQQLLVSLKAALETRLLHPGVNTCDIITLYISAIKALRVLDPSMVILEVACEPIRRYLRTREDTVRQIVAGLTGDSDGTGDLAVELSKTDPASLETGQDSEDDSGEPEDWVPDPVDADPGKSSSKRRSSDIISLLVSIYGSKDLFINEYRSLLADRLLHQFSFSPEREIRNVELLKLRFGEAPMHFCEVMLKDMADSRRINANIREEDEKRPAEEQPPFGVYAVILSSEFWPPFKDEKLEVPEDIRAALEAYCKKYEQLKAMRTLSWKHTLGLVTMDVELADRTLSVAVTPVQAVILLYFQDQASWTLEELSKAVKMPVALLRRRMSVWLQQGVLREEPPGTFSVIEEERPQDRDNMVLIDSDDESDSGMASQADQKEEELLLFWTYIQAMLTNLESLSLDRIYNMLRMFVVTGPALAEIDLQELQGYLQKKVRDQQLVYSAGVYRLPKNCS

SEQ ID NO: 1031568 - protein, 864 aa, Homo sapiens
MPRSVLGFISSRGHGCGSCGGASEQREELAAAVVVAEGDSDSRPGQELLVAWNTVSTGLVPPAALGLVSSRTSGAVPPKEEELRAAVEVLRGHGLHSVLEEWFVEVLQNDLQANISPEFWNAISQCENSADEPQCLLLLLDAFGLLESRLDPYLRSLELLEKWTRLGLLMGTGAQGLREEVHTMLRGVLFFLRGPNTPPPKKNSFSTPRTFQEMIQRLYGCFLRVYMQSKRKGEGGTDPELEGELDSRYARRRYYRLLQSPLCAGCSSDKQQCWCRQALEQFHQLSQVLHRLSLLERVSAEAVTTTLHQVTRERMEDRCRGEYERSFLREFHKWIERVVGWLGKVFLQDGPARPASPEAGNTLRRWRCHVQRFFYRIYASLRIEELFSIVRDFPDSRPAIEDLKYCLERTDQRQQLLVSLKAALETRLLHPGVNTCDIITLYISAIKALRVLDPSMVILEVACEPIRRYLRTREDTVRQIVAGLTGDSDGTGDLAVELSKTDPASLETGQDSEDDSGEPEDWVPDPVDADPGKSSSKRRSSDIISLLVSIYGSKDLFINEYRSLLADRLLHQFSFSPEREIRNVELLKLRFGEAPMHFCEVMLKDMADSRRINANIREEDEKRPAEEQPPFGVYAVILSSEFWPPFKDEKLEVPEDIRAALEAYCKKYEQLKAMRTLSWKHTLGLVTMDVELADRTLSVAVTPVQAVILLYFQDQASWTLEELSKAVKMPVALLRRRMSVWLQQGVLREEPPGTFSVIEEERPQDRDNMVLIDSDDESDSGMASQADQKEEELLLFWTYIQAMLTNLESLSLDRIYNMLRMFVVTGPALAEIDLQELQGYLQKKVRDQQLVYSAGVYRLPKNCS

SEQ ID NO: 1031569 - protein, 846 aa, Homo sapiens
NERQGENNKKHTARYEAGCWAAVVVAEGDSDSRPGQELLVAWNTVSTGLVPPAALGLVSSRTSGAVPPKEEELRAAVEVLRGHGLHSVLEEWFVEVLQNDLQANISPEFWNAISQCENSADEPQCLLLLLDAFGLLESRLDPYLRSLELLEKWTRLGLLMGTGAQGLREEVHTMLRGVLFFSTPRTFQEMIQRLYGCFLRVYMQSKRKGEGGTDPELEGELDSRYARRRYYRLLQSPLCAGCSSDKQQCWCRQALEQFHQLSQVLHRLSLLERVSAEAVTTTLHQVTRERMEDRCRGEYERSFLREFHKWIERVVGWLGKVFLQDGPARPASPEAGNTLRRWRCHVQRFFYRIYASLRIEELFSIVRDFPDSRPAIEDLKYCLERTDQRQQLLVSLKAALETRLLHPGVNTCDIITLYISAIKALRVLDPSMVILEVACEPIRRYLRTREDTVRQIVAGLTGDSDGTGDLAVELSKTDPASLETGQDSEDDSGEPEDWVPDPVDADPGKSSSKRRSSDIISLLVSIYGSKDLFINEYRSLLADRLLHQFSFSPEREIRNVELLKLRFGEAPMHFCEVMLKDMADSRRINANIREEDEKRPAEEQPPFGVYAVILSSEFWPPFKDEKLEVPEDIRAALEAYCKKYEQLKAMRTLSWKHTLGLVTMDVELADRTLSVAVTPVQAVILLYFQDQASWTLEELSKAVKMPVALLRRRMSVWLQQGVLREEPPGTFSVIEEERPQDRDNMVLIDSDDESDSGMASQADQKEEELLLFWTYIQAMLTNLESLSLDRIYNMLRMFVVTGPALAEIDLQELQGYLQKKVRDQQLVYSAGVYRLPKNCSWPHGLP

SEQ ID NO: 1031570 - protein, 562 aa, Homo sapiens
NERQGENNKKHTARYEAGCWAAVVVAEGDSDSRPGQELLVAWNTVSTGLVPPAALGLVSSRTSGAVPPKEEELRAAVEVLRGHGLHSVLEEWFVEVLQNDLQANISPEFWNAISQCENSADEPQCLLLLLDAFGLLESRLDPYLRSLELLEKWTRLGLLMGTGAQGLREEVHTMLRGVLFFSTPRTFQEMIQRLYGCFLRVYMQSKRKGEGGTDPELEGELDSRYARRRYYRLLQSPLCAGCSSDKQQCWCRQALEQFHQLSQVLHRLSLLERVSAEAVTTTLHQVTRERMEDRCRGEYERSFLREFHKWIERVVGWLGKVFLQDGPARPASPEAGNTLRRWRCHVQRFFYRIYASLRIEELFSIVRDFPDSRPAIEDLKYCLERTDQRQQLLVSLKAALETRLLHPGVNTCDIITLYISAIKALRVLDPSMVILEVACEPIRRYLRTREDTVRQIVAGLTGDSDGTGDLAVELSKTDPASLETGQDSEDDSGEPEDWVPDPVDADPGSRAPSGVHRTSSACWSASTAARTSSSMSTARCWPTACCTSSASAPSGRSATWSC

SEQ ID NO: 1031571 - protein, 481 aa, Homo sapiens
MGGQGNEAAVGTCETTYRHGQLSTRVLPLGGCGPGYCMAALETRLLHPGVNTCDIITLYISAIKALRVLDPSMVILEVACEPIRRYLRTREDTVRQIVAGLTGDSDGTGDLAVELSKTDPASLETGQDSEDDSGEPEDWVPDPVDADPGKSSSKRRSSDIISLLVSIYGSKDLFINEYRSLLADRLLHQFSFSPEREIRNVELLKLRFGEAPMHFCEVMLKDMADSRRINANIREEDEKRPAEEQPPFGVYAVILSSEFWPPFKDEKLEVPEDIRAALEAYCKKYEQLKAMRTLSWKHTLGLVTMDVELADRTLSVAVTPVQAVILLYFQDQASWTLEELSKAVKMPVALLRRRMSVWLQQGVLREEPPGTFSVIEEERPQDRDNMVLIDSDDESDSGMASQADQKEEELLLFWTYIQAMLTNLESLSLDRIYNMLRMFVVTGPALAEIDLQELQGYLQKKVRDQQLVYSAGVYRLPKNCS

SEQ ID NO: 1031572 - protein, 412 aa, Homo sapiens
NERQGENNKKHTARYEAGCWAAVVVAEGDSDSRPGQELLVAWNTVSTGLVPPAALGLVSSRTSGAVPPKEEELRAAVEVLRGHGLHSVLEEWFVEVLQNDLQANISPEFWNAISQCENSADEPQCLLLLLDAFGLLESRLDPYLRSLELLEKWTRLGLLMGTGAQGLREEVHTMLRGVLFFSTPRTFQEMIQRLYGCFLRVYMQSKRKGEGGTDPELEGELDSRYARRRYYRLLQSPLCAGCSSDKQQCWCRQALEQFHQLSQVLHRLSLLERVSAEAVTTTLHQVTRERMEDRCRGEYERSFLREFHKWIERVVGWLGKVFLQDGPARPASPEAGNTLRRWRCHVQRFFYRIYASLRIEELFSIVRDFPDSRPAIEDLKYCLERTDQRQQLLVSLTGCPGDSAPASRRQHV

SEQ ID NO: 1031573 - protein, 410 aa, Homo sapiens
SPRAAPSESRSRWVQMAAAVVVAEGDSDSRPGQELLVAWNTVSTGLVPPAALGLVSSRTSGAVPPKEEELRAAVEVLRGHGLHSVLEEWFVEVLQNDLQANISPEFWNAISQCENSADEPQCLLLLLDAFGLLESRLDPYLRSLELLEKWTRLGLLMGTGAQGLREEVHTMLRGVLFFSTPRTFQEMIQRLYGCFLRVYMQSKRKGEGGTDPELEGELDSRYARRRYYRLLQSPLCAGCSSDKQQCWCRQALEQFHQLSQVLGVVCPDGHALAPSGSPLLPWVQLASAESWGAVLITRNMTERESQGFLCSVSWTQVSLFCHSPSVPQIHALTLVRPYVACVCSSKFLSNSKLPGLCRIPLCLLSILGRNDSHPRRHSLPCNCEQKLAAASLQEDQVTVRASSLLSVLER

SEQ ID NO: 1031574 - protein, 221 aa, Homo sapiens
SPRAAPSESRSRWVQMAAAVVVAEGDSDSRPGQELLVAWNTVSTGLVPPAALGLVSSRTSGAVPPKEEELRAAVEVLRGHGLHSVLEEWFVEVLQNDLQANISPEFWNAISQCENSADEPQCLLLLLDAFGLLESRLDPYLRSLELLEKWTRLGLLMGTGAQGLREEVHTMLRGVLFFSTPRTFQEMIQRLYGCFLRVYMQSKRKGEGGTDPARPCPRMHC

SEQ ID NO: 1031575 - protein, 270 aa, Homo sapiens
NERQGENNKKHTARYEAGCWAAVVVAEGDSDSRPGQELLVAWNTVSTGLVPPAALGLVSSRTSGAVPPKEEELRAAVEVLRGHGLHSVLEEWFVEVLQNDLQANISPEFWNAISQCENSADEPQCLLLLLDAFGLLESRLDPYLRSLELLEKWTRLGLLMGTGAQGLREEVHTMLRGVLFFSTPRTFQEMIQRLYGCFLRVYMQSKRKGEGGTDPELEGELDSRYARRRYYRLLQARVVHGAADSNMWSRSSIPIAGYRRCDVRQFTPSG

SEQ ID NO: 1031576 - protein, 840 aa, Homo sapiens
NERQGENNKKHTARYEAGCWAAVVVAEGDSDSRPGQELLVAWNTVSTGLVPPAALGLVSSRTSGAVPPKEEELRAAVEVLRGHGLHSVLEEWFVEVLQNDLQANISPEFWNAISQCENSADEPQCLLLLLDAFGLLESRLDPYLRSLELLEKWTRLGLLMGTGAQGLREEVHTMLRGVLFFSTPRTFQEMIQRLYGCFLRVYMQSKRKGEGGTDPELEGELDSRYARRRYYRLLQSPLCAGCSSDKQQCWCRQALEQFHQLSQVLHRLSLLERVSAEAVTTTLHQVTRERMEDRCRGEYERSFLREFHKWIERVVGWLGKVFLQDGPARPASPEAGNTLRRWRCHVQRFFYRIYASLRIEELFSIVRDFPDSRPAIEDLKYCLERTDQRQQLLVSLKAALETRLLHPGVNTCDIITLYISAIKALRVLDPSMVILEVACEPIRRYLRTREDTVRQIVAGLTGDSDGTGDLAVELSKTDPASLETGQDSEDDSGEPEDWVPDPVDADPGKSSSKRRSSDIISLLVSIYGSKDLFINEYRSLLADRLLHQFSFSPEREIRNVELLKLRFGEAPMHFCEVMLKDMADSRRINANIREEDEKRPAEEQPPFGVYAVILSSEFWPPFKDEKLEVPEDIRAALEAYCKKYEQLKAMRTLSWKHTLGLVTMDVELADRTLSVAVTPVQAVILLYFQDQASWTLEELSKAVKMPVALLRRRMSVWLQQGVLREEPPGTFSVIEEERPQDRDNMVLIDSDDESDSGMASQADQKEEELLLFWTYIQAMLTNLESLSLDRIYNMLRMFVVTGPALAEIDLQELQGYLQKKVRDQQLVYSAGVYRLPKNCS

SEQ ID NO: 1031577 - protein, 834 aa, Homo sapiens
MKSRGVTCNVILYVGLVVVVAWLQFYTAGQELLVAWNTVSTGLVPPAALGLVSSRTSGAVPPKEEELRAAVEVLRGHGLHSVLEEWFVEVLQNDLQANISPEFWNAISQCENSADEPQCLLLLLDAFGLLESRLDPYLRSLELLEKWTRLGLLMGTGAQGLREEVHTMLRGVLFFSTPRTFQEMIQRLYGCFLRVYMQSKRKGEGGTDPELEGELDSRYARRRYYRLLQSPLCAGCSSDKQQCWCRQALEQFHQLSQVLHRLSLLERVSAEAVTTTLHQVTRERMEDRCRGEYERSFLREFHKWIERVVGWLGKVFLQDGPARPASPEAGNTLRRWRCHVQRFFYRIYASLRIEELFSIVRDFPDSRPAIEDLKYCLERTDQRQQLLVSLKAALETRLLHPGVNTCDIITLYISAIKALRVLDPSMVILEVACEPIRRYLRTREDTVRQIVAGLTGDSDGTGDLAVELSKTDPASLETGQDSEDDSGEPEDWVPDPVDADPGKSSSKRRSSDIISLLVSIYGSKDLFINEYRSLLADRLLHQFSFSPEREIRNVELLKLRFGEAPMHFCEVMLKDMADSRRINANIREEDEKRPAEEQPPFGVYAVILSSEFWPPFKDEKLEVPEDIRAALEAYCKKYEQLKAMRTLSWKHTLGLVTMDVELADRTLSVAVTPVQAVILLYFQDQASWTLEELSKAVKMPVALLRRRMSVWLQQGVLREEPPGTFSVIEEERPQDRDNMVLIDSDDESDSGMASQADQKEEELLLFWTYIQAMLTNLESLSLDRIYNMLRMFVVTGPALAEIDLQELQGYLQKKVRDQQLVYSAGVYRLPKNCS

SEQ ID NO: 1031578 - protein, 919 aa, Homo sapiens
NERQGENNKKHTARYEAGCWAAVVVAEGDSDSRPGQELLVAWNTVSTGLVPPAALGLVSSRTSGAVPPKEEELRAAVEVLRGHGLHSVLEEWFVEVLQNDLQANISPEFWNAISQCENSADEPQCLLLLLDAFGLLESRLDPYLRSLELLEKWTRLGLLMGTGAQGLREEVHTMLRGVLFFSTPRTFQEMIQRLYGCFLRVYMQSKRKGEGGTDPELEGELDSRYARRRYYRLLQSPLCAGCSSDKQQCWCRQALEQFHQLSQVLHRLSLLERVSAEAVTTTLHQVTRERMEDRCRGEYERSFLREFHKWIERVVGWLGKVFLQDGPARPASPEAGNTLRRWRCHVQRFFYRIYASLRIEELFSIVRDFPDSRPAIEDLKYCLERTDQRQQLLVSLKAALETRLLHPGVNTCDIITLYISAIKALRVLDPSMVILEVACEPIRRYLRTREDTVRQIVAGLTGDSDGTGDLAVELSKTDPASLETGQDSEDDSGEPEDWVPDPVDADPGKSSSKRRSSDIISLLVSIYGSKDLFINEYRSLLADRLLHQFSFSPEREIRNVELLKLRFGEAPMHFCEVMLKDMADSRRINANIREEDEKRPAEEQPPFGVYAVILSSEFWPPFKDEKLEVPEDIRAALEAYCKKYEQLKAMRTLSWKHTLGLVTMDVELADRTLSVAVTPVQAVILLYFQDQGEPTSPYAGLPRPHGPAVGEGLFPSEGVVWGSCASRRHPSLSHGQGRVAREPPDLSADGRQGRCSPCPGCPASPVTLHAASWTLEELSKAVKMPVALLRRRMSVWLQQGVLREEPPGTFSVIEEERPQDRDNMVLIDSDDESDSGMASQADQKEEELLLFWTYIQAMLTNLESLSLDRIYNMLRMFVVTGPALAEIDLQELQGYLQKKVRDQQLVYSAGVYRLPKNCS

SEQ ID NO: 1031579 - protein, 867 aa, Homo sapiens
NERQGENNKKHTARYEAGCWAAVVVAEGDSDSRPGQELLVAWNTVSTGLVPPAALGLVSSRTSGAVPPKEEELRAAVEVLRGHGLHSVLEEWFVEVLQNDLQANISPEFWNAISQCENSADEPQCLLLLLDAFGLLESRLDPYLRSLELLEKWTRLGLLMGTGAQGLREEVHTMLRGVLFFSTPRTFQEMIQRLYGCFLRVYMQSKRKGEGGTDPELEGELDSRYARRRYYRLLQSPLCAGCSSDKQQCWCRQALEQFHQLSQVLHRLSLLERVSAEAVTTTLHQVTRERMEDRCRGEYERSFLREFHKWIERVVGWLGKVFLQDGPARPASPEAGNTLRRWRCHVQRFFYRIYASLRIEELFSIVRDFPDSRPAIEDLKYCLERTDQRQQLLVSLKAALETRLLHPGVNTCDIITLYISAIKALRVLDPSMVILEVACEPIRRYLRTREDTVRQIVAGLTGDSDGTGDLAVELSKTDPASLETGQDSEDDSGEPEDWVPDPVDADPGKSSSKRRSSDIISLLVSIYGSKDLFINEYRSLLADRLLHQFSFSPEREIRNVELLKLRFGEAPMHFCEVMLKDMADSRRINANIREEDEKRPAEEQPPFGVYAVILSSEFWPPFKDEKLEVPEDIRAALEAYCKKYEQLKAMRTLSWKHTLGLVTMDVELADRTLSVAVTPVQAVILLYFQDQASWTLEELSKAVKMPVALLRRRMSVWLQQGVLREEPPGTFSVIEEERPQDRDNMVLIDSDDESDSGMASQADQKEEELLVRVQAHGGPGGGGEACRCLTGAGLCPQLFWTYIQAMLTNLESLSLDRIYNMLRMFVVTGPALAEIDLQELQGYLQKKVRDQQLVYSAGVYRLPKNCS

SEQ ID NO: 1031580 - protein, 557 aa, Homo sapiens
GGCSSPALAAGLTMPPCMLTLAVLLQWIERVVGWLGKVFLQDGPARPASPEAGNTLRRWRCHVQRFFYRIYASLRIEELFSIVRDFPDSRPAIEDLKYCLERTDQRQQLLVSLKAALETRLLHPGVNTCDIITLYISAIKALRVLDPSMVILEVACEPIRRYLRTREDTVRQIVAGLTGDSDGTGDLAVELSKTDPASLETGQDSEDDSGEPEDWVPDPVDADPGKSSSKRRSSDIISLLVSIYGSKDLFINEYRSLLADRLLHQFSFSPEREIRNVELLKLRFGEAPMHFCEVMLKDMADSRRINANIREEDEKRPAEEQPPFGVYAVILSSEFWPPFKDEKLEVPEDIRAALEAYCKKYEQLKAMRTLSWKHTLGLVTMDVELADRTLSVAVTPVQAVILLYFQDQASWTLEELSKAVKMPVALLRRRMSVWLQQGVLREEPPGTFSVIEEERPQDRDNMVLIDSDDESDSGMASQADQKEEELLLFWTYIQAMLTNLESLSLDRIYNMLRMFVVTGPALAEIDLQELQGYLQKKVRDQQLVYSAGVYRLPKNCS

SEQ ID NO: 1031581 - protein, 589 aa, Homo sapiens
NERQGENNKKHTARYEAGCWAAVVVAEGDSDSRPGQELLVAWNTVSTGLVPPAALGLVSSRTSGAVPPKEEELRAAVEVLRGHGLHSVLEEWFVEVLQNDLQANISPEFWNAISQCENSADEPQCLLLLLDAFGLLESRLDPYLRSLELLEKWTRLGLLMGTGAQGLREEVHTMLRGVLFFSTPRTFQEMIQRLYGCFLRVYMQSKRKGEGGTDPELEGELDSRYARRRYYRLLQSPLCAGCSSDKQQCWCRQALEQFHQLSQVLHRLSLLERVSAEAVTTTLHQVTRERMEDRCRGEYERSFLREFHKWIERVVGWLGKVFLQDGPARPASPEAGNTLRRWRCHVQRFFYRIYASLRIEELFSIVRDFPDSRPAIEDLKYCLERTDQRQQLLVSLKAALETRLLHPGVNTCDIITLYISAIKALRVLDPSMVILEVACEPIRRYLRTREDTVRQIVAGLTGDSDGTGDLAVELSKTDPASLETGQDSEDDSGEPEDWVPDPVDADPGKSSSKRRSSDIISLLVSIYGSKDLFINEYRSLLADRLLHQFRIAPKSRIAPKSRIAPKSRIAPKSRIAPKSRIAPKSRIAP

SEQ ID NO: 1031582 - protein, 197 aa, Homo sapiens
MVAEQAMRTLSWKHTLGLVTMDVELADRTLSVAVTPVQAVILLYFQDQASWTLEELSKAVKMPVALLRRRMSVWLQQGVLREEPPGTFSVIEEERPQDRDNMVLIDSDDESDSGMASQADQKEEELLLFWTYIQAMLTNLESLSLDRIYNMLRMFVVTGPALAEIDLQELQGYLQKKVRDQQLVYSAGVYRLPKNCS

SEQ ID NO: 1031583 - protein, 548 aa, Homo sapiens
MVAHDETGGLLPIKRTIRVLDVNNQSFREQEEPSNKRVRPLARVTSLANLISPVRNGAVRRFGQTIQSFTLRGDHRSPASAQKFSSRSTVPTPAKRRSSALWSEMLDITMKESLTTREIRRQEAIYEMSRGEQDLIEDLKLARKAYHDPMLKLSIMSEEELTHIFGDLDSYIPLHEDLLTRIGEATKPDGTVEQIGHILVSWLPRLNAYRGYCSNQLAAKALLDQKKQDPRVQDFLQRCLESPFSRKLDLWSFLDIPRSRLVKYPLLLKEILKHTPKEHPDVQLLEDAILIIQGVLSDINLKKGESECQYYIDKLEYLDEKQRDPRIEASKVLLCHGELRSKSGHKLYIFLFQDILVLTRPVTRNERHSYQVYRQPIPVQELVLEDLQDGDVRMGGSFRGAFSNSEKAKNIFRIRFHDPSPAQSHTLQANDVFHKQQWFNCIRAAIAPFQSAGSPPELQGLPELHEECEGNHPSARKLTAQRRASTVSSVTQVEVDENAYRCGSGMQMAEDSKSLKTHQTQPGIRRARDKALLVANGKRLWCREGSVC

SEQ ID NO: 1031584 - protein, 116 aa, Homo sapiens
TGTVRIDIRSVGYTGVLNINFEERVNPEVPCIYIDKLEYLDEKQRDPRIEASKVLLCHGELRSKSGHKPFNQFFSPWVFHTNEFFEDILDLQDPDQPRENVKRVNLFNQDVTRVRP

SEQ ID NO: 1031585 - protein, 548 aa, Homo sapiens; identical to SEQ ID NO: 1031583

SEQ ID NO: 1031586 - protein, 233 aa, Homo sapiens
MVAHDETGGLLPIKRTIRVLDVNNQSFREQEEPSNKRVRPLARVTSLANLISPVRNGAVRRFGQTIQSFTLRGDHRSPASAQKFSSRSTVPTPAKRRSSALWSEMLDITMKESLTTREIRRQEAIYEMSRGEQDLIEDLKLARKAYHDPMLKLSIMSEEELTHIFGDLDSYIPLHEDLLTRIGEATKPDGTVEQIGHILVSWWQPKLFLIKRNRIQESKTSSSDVSSLPSVEN

SEQ ID NO: 1031587 - protein, 151 aa, Homo sapiens
MEPELAAQKQPRPRSEAAGPLGSARRERRGLRDTSGSRLDGRCSLRRGSSFTFLTPGPNCDFTLKRKRREKDDDVVSLSSLDLKEPSNKRVRPLARVTSLANLISPVRNGAVRRFGQTIQSFTLRGDHRSPASAQKFSSRSTVPTPAKRRS

SEQ ID NO: 1031588 - protein, 548 aa, Homo sapiens; identical to SEQ ID NO: 1031583

SEQ ID NO: 1031589 - protein, 418 aa, Homo sapiens
MVAHDETGGLLPIKRTIRVLDVNNQSFREQEEPSNKRVRPLARVTSLANLISPVRNGAVRRFGQTIQSFTLRGDHRSPASAQKFSSRSTVPTPAKRRSSALWSEMLDITMKESLTTREIRRQEAIYEMSRGEQDLIEDLKLARKAYHDPMLKLSIMSEEELTHIFGDLDSYIPLHEDLLTRIGEATKPDGTVEQIGHILVSWLPRLNAYRGYCSNQLAAKALLDQKKQDPRVQDFLQRCLESPFSRKLDLWSFLDIPRSRLVKYPLLLKEILKHTPKEHPDVQLLEDAILIIQGVLSDINLKKGESECQYYIDKLEYLDEKQRDPRIEASKVLLCHGELRSKSGHKLYIFLFQDILVLTRPVTRNERHSYQVYRQPIPVQELVLEDLQDGDVRMGGSFRGAFSNSEKGKMQPFNNLKK

SEQ ID NO: 1031590 - protein, 228 aa, Homo sapiens [sequence omitted]

SEQ ID NO: 1031591 - protein, 322 aa, Homo sapiens
MVAHDETGGLLPIKRTIRVLDVNNQSFREQEEPSNKRVRPLARVTSLANLISPVRNGAVRRFGQTIQSFTLRGDHRSPASAQKFSSRSTVPTPAKRRSSALWSEMLDITMKESLTTREIRRQEAIYEMSRGEQDLIEDLKLARKAYHDPMLKLSIMSEEELTHIFGDLDSYIPLHEDLLTRIGEATKPDGTVEQIGHILVSWLPRLNAYRGYCSNQLAAKALLDQKKQDPRVQDFLQRCLESPFSRKLDLWSFLDIPRSRLVKYPLLLKEILKHTPKEHPDVQLLEDAILIIQGVLSDINLKKGESECQYHINKQKNNNPKS

SEQ ID NO: 1031592 - protein, 387 aa, Homo sapiens
MSEEELTHIFGDLDSYIPLHEDLLTRIGEATKPDGTVEQIGHILVSWLPRLNAYRGYCSNQLAAKALLDQKKQDPRVQDFLQRCLESPFSRKLDLWSFLDIPRSRLVKYPLLLKEILKHTPKEHPDVQLLEDAILIIQGVLSDINLKKGESECQYYIDKLEYLDEKQRDPRIEASKVLLCHGELRSKSGHKLYIFLFQDILVLTRPVTRNERHSYQVYRQPIPVQELVLEDLQDGDVRMGGSFRGAFSNSEKAKNIFRIRFHDPSPAQSHTLQANDVFHKQQWFNCIRAAIAPFQSAGSPPELQGLPELHEECEGNHPSARKLTAQRRASTVSSVTQVEVDENAYRCGSGMQMAEDSKSLKTHQTQPGIRRARDKALSGGKRKETLV

SEQ ID NO: 1031593 - protein, 418 aa, Homo sapiens; identical to SEQ ID NO: 1031589

SEQ ID NO: 1031594 - protein, 151 aa, Homo sapiens; identical to SEQ ID NO: 1031587

SEQ ID NO: 1031595 - protein, 151 aa, Homo sapiens; identical to SEQ ID NO: 1031587

SEQ ID NO: 1031596 - protein, 460 aa, Homo sapiens
MDGWPAKRRSSALWSEMLDITMKESLTTREIRRQEAIYEMSRGEQDLIEDLKLARKAYHDPMLKLSIMSEEELTHIFGDLDSYIPLHEDLLTRIGEATKPDGTVEQIGHILVSWLPRLNAYRGYCSNQLAAKALLDQKKQDPRVQDFLQRCLESPFSRKLDLWSFLDIPRSRLVKYPLLLKEILKHTPKEHPDVQLLEDAILIIQGVLSDINLKKGESECQYYIDKLEYLDEKQRDPRIEASKVLLCHGELRSKSGHKLYIFLFQDILVLTRPVTRNERHSYQVYRQPIPVQELVLEDLQDGDVRMGGSFRGAFSNSEKAKNIFRIRFHDPSPAQSHTLQANDVFHKQQWFNCIRAAIAPFQSAGSPPELQGLPELHEECEGNHPSARKLTAQRRASTVSSVTQVEVDENAYRCGSGMQMAEDSKSLKTHQTQPGIRRARDKALLVANGKRLWCREGSVC

SEQ ID NO: 1031597 - protein, 149 aa, Homo sapiens
MRVVLPEPSSPKTRMFLPDGSLDLARVDTSLRMEDHRLWPSSSSLVRSPAAATAGPLGPSSSFFSTPTGAILPTAATKRALPRARRGPARTRAGQPPARRPSRRAARRPCRGDCAAQRVLWSAMATGSHGLRGRRGGGGGQAAAGAAMR

SEQ ID NO: 1031598 - protein, 82 aa, Homo sapiens
MRVVLPEPSSPKTRMFLPDGSLDLARVDTSLRMEDHRLWPSSSSLVRSPAAATAGPLGCIDTSCCGTARDLVPSHRKVSSVS

SEQ ID NO: 1031599 - protein, 144 aa, Homo sapiens
VSAAFMKKYIHVATIIRPVLTQESDTYISRGVFTLRSRDSMSSDTARHLQLQPEHWNSDSTGHSPCEARMSKTVDLQDAKEAVELVQYAYFKKVLEKEKKRKKRSKDESETEDEEEKAKRPGAEEERGDSAQPDAKDGDSYDPY

SEQ ID NO: 1031600 - protein, 519 aa, Homo sapiens
MQQFGGLEATGILDEATLALMKTPRCSLPDLPVLTQARRRRQAPAPTKWNKRNLSWRVRTFPRDSPLGHDTVRALMYYALKVWSDIAPLNFHEVAGSTADIQIDFSKADHNDGYPFDGPGGTVAHAFFPGHHHTAGDTHFDDDEAWTFRSSDAHGMDLFAVAVHEFGHAIGLSHVAAAHSIMRPYYQGPVGDPLRYGLPYEDKVRVWQLYGVRESVSPTAQPEEPPLLPEPPDNRSSAPPRKDVPHRCSTHFDAVAQIRGEAFFFKGKYFWRLTRDRHLVSLQPAQMHRFWRGLPLHLDSVDAVYERTSDHKIVFFKGDRYWVFKDNNVEEGYPRPVSDFSLPPGGIDAAFSWAHNDRTYFFKDQLYWRYDDHTRHMDPGYPAQSPLWRGVPSTLDDAMRWSDGASYFFRGQEYWKVLDGELEVAPGYPQSTARDWLVCGDSQADGSVAAGVDAAEGPRAPPGQHDQSRSEDGYEVCSCTSGASSPPGAPGPLVAATMLLLLPPLSPGALWTAAQALTL

SEQ ID NO: 1031601 - protein, 626 aa, Homo sapiens
RSLAGAPRRAEGAGLRNAKRRARDPARRPRAHVSAMRRRAARGPGPPPPGPGLSRLPLLPLPLLLLLALGTRGGCAAPEPARRAEDLSLGVEWLSRFGYLPPADPTTGQLQTQEELSKAITAMQQFGGLEATGILDEATLALMKTPRCSLPDLPVLTQARRRRQAPAPTKWNKRNLSWRVRTFPRDSPLGHDTVRALMYYALKVWSDIAPLNFHEVAGSTADIQIDFSKADHNDGYPFDGPGGTVAHAFFPGHHHTAGDTHFDDDEAWTFRSSDAHGMDLFAVAVHEFGHAIGLSHVAAAHSIMRPYYQGPVGDPLRYGLPYEDKVRVWQLYGVRESVSPTAQPEEPPLLPEPPDNRSSAPNWIPSEVVLRAGIARGRRSCDLVPTPAPDVTGPPRKDVPHRCSTHFDAVAQIRGEAFFFKGKYFWRLTRDRHLVSLQPAQMHRFWRGLPLHLDSVDAVYERTSDHKIVFFKGTSCTGATMTTRGTWTPATPPRAPCGGVSPARWTTPCAGPTVPPTSSVARSTGKCWMASWRWHPGTHSPRPGTGWCVETHRPMDLWLRAWTRQRGPAPLQDNMTRAARRTVTRSAHAPLGHPLPRGPQAHWWLPPCCCCCRHCHQAPCGQRPRP

SEQ ID NO: 1031602 - protein, 244 aa, Homo sapiens
AVPSSPGEGPGQGRLTQEKERQELLPFGVGPSRATKLFLSPPGDRYWVFKDNNVEEGYPRPVSDFSLPPGGIDAAFSWAHNDRTYFFKDQLYWRYDDHTRHMDPGYPAQSPLWRGVPSTLDDAMRWSDGASYFFRGQEYWKVLDGELEVAPGYPQSTARDWLVCGDSQADGSVAAGVDAAEGPRAPPGQHDQSRSEDGYEVCSCTSGASSPPGAPGPLVAATMLLLLPPLSPGALWTAAQALTL

SEQ ID NO: 1031603 - protein, 605 aa, Homo sapiens
MRRRAARGPGPPPPGPGLSRLPLLPLPLLLLLALGTRGGCAAPEPARRAEDLSLGVEWLSRFGYLPPADPTTGQLQTQEELSKAITAMQQFGGLEATGILDEATLALMKTPRCSLPDLPVLTQARRRRQAPAPTKWNKRNLSWRVRTFPRDSPLGHDTVRALMYYALKVWSDIAPLNFHEVAGSTADIQIDFSKADHNDGYPFDARRHRAHAFFPGHHHTAGYTHFNDDEAWTFRSSDAHGMDLFAVAVHEFGHAIGLSHVAAAHSIMRPYYQGPVGDPLRYGLPYEDKVRVWQLYGVRESVSPTAQPEEPPLLPEPPDNRSSAPPRKDVPHRCSTHFDAVAQIRGEAFFFKGKYFWRLTRDRHLVSLQPAQMHRFWRGLPLHLDSVDAVYERTSDHKIVFFKGDRYWVFKDNNVEEGYPRPVSDFSLPPGGIDAAFSWAHNDRTYFFKDQLYWRYDDHTRHMDPGYPAQSPLWRGVPSTLDDAMRWSDGASYFFRGQEYWKVLDGELEVAPGYPQSTARDWLVCGDSQADGSVAAGVDAAEGPRAPPGQHDQSRSEDGYEVCSCTSGASSPPGAPGPLVAATMLLLLPPLSPGALWTAAQALTL

SEQ ID NO: 1031604 - protein, 204 aa, Homo sapiens
  misc_feature (11)..(11): Xaa can be any naturally occurring amino acid
  misc_feature (118)..(118): Xaa can be any naturally occurring amino acid
  misc_feature (120)..(120): Xaa can be any naturally occurring amino acid
  misc_feature (128)..(128): Xaa can be any naturally occurring amino acid
  misc_feature (135)..(135): Xaa can be any naturally occurring amino acid
  misc_feature (141)..(142): Xaa can be any naturally occurring amino acid
  misc_feature (150)..(150): Xaa can be any naturally occurring amino acid
  misc_feature (171)..(171): Xaa can be any naturally occurring amino acid
  misc_feature (183)..(188): Xaa can be any naturally occurring amino acid
  misc_feature (190)..(190): Xaa can be any naturally occurring amino acid
  misc_feature (192)..(192): Xaa can be any naturally occurring amino acid
  misc_feature (198)..(198): Xaa can be any naturally occurring amino acid
RDFTVSALHGXMDQKERDVIMREFRSGSSRVLITTDLLARGIDVQQVSLVINYDLPTNRENYIHRIGRGGRFGRKGVAINFVTEEDKRILRHTDTLNNTTVEEMPPHAAPPPPPLGSXLXTQRSLSPXTPPPPPXPPPPPXXPTPLPTPXPPPPPPPPPPPPPPPPPPPPXPPPPPPPHPHRXXXXXXWXPXTPPPPXIYFPVL

SEQ ID NO: 1031605 - protein, 112 aa, Homo sapiens
  misc_feature (11)..(11): Xaa can be any naturally occurring amino acid
RDFTVSALHGXMDQKERDVIMREFRSGSSRVLITTDLLARGIDVQQVSLVINYDLPTNRENYIHRIGRGGRFGRKGVAINFVTEEDKRILRHTDTLNNTTVEEMPMNVAALI

SEQ ID NO: 1031606 - protein, 417 aa, Homo sapiens
MAVETTVHTHLSASPPQGSPYDHTPGMAGSLGYHPYAAPLGSYPYGDPAYRKNATRDATATLKAWLNEHRKNPYPTKGEKIMLAIITKMTLTQVSTWFANARRRLKKENKMTWTPRNRSEDEEEEENIDLEKNDEDEPQKPEDKGDPEGPEAGGAEQKAASGCERLQGPPTPAGKETEGSLSDSDFKEPPSEGRLDALQGPPRTGGPSPAGPAAARLAEDPAPHYPAGAPAPGPHPAAGEVPPGPGGPSVIHSPPPPPPPAVLAKPKLWSLAEIATLSDKVKDGGGGNEGSPCPPCPGPIAGQALGGSRASPAPAPSRSPSAQCPFPGGTVLSRPLYYTAPFYPGYTNYGSFGHLHGHPGPGPGPTTGPGSHFNGLNQTVLNRADALAKDPKMLRSQSQLDLCKDSPYELKKGMSDI

SEQ ID NO: 1031607 - protein, 400 aa, Homo sapiens
APPIMFYCLWVSRSPAFLTLYSFNGPITGTDNGHKRRAGGPGFPKCLPNPPQTDSMTPPWLEYDGGAIITKMTLTQVSTWFANARRRLKKENKMTWTPRNRSEDEEEEENIDLEKNDEDEPQKPEDKGDPEGPEAGGAEQKAASGCERLQGPPTPAGKETEGSLSDSDFKEPPSEGRLDALQGPPRTGGPSPAGPAAARLAEDPAPHYPAGAPAPGPHPAAGEVPPGPGGPSVIHSPPPPPPPAVLAKPKLWSLAEIATLSDKVKDGGGGNEGSPCPPCPGPIAGQALGGSRASPAPAPSRSPSAQCPFPGGTVLSRPLYYTAPFYPGYTNYGSFGHLHGHPGPGPGPTTGPGSHFNGLNQTVLNRADALAKDPKMLRSQSQLDLCKDSPYELKKGMSDI

SEQ ID NO: 1031608 - protein, 117 aa, Homo sapiens
MAVETTVHTHLSASPPQGSPYDHTPGMAGSLGYHPYAAPLGSYPYGDPAYRKNATRDATATLKAWLNEHRKNPYPTKGEKIMLAIITKMTLTQVSTWFANARRRLKKENKMTTGAPN

SEQ ID NO: 1031609 - protein, 86 aa, Homo sapiens
MAFVLWLLSPYTKGASLLYRKFVHPSLSRHEKVPHGEAGTGGLGVGMRERALDLGFRMLGTPGFYPSPAAIEGQDLDRAQPTSSSG

SEQ ID NO: 1031610 - protein, 257 aa, Homo sapiens
MVSWMICRLVVLVFGMLCPAYASYKAVKTKNIREYVRWMMYWIVFALFMAAEIVTDIFISWFPFYYEIKMAFVLWLLSPYTKGASLLYRKFVHPSLSRHEKEIDAYIVQAKERSYETVLSFGKRGLNIAASAAVQAATKSQGALAGRLQSFSMQDLRSISDAPAPAYHDPLYLEDQVSHRRPPIGYRAGGLQDSDTEDECWSDTEAVPRAPARPREKPLIRSQSLRVVKRKPPVREGTSRSLKVRTRKKTVPSDVDS

SEQ ID NO: 1031611 - protein, 160 aa, Homo sapiens
MVSWMICRLVVLVFGMLCPAYASYKAVKTKNIREYVRWMMYWIVFALFMAAEIVTDIFISWFPFYYEIKMAFVLWLLSPYTKGASLLYRKFVHPSLSRHEKEIDAYIVQAKERSYRDRAQLREAGPQHCRLRCCAGCHQESGGAGRQAAELLHAGPALHL

SEQ ID NO: 1031612 - protein, 160 aa, Homo sapiens; identical to SEQ ID NO: 1031611

SEQ ID NO: 1031613 - protein, 94 aa, Homo sapiens
ASRSPGVGQHSVPCNFQVSCELRPVGRCWWPGALEPRRPAPARDQQQGPSARFSAAERAGGSCNCPGRGARPLPSRLPPRRGRFASGLPILQVP

SEQ ID NO: 1031614 - protein, 182 aa, Homo sapiens
  misc_feature (24)..(24): Xaa can be any naturally occurring amino acid
  misc_feature (32)..(33): Xaa can be any naturally occurring amino acid
  misc_feature (39)..(39): Xaa can be any naturally occurring amino acid
  misc_feature (41)..(41): Xaa can be any naturally occurring amino acid
  misc_feature (49)..(49): Xaa can be any naturally occurring amino acid
  misc_feature (53)..(53): Xaa can be any naturally occurring amino acid
  misc_feature (57)..(57): Xaa can be any naturally occurring amino acid
  misc_feature (61)..(63): Xaa can be any naturally occurring amino acid
  misc_feature (67)..(68): Xaa can be any naturally occurring amino acid
  misc_feature (73)..(73): Xaa can be any naturally occurring amino acid
  misc_feature (75)..(75): Xaa can be any naturally occurring amino acid
  misc_feature (83)..(83): Xaa can be any naturally occurring amino acid
  misc_feature (85)..(85): Xaa can be any naturally occurring amino acid
  misc_feature (87)..(87): Xaa can be any naturally occurring amino acid
  misc_feature (89)..(89): Xaa can be any naturally occurring amino acid
  misc_feature (91)..(91): Xaa can be any naturally occurring amino acid
  misc_feature (93)..(93): Xaa can be any naturally occurring amino acid
  misc_feature (99)..(99): Xaa can be any naturally occurring amino acid
  misc_feature (104)..(105): Xaa can be any naturally occurring amino acid
  misc_feature (112)..(113): Xaa can be any naturally occurring amino acid
  misc_feature (117)..(117): Xaa can be any naturally occurring amino acid
  misc_feature (126)..(126): Xaa can be any naturally occurring amino acid
  misc_feature (131)..(131): Xaa can be any naturally occurring amino acid
  misc_feature (136)..(136): Xaa can be any naturally occurring amino acid
  misc_feature (139)..(140): Xaa can be any naturally occurring amino acid
  misc_feature (154)..(154): Xaa can be any naturally occurring amino acid
  misc_feature (163)..(163): Xaa can be any naturally occurring amino acid
  misc_feature (170)..(172): Xaa can be any naturally occurring amino acid
FAPPGPLNPILSPPPSKPRGKGIXKGGSPQSXXGGPNPXFXGVIPGGPXGGAXFHGXQGRXXXRKGXXNVFFXFXCIFFCIFXCXHXPXCXTXGLSGSXFAGMXXTHTDTFXXIDTXMDTGRLRCXRLKGXRHIHXLTXXGGLTLPPSFSTVYXFTVNVWYIXVTCGHSXXXRLVTRHKCVL

SEQ ID NO: 1031615 - protein, 91 aa, Homo sapiens
MVSWMICRLVVEYGRPQTSSTPGCRPAPVVEAVDVYWEEELFELHPPALHARVNGPVGLHAVFGGTAGYPPPQASLAENDPCRTPHTLQTL

SEQ ID NO: 1031616 - protein, 160 aa, Homo sapiens; identical to SEQ ID NO: 1031611

SEQ ID NO: 1031617 - protein, 160 aa, Homo sapiens; identical to SEQ ID NO: 1031611

SEQ ID NO: 1031618 - protein, 160 aa, Homo sapiens; identical to SEQ ID NO: 1031611

SEQ ID NO: 1031619 - protein, 105 aa, Homo sapiens [sequence omitted]

SEQ ID NO: 1031620 - protein, 257 aa, Homo sapiens; identical to SEQ ID NO: 1031610

SEQ ID NO: 1031621 - protein, 143 aa, Homo sapiens [sequence omitted]

SEQ ID NO: 1031622 - protein, 114 aa, Homo sapiens
KGPALAFILWPPTKHCLSCAQAMLQGSDRYLESRDASRLSGRDPSSWTVEDVMQFVREADPQLGPHADLFRKHEIDGKALLLLRSDMMMKYMGLKLGPALKLSYHIDRLKQGKF

SEQ ID NO: 1031623 - protein, 66 aa, Homo sapiens
  misc_feature (2)..(2): Xaa can be any naturally occurring amino acid
KXRPLLSSCGLPPSTASAVAGYAPGEIDGKALLLLRSDMMMKYMGLKLGPALKLSYHIDRLKQGKF

SEQ ID NO: 1031624 - protein, 114 aa, Homo sapiens; identical to SEQ ID NO: 1031622

SEQ ID NO: 1031625 - protein, 114 aa, Homo sapiens; identical to SEQ ID NO: 1031622

SEQ ID NO: 1031626 - protein, 114 aa, Homo sapiens; identical to SEQ ID NO: 1031622

SEQ ID NO: 1031627 - protein, 236 aa, Homo sapiens
MDVCEWYTRILMKDIDILNSAGKMDKMRLLNILMQLRKCCNHPYLFDGAEPGPPYTTDMHLVTNSGKMVVLDKLLPKLKEQGSRVLIFSQMTRVLDILEDYCMWRNYEYCRLDGQTPHDERQDSINAYNEPNSTKFVFMLSTRAGGLGINLATADVVILYDSDWNPQVDLQAMDRAHRIGQTKTVRVFRFITDNTVEERIVERAEMKLRLEFIVIQQGRLVDQNLNKIGKMNASND

SEQ ID NO: 1031628 - protein, 374 aa, Homo sapiens
MDVCVTSYEMLIKEKSVFKKFNWRYLVIDEAHRIKNEKSKLSEIVREFKTTNRLLLTGTPLQNNLHELWSLLNFLLPDVFNSADDFDSWFDTNNCLGDQKLVERLHMVLRPFLLRRIKADVEKSLPPKKEVKIYVGLSKMQREWYTRILMKDIDILNSAGKMDKMRLLNILMQLRKCCNHPYLFDGAEPGPPYTTDMHLVTNSGKMVVLDKLLPKLKEQGSRVLIFSQMTRVLDILEDYCMWRNYEYCRLDGQTPHDERQDSINAYNEPNSTKFVFMLSTRAGGLGINLATADVVILYDSDWNPQVDLQAMDRAHRIGQTKTVRVFRFITDNTVEERIVERAEMKLRLEFIVIQQGRLVDQNLNKIGKMNASND

SEQ ID NO: 1031629 - protein, 107 aa, Homo sapiens
  misc_feature (6)..(6): Xaa can be any naturally occurring amino acid
TLGKPXLDIGLGKDFMTKNPKANAIKTKINSWDLIKLKSFCMAKGTVSRVNRQPTEWEKIFTIYTSDKGLISRIYNKIKQISKKKNNHIKKWAKDMNDNSKKKTYKW

SEQ ID NO: 1031630 - protein, 119 aa, Homo sapiens
MTTGAKASLPSTQCLRMPSRMLGGKWMCRSQRNTMLLASSTASTPACSPAERSKFPVRLRYWYRGRRAARRARSTSISSLSKSTRTTLKRESPVRACSAAMSARNCATHRAWFFTGTMK

SEQ ID NO: 1031631 - protein, 247 aa, Homo sapiens
MVDREQLVQKARLAEQAERYDDMAAAMKNVTELNEPLSNEERNLLSVAYKNVVGARRSSWRVISSIEQKTSADGNEKKIEMVRAYREKIEKELEAVCQDVLSLLDNYLIKNCSETQYESKVFYLKMKGDYYRYLAEVATGEKRATVVESSEKAYSEAHEISKEHMQPTHPIRLGLALNYSVFYYEIQNAPEQACHLAKTAFDDAIAELDTLNEDSYKDSTLIMQLLRDNLTLWTSDQQDDDGGEGNN

SEQ ID NO: 1031632 - protein, 555 aa, Homo sapiens
KEGEAQYAVVHCTGYIKAWPPAGMTIPEEDADVGQGSKYCLVAIGRLQVTSSPVCMDMNGMSVPTEFLSRHNSDGIITFVDPRCISVIGYQPQDLLGKDILEFCHPEDQSHLRESFQQVVKLKGQVLSVMYRFRTKNREWMLIRTSSFTFQNPYSDEIEYIICTNTNVKQLQQQQAELEVHQRDGLSSYDLSQVPVPNLPAGVHEAGKSVEKADAIFSQERDPRFAEMFAGISASEKKMMSSASAAGTQQIYSQGSPFPSGHSGKAFSSSVVHVPGVNDIQSSSSTGQNMSQISRQLNQSQVAWTGSRPPFPGQQIPSQSSKTQSSPFGIGTSHTYPADPSSYSPLSSPATSSPSGNAYSSLANRTPGFAESGQSSGQFQGRPSEVWSQWQSQHHGQQSGEQHSHQQPGQTEVFQDMLPMPGDPTQGTGNYNIEDFADLGMFPPFSEYCGQSEAPAVQCHPYCDVDAHVNEAHPRPACPAAGPPPEAISPAVCPQAHHCSTLPCSRGCSATDQGPWQTLGDQLYLLYFICVCSGGEPSGSLSLVVNNLLIDNLYP

SEQ ID NO: 1031633 - protein, 376 aa, Homo sapiens
KEGEAQYAVVHCTGYIKAWPPAGMTIPEEDADVGQGSKYCLVAIGRLQVTSSPVCMDMNGMSVPTEFLSRHNSDGIITFVDPRCISVIGYQPQDLLGKDILEFCHPEDQSHLRESFQQVVKLKGQVLSVMYRFRTKNREWMLIRTSSFTFQNPYSDEIEYIICTNTNVKQLQQQQAELEVHQRDGLSSYDLSQVPVPNLPAGVHEAGKSVEKADAIFSQERDPRFAEMFAGISASEKKMMSSASAAGTQQIYSQGSPFPSGHSGKAFSSSVVHVPGVNDIQSSSSTGQNMSQISRQLNQSQVAWTGSRPPFPGQQIPSQSSKTQSSPFGIGTSHTYPADPSSLPCRRPPTRSHLPRCVSPGASLLHSPLQPRLLGH

SEQ ID NO: 1031634 - protein, 555 aa, Homo sapiens; identical to SEQ ID NO: 1031632

SEQ ID NO: 1031635 - protein, 555 aa, Homo sapiens; identical to SEQ ID NO: 1031632

SEQ ID NO: 1031636 - protein, 341 aa, Homo sapiens
MPKRKVTFQGVGDEEDEDEIIVPKKKLVDPVAGSGGPGSRFKGKHSLDSDEEEDDDDGGSSKYDILASEDVEGQEAATLPSEGGVRITPFNLQEEMEEGHFDADGNYFLNRDAQIRDSWLDNIDWVKIRERPPGQRQASDSEEEDSLGQTSMSAQALLEGLLELLLPRETVAGALRRLGARGGGKGRKGPGQPSSPQRLDRLSGLADQMVARGNLGVYQETRERLAMRLKGLGCQTLGPHNPTPPPSLDMFAEELAEEELETPTPTQRGEAESRGDGLVDVMWEYKWENTGDAELYGPFTSAQMQTWVSEGYFPDGVYCRKLDPPGGQFYNSKRIDFDLYT

SEQ ID NO: 1031637 - protein, 341 aa, Homo sapiens; identical to SEQ ID NO: 1031636

SEQ ID NO: 1031638 - protein, 107 aa, Homo sapiens
MPKRKVTFQGVGDEEDEDEIIVPKKKLVDPVAGSGGPGSRFKGKHSLDSDEEEDDDDGGSSKYDILASEDVEGQEAATLPSEGGVRITPFNLQEEMGRWSGGCDVGI

SEQ ID NO: 1031639 - protein, 369 aa, Homo sapiens
MPKRKVTFQGVGDEEDEDEIIVPKKKLVDPVAGSGGPGSRFKGKHSLDSDEEEDDDDGGSSKYDILASEDVEGQEAATLPSEGGVRITPFNLQEEMEEGHFDADGNYFLNRDAQIRDSWLDNIDWVKIRERPPGQRQASDSEEEDSLGQTSMSAQALLEGLLELLLPRETVAGALRRLGARGGGKGRKGPGQPSSPQRLDRLSGLADQMVARGNLGVYQETRERLAMRLKGLGCQTLGPHNPTPPPSLDMFAEELAEEELETPTPTQRGEAESRGDGLVDVMWEYKWENTGDAELYGPFTSAQMQVSCFLPPPALSLLPPLLSVVPQLCPLLQTWVSEGYFPDGVYCRKLDPPGGQFYNSKRIDFDLYT

SEQ ID NO: 1031640 - protein, 110 aa, Homo sapiens
MVLKPKSVKKPTPPPSLDMFAEELAEEELETPTPTQRGEAESRGDGLVDVMWEYKWENTGDAELYGPFTSAQMQTWVSEGYFPDGVYCRKLDPPGGQFYNSKRIDFDLYT

SEQ ID NO: 1031641 - protein, 341 aa, Homo sapiens; identical to SEQ ID NO: 1031636

SEQ ID NO: 1031642 - protein, 341 aa, Homo sapiens; identical to SEQ ID NO: 1031636

SEQ ID NO: 1031643 - protein, 231 aa, Homo sapiens
MPKRKVTFQGVGDEEDEDEIIVPKKKLVDPVAGSGGPGSRFKGKHSLDSDEEEDDDDGGSSKYDILASEDVEGQEAATLPSEGGVRITPFNLQEEMEEGHFDADGNYFLNRDAQIRDSWLDNIDWVKIRERPPGQRQASDSEEEDSLGQTSMSAQALLEGLLELLLPRETVAGALRRLGARGGGKGRKGPGQPSSPQRLDRLSGLADQMVARGNPGGQFYNSKRIDFDLYT

SEQ ID NO: 1031644 - protein, 99 aa, Homo sapiens
SGIDIDFFTGLFLQLPHHQNHHQHQDQKDKNPSRNRKKLLKHQKGPSSVEDIKAKMQASIEKGGSLPKVEAKFINYVKNCFRMTDQEAIQDLWQWRKSL

SEQ ID NO: 1031645 - protein, 124 aa, Homo sapiens
PWCDSVLRGCSLEQRSFISVRLLSYLSACRHPMEDSMDMDMSPLRPQNYLFGCELKADKDYHFKVDNDENEHQLSLRTVSLGAGAKDELHIVEAEAMNYEGSPIKVTLATLNNVCTANGFPWGL

SEQ ID NO: 1031646 - protein, 124 aa, Homo sapiens; identical to SEQ ID NO: 1031645

SEQ ID NO: 1031647 - protein, 124 aa, Homo sapiens; identical to SEQ ID NO: 1031645

SEQ ID NO: 1031648 - protein, 124 aa, Homo sapiens; identical to SEQ ID NO: 1031645

SEQ ID NO: 1031649 - protein, 112 aa, Homo sapiens
VRVIRGSRCRYYYLSACRHPMEDSMDMDMSPLRPQNYLFGCELKADKDYHFKVDNDENEHQLSLRTVSLGAGAKDELHIVEAEAMNYEGSPIKVTLATLNNVCTANGFPWGL

SEQ ID NO: 1031650 - protein, 124 aa, Homo sapiens; identical to SEQ ID NO: 1031645

SEQ ID NO: 1031651 - protein, 124 aa, Homo sapiens; identical to SEQ ID NO: 1031645

SEQ ID NO: 1031652 - protein, 124 aa, Homo sapiens; identical to SEQ ID NO: 1031645

SEQ ID NO: 1031653 - protein, 99 aa, Homo sapiens; identical to SEQ ID NO: 1031644

SEQ ID NO: 1031654 - protein, 124 aa, Homo sapiens; identical to SEQ ID NO: 1031645

SEQ ID NO: 1031655 - protein, 145 aa, Homo sapiens
PWCDSVLRGCSLEQRSFISVRLLSYLSACRHPMEDSMDMDMSPLRPQNYLFGCELKADKDYHFKVDNDENEHQLSLRTVSLGAGAKDELHIVEAEAMNYEGSPIKVTLATLNNVCTAKFINYVKNCFRMTDQEAIQDLWQWRKSL

SEQ ID NO: 1031656 - protein, 71 aa, Homo sapiens
  misc_feature (6)..(6): Xaa can be any naturally occurring amino acid
VRNSTXLQGKTELRDAGGQNQLSREAEEKSCLQKGGSLPKVEAKFINYVKNCFRMTDQEAIQDLWQWRKSL

SEQ ID NO: 1031657 - protein, 124 aa, Homo sapiens; identical to SEQ ID NO: 1031645

SEQ ID NO: 1031658 - protein, 124 aa, Homo sapiens; identical to SEQ ID NO: 1031645

SEQ ID NO: 1031659 - protein, 124 aa, Homo sapiens; identical to SEQ ID NO: 1031645

SEQ ID NO: 1031660 - protein, 124 aa, Homo sapiens; identical to SEQ ID NO: 1031645

SEQ ID NO: 1031661 - protein, 124 aa, Homo sapiens; identical to SEQ ID NO: 1031645

SEQ ID NO: 1031662 - protein, 124 aa, Homo sapiens; identical to SEQ ID NO: 1031645

SEQ ID NO: 1031663 - protein, 190 aa, Homo sapiens
  misc_feature (59)..(59): Xaa can be any naturally occurring amino acid
  misc_feature (68)..(69): Xaa can be any naturally occurring amino acid
  misc_feature (71)..(71): Xaa can be any naturally occurring amino acid
  misc_feature (90)..(92): Xaa can be any naturally occurring amino acid
  misc_feature (118)..(119): Xaa can be any naturally occurring amino acid
  misc_feature (124)..(124): Xaa can be any naturally occurring amino acid
MDMDMSPLRPQNYLFGCELKADKDYHFNGCAATFNQPLAEPPSGPTNPTPPLGQRPTQXTPSLHATPXXQXYARLVQRMSCTLLTRGPPXXXYWPMNYEGSPIKVTLATLNNVCTCPXXPGGLXPQPTVSLGGFEITPPVVLRLKCGSGPVHISGQHLVAVEEDAESEDERGGGCETLKYIWKAVCPWRW

SEQ ID NO: 1031664 - protein, 124 aa, Homo sapiens; identical to SEQ ID NO: 1031645

SEQ ID NO: 1031665 - protein, 119 aa, Homo sapiens
MHALVLIAYHVRRCDCLHTHECERFGWDNGAVERTHDGPLGKLSCVGCELKADKDYHFKVDNDENEHQLSLRTVSLGAGAKDELHIVEAEAMNYEGSPIKVTLATLNNVCTANGFPWGL

SEQ ID NO: 1031666 - protein, 124 aa, Homo sapiens; identical to SEQ ID NO: 1031645

SEQ ID NO: 1031667 - protein, 79 aa, Homo sapiens
  misc_feature (8)..(8): Xaa can be any naturally occurring amino acid
WATSPKSXGCRSFCLRQKLLHHQKGPSSVEDIKAKMQASIEKGGSLPKVEAKFINYVKNCFRMTDQEAIQDLWQWRKSL

SEQ ID NO: 1031668 - protein, 124 aa, Homo sapiens; identical to SEQ ID NO: 1031645

SEQ ID NO: 1031669 - protein, 124 aa, Homo sapiens; identical to SEQ ID NO: 1031645

SEQ ID NO: 1031670 - protein, 124 aa, Homo sapiens; identical to SEQ ID NO: 1031645

SEQ ID NO: 1031671 - protein, 124 aa, Homo sapiens; identical to SEQ ID NO: 1031645

SEQ ID NO: 1031672 - protein, 124 aa, Homo sapiens; identical to SEQ ID NO: 1031645

SEQ ID NO: 1031673 - protein, 124 aa, Homo sapiens; identical to SEQ ID NO: 1031645

SEQ ID NO: 1031674 - protein, 124 aa, Homo sapiens; identical to SEQ ID NO: 1031645

SEQ ID NO: 1031675 - protein, 101 aa, Homo sapiens
GPCVYRPRFFSVSFITSSVYRSLAGGGMRLPRGTQVSLHLALYPVSFAVFMCSDALPLGASKLQCPLPPGRGDPQAPSAQRCTCLVALLLPGTVDLSVCLF

SEQ ID NO: 1031676 - protein, 1737 aa, Homo sapiens
SPLRAPAGREGGAPAEVAAAPQDGSSCSLVSRQLTDHSQLLQATCIPCLRASLLHPPSQQLWDGRRSCPCSHWVKEAETTDMTESSMKKLASTLLDAITDKDPLVQEQVCSALCSLGEVRPVETLRACEEYLRQHDKLAHPYRAAVLRAMERVLSSRASELDKDTASTIILLASSEMTKTKDLVWDWQQAASGVLVAVGRQFISKVMEELLRRLHPGTLPHCAVLHTLASLSVANAFGVVPFLPSVLSSLLPVLGVAKQDTVRVAFCSALQRFSEGALEYLANLDRAPDPTVRKDAFATDIFSAYDVLFHQWLQSREAKLRLAVVEALGPMSHLLPSERLEEQLPKLLPGILALYKKHAETFYLSKSLGQILEAAVSVGSRTLETQLDALLAALHSQICVPVESSSPLVMSNQKEVLRCFTVLACSSPDRLLAFLLPRLDTSNERTRVGTLQVVRHVINSAAAQMEDKKPFILSSMRLPLLDTNSKVKRAVVQVISAMAHHGYLEQPGGEAMIEYIVQQCALPPEQEPEKPGPGSKDPKADSVRAISVRTLYLVSTTVDRMSHVLWPYLLQFLTPVRFTGALTPLCRSLVHLAQKRQEAGADAFLIQYDAHASLPSPYAVTGRLLVVSSSPYLGDGRGAAALRLLSVLHPNIHPLLGQHWETTVPLLLGYLDEHTEETLPQEEWEEKLLMFLRDTLAIISDNAWICQLSLELCRQLPCYDEAPQEKNFLYKCIGTTLGAASSKEVVRKHLQELLETARYQEEAEREGLACCFGICAISHLEDTLAQLEDFVRSEVFRKSIGILNIFKDRSENEVEKVKSALILCYGHVAARAPRELVLAKVESDILRNICQHFSTKDPALKLCLVQSVCMVSRAICSSTQAGSFHFTRKAELVAQMMEFIRAEPPDSLRTPIRKKAMLTCTYLVSVEPALDEQARADVIHGCLHSIMALLPEPKEEDGGCQKSLYLETLHALEDLLTSLLQRNMTPQGLQIMIEHLSPWIKSPRGHERARALGLSALLLRYFLEHLRVSGAQVDTRFPSEPRILCNCALVPFHNLGLLIGLFSPRCADLWPATRQEAVDCVYSLLYLQLGYEGFSRDYRDDVAERLLSLKDGLVHPDPAILFHTCHSVGQIIAKRLPPDQLISLLLTMFEALGDPEKNCSRAATVMINCLLQERGGVLQEKVPEIVSVLRSKLQEAQGEHVLPAAQHSVYLLATQHCAAVVSSLLGSPLPLDSHTCMLWRALAVEPRLAAQVLGLLLEKMSRDVPFKESRAFLLGRTPDRVATLLPLSATCALFEVMSTPAAGPAVLELLYPQLFVVLLLRVSCTVGVQLPRNLQAQERRGASPALATRNLEPCSSAVDTLRSMLLRSGSEDVVQRMDLEGGWELLRTSAGHEEGATRLASGPLSQAMAEHAGPRLPLVLKTLACTHSSAYENQRVTTTAFLAELLNSNVANDLMLLDSLLESLAARQKDTCASVRRLVLRGLANLASGCPDKVRTHGPQLLTAMIGGLDDGDNPHSPVALEAMLGLARLVHLVESWDLRSGLLHVAIRIRPFFDSEKMEFRTASIRLFGHLNKVCHGDCEDVFLDQVVGGLAPLLLHLQDPQATVASACRFALRMCGPNLACEELSAAFQKHLQEGRALHFGEFLNTTCKHLMHHFPDLLGRLLTTCLFYFKSSWENVRAAAPLFTGFLVLHSEPRQQPQVDLDQLIAALQILLKDPAPEVRTRAAEALGRLVKLA

SEQ ID NO: 1031677 - protein, 607 aa, Homo sapiens
MAKRLPPDQLISLLLTMFEALGDPEKNCSRAATVMINCLLQERGGVLQEKVPEIVSVLRSKLQEAQGEHVLPAAQHSVYLLATQHCAAVVSSLLGSPLPLDSHTCMLWRALAVEPRLAAQVLGLLLEKMSRDVPFKESRAFLLGRTPDRVATLLPLSATCALFEVMSTPAAGPAVLELYLYPQLFVVLLLRVSCTVGVQLPRNLQAQERRGASPALATRNLEPCSSAVDTLRSMLLRSGSEDVVQRMDLEGGWELLRTSAGHEEGATRLASGPLSQAMAEHAGPRLPLVLKTLACTHSSAYENQRVTTTAFLAELLNSNVANDLMLLDSLLESLAARQKDTCASVRRLVLRGLANLASGCPDKVRTHGPQLLTAMIGGLDDGDNPHSPVALEAMLGLARLVHLVESWDLRSGLLHVAIRIRPFFDSEKMEFRTASIRLFGHLNKVCHGDCEDVFLDQVVGGLAPLLLHLQDPQATVASACRFALRMCGPNLACEELSAAFQKHLQEGRALHFGEFLNTTCKHLMHHFPDLLGRLLTTCLFYFKSSWENVRAAAPLFTGFLVLHSEPRQQPQVDLDQLIAALQILLKDPAPEVRTRAAEALGRLVKLA

SEQ ID NO: 1031678 - protein, 1720 aa, Homo sapiens
SPLRAPAGREGGAPAEVAAAPQDGSSCSLVSRQLTDHSQLLQATCIPCLRASLLHPPSQQLWDGRRSCPCSHWVKEAETTDMTESSMKKLASTLLDAITDKDPLVQEQVCSALCSLGEVRPVETLRACEEYLRQHDKLAHPYRAAVLRAMERVLSSRASELDKDTASTIILLASSEMTKTKDLVWDWQQAASGVLVAVGRQFISKVMEELLRRLHPGTLPHCAVLHTLASLSVANAFGVVPFLPSVLSSLLPVLGVAKQDTVRVAFCSALQRFSEGALEYLANLDRAPDPTVRKDAFATDIFSAYDVLFHQWLQSREAKLRLAVVEALGPMSHLLPSERLEEQLPKLLPGILALYKKHAETFYLSKSLGQILEAAVSVGSRTLETQLDALLAALHSQICVPVESSSPLVMSNQKEVLRCFTVLACSSPDRLLAFLLPRLDTSNERTRVGTLQVVRHVINSAAAQMEDKKPFILSSMRLPLLDTNSKVKRAVVQVISAMAHHGYLEQPGGEAMIEYIVQQCALPPEQEPEKPGPGSKDPKADSVRAISVRTLYLVSTTVDRMSHVLWPYLLQFLTPVRFTGALTPLCRSLVHLAQKRQEAGADAFLIQYDAHASLPSPYAVTGRLLVVSSSPYLGDGRGAAALRLLSVLHPNIHPLLGQHWETTVPLLLGYLDEHTEETLPQEEWEEKLLMFLRDTLAIISDNAWICQLSLELCRQLPCYDEAPQEKNFLYKCIGTTLGAASSKEVVRKHLQELLETARYQEEAEREGLACCFGICAISHLEDTLAQLEDFVRSEVFRKSIGILNIFKDRSENEVEKVKSALILCYGHVAARAPRELVLAKVESDILRNICQHFSTKDPALKLCLVQSVCMVSRAICSSTQAGSFHFTRKAELVAQMMEFIRAEPPDSLRTPIRKKAMLTCTYLVSVEPALDEQARADVIHGCLHSIMALLPEPKEEDGGCQKSLYLETLHALEDLLTSLLQRNMTPQGLQIMIEHLSPWIKSPRGHERARALGLSALLLRYFLEHLRVSALVPFHNLGLLIGLFSPRCADLWPATRQEAVDCVYSLLYLQLGYEGFSRDYRDDVAERLLSLKDGLVHPDPAILFHTCHSVGQIIAKRLPPDQLISLLLTMFEALGDPEKNCSRAATVMINCLLQERGGVLQEKVPEIVSVLRSKLQEAQGEHVLPAAQHSVYLLATQHCAAVVSSLLGSPLPLDSHTCMLWRALAVEPRLAAQVLGLLLEKMSRDVPFKESRAFLLGRTPDRVATLLPLSATCALFEVMSTPAAGPAVLELYLYPQLFVVLLLRVSCTVGVQLPRNLQAQERRGASPALATRNLEPCSSAVDTLRSMLLRSGSEDVVQRMDLEGGWELLRTSAGHEEGATRLASGPLSQAMAEHAGPRLPLVLKTLACTHSSAYENQRVTTTAFLAELLNSNVANDLMLLDSLLESLAARQKDTCASVRRLVLRGLANLASGCPDKVRTHGPQLLTAMIGGLDDGDNPHSPVALEAMLGLARLVHLVESWDLRSGLLHVAIRIRPFFDSEKMEFRTASIRLFGHLNKVCHGDCEDVFLDQVVGGLAPLLLHLQDPQATVASACRFALRMCGPNLACEELSAAFQKHLQEGRALHFGEFLNTTCKHLMHHFPDLLGRLLTTCLFYFKSSWENVRAAAPLFTGFLVLHSEPRQQPQVDLDQLIAALQILLKDPAPEVRTRAAEALGRLVKLA

SEQ ID NO: 1031679 - protein, 1715 aa, Homo sapiens
SPLRAPAGREGGAPAEVAAAPQDGSSCSLVSRQLTDHSQLLQATCIPCLRASLLHPPSQQLWDGRRSCPCSHWVKEAETTDMTESSMKKLASTLLDAITDKDPLVQEQVCSALCSLGEVRPVETLRACEEYLRQHDKLAHPYRAAVLRAMERVLSSRASELDKDTASTIILLASSEMTKTKDLVWDWQQAASGVLVAVGRQFISKVMEELLRRLHPGTLPHCAVLHTLASLSVANAFGVVPFLPSVLSSLLPVLGVAKQDTVRVAFCSALQRFSEGALEYLANLDRAPDPTVRKDAFATDIFSAYDVLFHQWLQSREAKLRLAVVEALGPMSHLLPSERLEEQLPKLLPGILALYKKHAETFYLSKSLGQILEAAVSVGSRTLETQLDALLAALHSQICVPVESSSPLVMSNQKEVLRCFTVLACSSPDRLLAFLLPRLDTSNERTRVGTLQVVRHVINSAAAQMEDKKPFILSSMRLPLLDTNSKVKRAVVQVISAMAHHGYLEQPGGEAMIEYIVQQCALPPEQEPEKPGPGSKDPKADSVRAISVRTLYLVSTTVDRMSHVLWPYLLQFLTPVRFTGALTPLCRSLVHLAQKRQEAGADAFLIQYDAHASLPSPYAVTGRLLVVSSSPYLGDGRGAAALRLLSVLHPNIHPLLGQHWETTVPLLLGYLDEHTEETLPQEEWEEKLLMFLRDTLAIISDNAWICQLSLELCRQLPCYDEAPQEKNFLYKCIGTTLGAASSKEVVRKHLQELLETARYQEEAEREGLACCFGICAISHLEDTLAQLEDFVRSEVFRKSIGILNIFKDRSENEVEKVKSALILCYGHVAARAPRELVLAKVESDILRNICQHFSTKDPALKLCLVQSVCMVSRAICSSTQAGSFHFTRKAELVAQMMEFIRAEPPDSLRTPIRKKAMLTCTYLVSVEPALDEQARADVIHGCLHSIMALLPEPKEEDGGCQKSLYLETLHALEDLLTSLLQRNMTPQGLQIMIEHLSPWIKSPRGHERARALGLSALLLRYFLEHLRVSALVPFHNLGLLIGLFSPRCADLWPATRQEAVDCVYSLLYLQLGYEGFSRDYRDDVAERLLSLKDGLVHPDPAILFHTCHSVGQIIAKRLPPDQLISLLLTMFEALGDPEKNCSRAATVMINCLLQERGGVLQEKVPEIVSVLRSKLQEAQGEHVLPAAQHSVYLLATQHCAAVVSSLLGSPLPLDSHTCMLWRALAVEPRLAAQVLGLLLEKMSRDVPFKESRAFLLGRTPDRVATLLPLSATCALFEVMSTPAAGPAVLELYLYPQLFVVLLLRVSCTVGVQLPRNLQAQERRGASPALATRNLEPCSSAVDTLRSMLLRSGSEDVVQRMDLEGGWELLRTSAGHEEGATRLASGPLSQAMAEHAGPRLPLVLKTLACTHSSAYENQRVTTTAFLAELLNSNVANDLMLLDSLLESLAARQKDTCASVRRLVLRGLANLASGCPDKVRTHGPQLLTAMIGGLDDGDNPHSPVALEAMLGLARLVHLVESWDLRSGLLHVAIRIRPFFDSEKMEFRTASIRLFGHLNKVCHGDCEDVFLDQVVGGLAPLLLHLQDPQATVASACRFALRMCGPNLACEELSAAFQKHLQEGRALHFGEFLNTTCKHLMHHFPDLLGRLLTTCLFYFKSSWENVRAAAPLFTGKHHPLPHPHAARQPRLMPPLHRVPGAALGAQAAAAGGPGPAHCG

SEQ ID NO: 1031680 - protein, 590 aa, Homo sapiens
SPLRAPAGREGGAPAEVAAAPQDGSSCSLVSRQLTDHSQLLQATCIPCLRASLLHPPSQQLWDGRRSCPCSHWVKEAETTDMTESSMKKLASTLLDAITDKDPLVQEQVCSALCSLGEVRPVETLRACEEYLRQHDKLAHPYRAAVLRAMERVLSSRASELDKDTASTIILLASSEMTKTKDLVWDWQQAASGVLVAVGRQFISKVMEELLRRLHPGTLPHCAVLHTLASLSVANAFGVVPFLPSVLSSLLPVLGVAKQDTVRVAFCSALQRFSEGALEYLANLDRAPDPTVRKDAFATDIFSAYDVLFHQWLQSREAKLRLAVVEALGPMSHLLPSERLEEQLPKLLPGILALYKKHAETFYLSKSLGQILEAAVSVGSRTLETQLDALLAALHSQICVPVESSSPLVMSNQKEVLRCFTVLACSSPDRLLAFLLPRLDTSNERTRVGTLQVVRHVINSAVISENILMLVLQCPAVGTEPCSSPRPFCSHQQPGPSSHQGPLLGHTRLPDVGGSSSLESSFCGSHIASSLPLSLSFRGTFQNKPWVLTPFFQCSTPMNMFLSLSSAPLLMLPQCVVILFTVQLSLCLFH

SEQ ID NO: 1031681 - protein, 99 aa, Homo sapiens
SPLRAPAGREGGAPAEVAAAPQDGSSCSLVSRQLTDHSQLLQATCIPCLRASLLHPPSQQLWDGRRSCPCSHWVKEAETTDMTESSMKSECMGIGSGRV

SEQ ID NO: 1031682 - protein, 1640 aa, Homo sapiens
QDFHEAPNPSYYCFSSKRPCHAFLQMSCVAVFTEPEHFSYVGPPPPAVAAIAVRVDELAHPYRAAVLRAMERVLSSRASELDKDTASTIILLASSEMTKTKDLVWDWQQAASGVLVAVGRQFISKVMEELLRRLHPGTLPHCAVLHTLASLSVANAFGVVPFLPSVLSSLLPVLGVAKQDTVRVAFCSALQRFSEGALEYLANLDRAPDPTVRKDAFATDIFSAYDVLFHQWLQSREAKLRLAVVEALGPMSHLLPSERLEEQLPKLLPGILALYKKHAETFYLSKSLGQILEAAVSVGSRTLETQLDALLAALHSQICVPVESSSPLVMSNQKEVLRCFTVLACSSPDRLLAFLLPRLDTSNERTRVGTLQVVRHVINSAAAQMEDKKPFILSSMRLPLLDTNSKVKRAVVQVISAMAHHGYLEQPGGEAMIEYIVQQCALPPEQEPEKPGPGSKDPKADSVRAISVRTLYLVSTTVDRMSHVLWPYLLQFLTPVRFTGALTPLCRSLVHLAQKRQEAGADAFLIQYDAHASLPSPYAVTGRLLVVSSSPYLGDGRGAAALRLLSVLHPNIHPLLGQHWETTVPLLLGYLDEHTEETLPQEEWEEKLLMFLRDTLAIISDNAWICQLSLELCRQLPCYDEAPQEKNFLYKCIGTTLGAASSKEVVRKHLQELLETARYQEEAEREGLACCFGICAISHLEDTLAQLEDFVRSEVFRKSIGILNIFKDRSENEVEKVKSALILCYGHVAARAPRELVLAKVESDILRNICQHFSTKDPALKLCLVQSVCMVSRAICSSTQAGSFHFTRKAELVAQMMEFIRAEPPDSLRTPIRKKAMLTCTYLVSVEPALDEQARADVIHGCLHSIMALLPEPKEEDGGCQKSLYLETLHALEDLLTSLLQRNMTPQGLQIMIEHLSPWIKSPRGHERARALGLSALLLRYFLEHLRVSALVPFHNLGLLIGLFSPRCADLWPATRQEAVDCVYSLLYLQLGYEGFSRDYRDDVAERLLSLKDGLVHPDPAILFHTCHSVGQIIAKRLPPDQLISLLLTMFEALGDPEKNCSRAATVMINCLLQERGGVLQEKVPEIVSVLRSKLQEAQGEHVLPAAQHSVYLLATQHCAAVVSSLLGSPLPLDSHTCMLWRALAVEPRLAAQVLGLLLEKMSRDVPFKESRAFLLGRTPDRVATLLPLSATCALFEVMSTPAAGPAVLELYLYPQLFVVLLLRVSCTVGVQLPRNLQAQERRGASPALATRNLEPCSSAVDTLRSMLLRSGSEDVVQRMDLEGGWELLRTSAGHEEGATRLASGPLSQAMAEHAGPRLPLVLKTLACTHSSAYENQRVTTTAFLAELLNSNVANDLMLLDSLLESLAARQKDTCASVRRLVLRGLANLASGCPDKVRTHGPQLLTAMIGGLDDGDNPHSPVALEAMLGLARLVHLVESWDLRSGLLHVAIRIRPFFDSEKMEFRTASIRLFGHLNKVCHGDCEDVFLDQVVGGLAPLLLHLQDPQATVASACRFALRMCGPNLACEELSAAFQKHLQEGRALHFGEFLNTTCKHLMHHFPDLLGRLLTTCLFYFKSSWENVRAAAPLFTGFLVLHSEPRQQPQVDLDQLIAALQILLKDPAPEVRTRAAEALGRLVKLA

SEQ ID NO: 1031683 - protein, 1054 aa, Homo sapiens
MCPGSSQPCEGSGSQPLSGIFGLQFLRDTLAIISDNAWICQLSLELCRQLPCYDEAPQEKNFLYKCIGTTLGAASSKEVVRKHLQELLETARYQEEAEREGLACCFGICAISHLEDTLAQLEDFVRSEVFRKSIGILNIFKDRSENEVEKVKSALILCYGHVAARAPRELVLAKVESDILRNICQHFSTKDPALKLCLVQSVCMVSRAICSSTQAGSFHFTRKAELVAQMMEFIRAEPPDSLRTPIRKKAMLTCTYLVSVEPALDEQARADVIHGCLHSIMALLPEPKEEDGGCQKSLYLETLHALEDLLTSLLQRNMTPQGLQIMIEHLSPWIKSPRGHERARALGLSALLLRYFLEHLRVSALVPFHNLGLLIGLFSPRCADLWPATRQEAVDCVYSLLYLQLGYEGFSRDYRDDVAERLLSLKDGLVHPDPAILFHTCHSVGQIIAKRLPPDQLISLLLTMFEALGDPEKNCSRAATVMINCLLQERGGVLQEKVPEIVSVLRSKLQEAQGEHVLPAAQHSVYLLATQHCAAVVSSLLGSPLPLDSHTCMLWRALAVEPRLAAQVLGLLLEKMSRDVPFKESRAFLLGRTPDRVATLLPLSATCALFEVMSTPAAGPAVLELYLYPQLFVVLLLRVSCTVGVQLPRNLQAQERRGASPALATRNLEPCSSAVDTLRSMLLRSGSEDVVQRMDLEGGWELLRTSAGHEEGATRLASGPLSQAMAEHAGPRLPLVLKTLACTHSSAYENQRVTTTAFLAELLNSNVANDLMLLDSLLESLAARQKDTCASVRRLVLRGLANLASGCPDKVRTHGPQLLTAMIGGLDDGDNPHSPVALEAMLGLARLVHLVESWDLRSGLLHVAIRIRPFFDSEKMEFRTASIRLFGHLNKVCHGDCEDVFLDQVVGGLAPLLLHLQDPQATVASACRFALRMCGPNLACEELSAAFQKHLQEGRALHFGEFLNTTCKHLMHHFPDLLGRLLTTCLFYFKSSWENVRAAAPLFTGFLVLHSEPRQQPQVDLDQLIAALQILLKDPAPEVRTRAAEALGRLVKLA

SEQ ID NO: 1031684 - protein, 1688 aa, Homo sapiens
SPLRAPAGREGGAPAEVAAAPQDGSSCSLVSRQLTDHSQLLQATCIPCLRASLLHPPSQQLWDGRRSCPCSHWVKEAETTDMTESSMKKLASTLLDAITDKDPLVQEQVCSALCSLGEVRPVETLRACEEYLRQHDKLAHPYRAAVLRAMERVLSSRASELDKDTASTIILLASSEMTKTKDLVWDWQQAASGVLVAVGRQFISKVMEELLRRLHPGTLPHCAVLHTLASLSVANAFGVVPFLPSVLSSLLPVLGVAKQDTVRVAFCSALQRFSEGALEYLANLDRAPDPTVRKDAFATDIFSAYDVLFHQWLQSREAKLRLAVVEALGPMSHLLPSERLEEQLPKLLPGILALYKKHAETFYLSKSLGQILEAAVSVGSRTLETQLDALLAALHSQICVPVESSSPLVMSNQKEVLRCFTVLACSSPDRLLAFLLPRLDTSNERTRVGTLQVVRHVINSAAAQMEDKKPFILSSMRLPLLDTNSKVKRAVVQVISAMAHHGYLEQPGGEAMIEYIVQQCALPPEQEPEKPGPGSKDPKADSVRAISVRTLYLVSTTVDRMSHVLWPYLLQFLTPVRFTGALTPLCRSLVHLAQKRQEAGADAFLIQYDAHASLPSPYAVTGRLLVVSSSPYLGDGRGAAALRLLSVLHPNIHPLLGQHWETTVPLLLGYLDEHTEETLPQEEWEEKLLMFLRDTLAIISDNAWICQLSLELCRQLPCYDEAPQEKNFLYKCIGTTLGAASSKEVVRKHLQELLETARYQEEAEREGLACCFGICAISHLEDTLAQLEDFVRSEVFRKSIGILNIFKDRSENEVEKVKSALILCYGHVAARAPRELVLAKVESDILRNICQHFSTKDPALKLCLVQSVCMVSRAICSSTQAGSFHFTRKAELVAQMMEFIRAEPPDSLRTPIRKKAMLTCTYLVSVEPALDEQARADVIHGCLHSIMALLPEPKEEDGGCQKSLYLETLHALEDLLTSLLQRNMTPQGLQIMIEHLSPWIKSPRGHERARALGLSALLLRYFLEHLRVSALVPFHNLGLLIGLFSPRCADLWPATRQEAVDCVYSLLYLQLGYEGFSRDYRDDVAERLLSLKDGLVHPDPAILFHTCHSVGQIIAKRLPPDQLISLLLTMFEALGDPEKNCSRAATVMINCLLQERGGVLQEKVPEIVSVLRSKLQEAQGEHVLPAAQHSVYLLATQHCAAVVSSLLGSPLPLDSHTCMLWRALAVEPRLAAQVLGLLLEKMSRDVPFKESRAFLLGRTPDRVATLLPLSATCALFEVMSTPAAGPAVLELYLYPQLFVVLLLRVSCTVGVQLPRNLQAQERRGASPALATRNLEPCSSAVDTLRSMLLRSGSEDVVQRMDLEGGWELLRTSAGHEEGATRLASGPLSQAMAEHAGPRLPLVLKTLACTHSSAYENQRVTTTAFLAELLNSNVANDLMLLDSLLESLAARQKDTCASVRRLVLRGLANLASGCPDKVRTHGPQLLTAMIGGLDDGDNPHSPVALEAMLGLARLVHLVESWDLRSGLLHVAIRIRPFFDSEKMEFRTASIRLFGHLNKVCHGDCEDVFLDQVVGGLAPLLLHLQDPQATVASACRFALRMCGPNLACEELSAAFQKHLQEGRALHFGEFLNTTCKHLMHHFPDLLGRLLTTCLFYFKSSWENVRAAAPLFTGSSRRWTWTSSLRRSRSC

SEQ ID NO: 1031685 - protein, 179 aa, Homo sapiens [sequence omitted]

SEQ ID NO: 1031686 - protein, 1449 aa, Homo sapiens
MTESSMKKLASTLLDAITDKDPLVQEQVCSALCSLGEVRPVETLRACEEYLRQHDKLAHPYRAAVLRAMERVLSSRASELDKDTASTIILLASSEMTKTKDLVWDWQQAASGVLVAVGRQFISKVMEELLRRLHPGTLPHCAVLHTLASLSVANAFGVVPFLPSVLSSLLPVLGVAKQDTVRVAFCSALQRFSEGALEYLANLDRAPDPTVRKDAFATDIFSAYDVLFHQWLQSREAKLRLAVVEALGPMSHLLPSERLEEQLPKLLPGILALYKKHAETFYLSKSLGQILEAAVSVGSRTLETQLDALLAALHSQICVPVESSSPLVMSNQKEVLRCFTVLACSSPDRLLAFLLPRLDTSNERTRVGTLQVVRHVINSAAAQMEDKKPFILSSMRLPLLDTNSKVKRAVVQVISAMAHHGYLEQPGGEAMIEYIVQQCALPPEQEPEKPGPGSKDPKADSVRAISVRTLYLVSTTVDRMSHVLWPYLLQFLTPVRFTGALTPLCRSLVHLAQKRQEAGADAFLIQYDAHASLPSPYAVTGRLLVVSSSPYLGDGRGAAALRLLSVLHPNIHPLLGQHWETTVPLLLGYLDEHTEETLPQEEWEEKLLMFLRDTLAIISDNAWICQLSLELCRQLPCYDEAPQEKNFLYKCIGTTLGAASSKEVVRKHLQELLETARYQEEAEREGLACCFGICAISHLEDTLAQLEDFVRSEVFRKSIGILNIFKDRSENEVEKVKSALILCYGHVAARAPRELVLAKVESDILRNICQHFSTKDPALKLCLVQSVCMVSRAICSSTQAGSFHFTRKAELVAQMMEFIRAEPPDSLRTPIRKKAMLTCTYLVSVEPALDEQARADVIHGCLHSIMALLPEPKEEDGGCQKSLYLETLHALEDLLTSLLQRNMTPQGLQIMIEHLSPWIKSPRGHERARALGLSALLLRYFLEHLRVSALVPFHNLGLLIGLFSPRCADLWPATRQEAVDCVYSLLYLQLGYEGFSRDYRDDVAERLLSLKDGLVHPDPAILFHTCHSVGQIIAKRLPPDQLISLLLTMFEALGDPEKNCSRAATVMINCLLQERGGVLQEKVPEIVSVLRSKLQEAQGEHVLPAAQHSVYLLATQHCAAVVSSLLGSPLPLDRYPAQTPGLGVPLEDAPPGMMLPEPSTRLCTPTFCMSSHGCRPRGTESDMELGPSLSGTHGDLSSPGVLGSSLAPGALHSTPTGKLLFLPSSKVPKLPGCSVGPRLQHTLEAAPHPVSWFRLLQALSSAGHPLLPVSRPLGTAWSEPPQEPKDNLVCTIHHYVFPSSHLPAPSKGQGVSTTHQPTGVPLPRRGLRSMGLLALPFFAILVMDRGWPRGTWLPVTSGRLHAGQGRVTLPLAGGGMRLPRGTQVSLHLALYPVSFAVFMCSDALPLGASKLQCPLPPGRGDPQAPSAQRCTCLVALLLPGTVDLSVCLF

SEQ ID NO: 1031687 - protein, 1720 aa, Homo sapiens; identical to SEQ ID NO: 1031678

SEQ ID NO: 1031688 - protein, 71 aa, Homo sapiens
MSDEEVEQVEEQYEEEEEAQEEAAEVHEEVHEPEEVQEEEKPRPKLTAPKIPEGEKVDFDDIHKKRENKDL

SEQ ID NO: 1031689 - protein, 60 aa, Homo sapiens
MSDEEVEQVEEQYEEEEEAQEEEEVQEEEKPRPKLTAPKIPEGEKVDFDDIHKKRENKDL

SEQ ID NO: 1031690 - protein, 99 aa, Homo sapiens
GCPQGAPALLTLDPQKPPTFTMSDEEVEQVEEQYEEEEEAQEEAAEVHEEVHEPEEVQEDTAEEDARGSQEEEKPRPKLTAPKIPEGEKVDFDDIHKKR

SEQ ID NO: 1031691 - protein, 109 aa, Homo sapiens
MLLTCNFSPNSVLTETCAVLNQRLMHLGPCRMCFVNNVFAGSMLGKSHPHPPFLINQGHSALQKAAGTSAQESLGIVQGFPPLRQPEIWPRGKGKILPSPSPTPVKGLC

SEQ ID NO: 1031692 - protein, 109 aa, Homo sapiens; identical to SEQ ID NO: 1031691

SEQ ID NO: 1031693 - protein, 106 aa, Homo sapiens
AGNACSSGINWIFNVLVSLTFLHTAEYLTYYGAFFLYAGFAAVGLLFIYGCLPETKGKKLEEIESLFDNRLCTCGTSDSDEGRYIEYIRVKGSNYHLSDNDASDVE

SEQ ID NO: 1031694 - protein, 104 aa, Homo sapiens
MDTYKQAEEPRSEPQRETLKAIHYALNCCGLAGGVEQFISDICPKKDVLETFTVKSCPDAIKEVFDNKFHIIGAVGIGIAVVMIFGMIFSMILCCAIRRNREMV

SEQ ID NO: 1031695 - protein, 59 aa, Homo sapiens
MQGTTGREPFLSVFLSDERRGLGRRERAGAGRLLHDLDVSVWLRQFHDAHSYVNCWIAA

SEQ ID NO: 1031696 - protein, 165 aa, Homo sapiens
MQDLKKYKKKKQKRMKSRKVRKPTENQEKNIRKRERRKNPKGENVRNIREDGELEDGEIDDAGFEEIQEKEAKENEKQKSEKAYRKSRKKHKKEREKKNPKGENVRNIREDGELEDGEIDDAGFEEIQEKEAKENEKQKSEKAYRKSRKKHKKEREKKKSQKAKT

SEQ ID NO: 1031697 - protein, 340 aa, Homo sapiens
KLRGNGSGHIGSSVGGAKFDLHHANAGTNVKHKRGDDDDEDTERELREKAFLIPLDASPGIMLQDPRSQLRQFSHIKMDITLTKPNFAKHIVWAPEDLLPVPLPKPDPVSSINLPLPPLIADQRLNRLWNTKSDLHQNTVSIDPKLAAKAKINTTNREGYLEQFGDSHGSGAKLGDPRLQKNFDPRLHRLPNTESHQVVMKDSHASKGAPHLPRSNPGSSQPSGAGTSNSGSGALPPYAPKLSSSAGLPLGTSTSVLSGISLYDPRDHGSSSTSELATASSGENSKNQKKSGGLKSSDKTEPSPGEAILPQKPSPNVGVTLEGPADPQADVPRSSEKMAN

SEQ ID NO: 1031698 - protein, 344 aa, Homo sapiens
KLRGNGSGHIGSSVGGAKFDLHHANAGTNVKHKRGDDDDEDTERELREKAFLIPLDASPGIMLQDPRSQLRQFSHIKMDITLTKPNFAKHIVWAPEDLLPVPLPKPDPVSSINLPLPPLIADQRLNRLWNTKSDLHQNTVSIDPKLAAKAKINTTNREGYLEQFGDSHGSGAKLGDPRLQKNFDPRLHRLPNTESHQVVMKDSHASKGAPHLPRSNPGSSQPSGAGTSNSGSGALPPYAPKLSSSAGLPLGTSTSVLSGISLYDPRDHGSSSTSELATASSGENSKNQKKSGGLKSSDKTEPSPGEAILPQKPSPNVGVTLEGPADPQADVPRSSGSVLKWGCG

SEQ ID NO: 1031699 - protein, 187 aa, Homo sapiens
MTDSEHAGHDREDGELEDGEIDDAGFEEIQEKEAKENEKQKSEKAYRKSRKKHKKEREKKKSKRENVRNIREDGELEDGEIDDAGFEEIQEKEAKENEKQKSEKAYRKSRKKHKKEREKKNPKGENVRNIREDGELEDGEIDDAGFEEIQEKEAKENEKQKSEKAYRKSRKKHKKEREKKKSQKAKT

SEQ ID NO: 1031700 - protein, 403 aa, Homo sapiens
KLRGNGSGHIGSSVGGAKFDLHHANAGTNVKHKRGDDDDEDTERELREKAFLIPLDASPGIMLQDPRSQLRQFSHIKMDITLTKPNFAKHIVWAPEDLLPVPLPKPDPVSSINLPLPPLIADQRLNRLWNTKSDLHQNTVSIDPKLAAKAKINTTNREGYLEQFGDSHGSGAKLGDPRLQKNFDPRLHRLPNTESHQVVMKDSHASKGAPHLPRSNPGSSQPSGAGTSNSGSGALPPYAPKLSSSAGLPLGTSTSVLSGISLYDPRDHGSSSTSELATASSGENSKNQKKSGGLKSSDKTEPSPGEAILPQKPSPNVGVTLEGPADPQADVPRSSGKVQVPAVHSLPVQALTGLIRPQYSDPRQARQPGQGSPTPDNDPGRETDDKSLKEVFKTFDPTASPFC

SEQ ID NO: 1031701 - protein, 81 aa, Homo sapiens
  misc_feature (16)..(16): Xaa can be any naturally occurring amino acid
GTRQALDSYPGGEGSXGPRRGGRAGLACPPRGVIDPKGVAFSLRAGLSLMADLGKEVWEGEFSLAPGGGWNLKEKTVWLLT

SEQ ID NO: 1031702 - protein, 669 aa, Homo sapiens
  misc_feature (16)..(16): Xaa can be any naturally occurring amino acid
GTRQALDSYPGGEGSXGPRRGGRAGLACPPRGVIDPKGVAFSLRAGLSLMADLGKEVWEGEFSLAPGGGWNLKEKTVWLLNKSLCPVSLSKGEGGQVLGRTPGPYSRRSYVCVSFVEVNLINEPLVIFVCATTGQGDPPDNMKNFWRFIFRKNLPSTALCQMDFAVLGLGDSSYAKFNFVAKKLHRRLLQLGGSALLPVCLGDDQHELGPDAAVDPWLRDLWDRVLGLYPPPPGLTEIPPGVPLPSKFTLLFLQEAPSTGSEGQRVAHPGSQEPPSESKPFLAPMISNQRVTGPSHFQDVRLIEFDILGSGISFAAGDVVLIQPSNSAAHVQRFCQVLGLDPDQLFMLQPREPDVSSPTRLPQPCSMRHLVSHYLDIASVPRRSFFELLACLSLHELEREKLLEFSSAQGQEELFEYCNRPRRTILEVLCDFPHTAAAIPPDYLLDLIPVIRPRAFSIASSLLTHPSRLQILVAVVQFQTRLKEPRRGLCSSWLASLDPGQGPVRVPLWVRPGSLAFPETPDTPVIMVGPGTGVAPFRAAIQERVAQGQTGNFLFFGCRWRDQDFYWEAEWQELEKRDCLTLIPAFSREQEQKVYVQHRLRELGSLVWELLDRQGAYFYLAGNAKSMPADVSEALMSIFQEEGGLCSPDAAAYLARLQQTRRFQTETWA

SEQ ID NO: 1031703 - protein, 606 aa, Homo sapiens
MPSPQLLVLFGSQTGTAQDVSERLGREARRRRLGCRVQALDSYPVVNLINEPLVIFVCATTGQGDPPDNMKNFWRFIFRKNLPSTALCQMDFAVLGLGDSSYAKFNFVAKKLHRRLLQLGGSALLPVCLGDDQHELGPDAAVDPWLRDLWDRVLGLYPPPPGLTEIPPGVPLPSKFTLLFLQEAPSTGSEGQRVAHPGSQEPPSESKPFLAPMISNQRVTGPSHFQDVRLIEFDILGSGISFAAGDVVLIQPSNSAAHVQRFCQVLGLDPDQLFMLQPREPDVSSPTRLPQPCSMRHLVSHYLDIASVPRRSFFELLACLSLHELEREKLLEFSSAQGQEELFEYCNRPRRTILEVLCDFPHTAAAIPPDYLLDLIPVIRPRAFSIASSLLTHPSRLQILVAVVQFQTRLKEPRRGLCSSWLASLDPGQGPVRVPLWVRPGSLAFPETPDTPVIMVGPGTGVAPFRAAIQERVAQGQTGNFLFFGCRWRDQDFYWEAEWQELEKRDCLTLIPAFSREQPPALFSALQEQKVYVQHRLRELGSLVWELLDRQGAYFYLAGNAKSMPADVSEALMSIFQEEGGLCSPDAAAYLARLQQTRRFQTETWA

SEQ ID NO: 1031704 - protein, 617 aa, Homo sapiens
MPSPQLLVLFGSQTGTAQDVSERLGREARRRRLGCRVQALDSYPVVNLINEPLVIFVCATTGQGDPPDNMKNFWRFIFRKNLPSTALCQMDFAVLGLGDSSYAKFNFVAKKLHRRLLQLGGSALLPVCLGDDQHELGPDAAVDPWLRDLWDRVLGLYPPPPGLTEIPPGVPLPSKFTLLFLQEAPSTGSEGQRVAHPGSQEPPSESKPFLAPMISNQRVTGPSHFQDVRLIEFDILGSGISFAAGDVVLIQPSNSAAHVQRFCQVLGLDPDQLFMLQPREPDVSSPTRLPQPCSMRHLVSHYLDIASVPRRSFFELLACLSLHELEREKLLEFSSAQGQEELFEYCNRPRRTILEVLCDFPHTAAAIPPDYLLDLIPVIRPRAFSIASSLLTHPSRLQILVAVVQFQTRLKEPRRGLCSSWLASLDPGQGPVRVPLWVRPGSLAFPETPDTPVIMVGPGTGVAPFRAAIQERVAQGQTGNFLFFGCRWRDQDFYWEAEWQELEKRDCLTLIPAFSREQRQVHASGRLGSPDVHLPGGGWTLQPGRSRVSSQAPADTALPDRDVGLRPAAARAPSDSHPPGSPGRHPRGSSWPAAVILSDQPAGPLGTASSRAQPHSC

SEQ ID NO: 1031705 - protein, 597 aa, Homo sapiens [sequence omitted]

SEQ ID NO: 1031706 - protein, 132 aa, Homo sapiens
SSLLSRPTRKMAPQKDRKPKRSTWRFNLDLTHPVEDGIFDSGNFEQFLREKVKVNGKTGNLGNVVHIERFKNKITVVSEKQFSKRYLKYLTKKYLKKNNLRDWLRVVASDKETYELRYFQISQDEDESESED

SEQ ID NO: 1031707 - protein, 132 aa, Homo sapiens; identical to SEQ ID NO: 1031706

SEQ ID NO: 1031708 - protein, 142 aa, Homo sapiens
GQKHNQDARILNCFSRLPGSCHEQKDRKPKRSTWRFNLDLTHPVEDGIFDSGNFEQFLREKVKVNGKTGNLGNVVHIERFKNKITVVSEKQFSKRYLKYLTKKYLKKNNLRDWLRVVASDKETYELRYFQISQDEDESESED

SEQ ID NO: 1031709 - protein, 132 aa, Homo sapiens; identical to SEQ ID NO: 1031706

SEQ ID NO: 1031710 - protein, 132 aa, Homo sapiens; identical to SEQ ID NO: 1031706

SEQ ID NO: 1031711 - protein, 132 aa, Homo sapiens; identical to SEQ ID NO: 1031706

SEQ ID NO: 1031712 - protein, 202 aa, Homo sapiens
GSLFPDLVRAGGAIMGVDIRHNKDRKVRRKEPKSQDIYLRLLVKLYRFLARRTNSTFNQVVLKRLFMSRTNRPPLSLSRMIRKMKLPGRENKTAVVVGTITDDVRVQEVPKLKVCALRVTSRARSRILRAGGKILTFDQLALDSPKGCGTVLLSGPRKGREVYRHFGKAPGTPHSHTKPYVRSKGRKFERARGRRASRGYKN

SEQ ID NO: 1031713 - protein, 225 aa, Homo sapiens
MSSRYGDPLWCLPPMKNTGRVTEIRKYSPGNARSIIHCQYCFVWVKDHSIDYTSDASEGILRHLWFPVVMTMSGVAFGQYTYHFRSVTGGMYSASNKNCNGVGRRPGRSASRLMSCMPYITGSMGKHGVNPMLKVCALRVTSRARSRILRAGGKILTFDQLALDSPKGCGTVLLSGPRKGREVYRHFGKAPGTPHSHTKPYVRSKGRKSEVAFPKGLTGQRGYKN

SEQ ID NO: 1031714 - protein, 120 aa, Homo sapiens
GSLFPDLVRAGGAIMGVDIRHNKDRKVRRKEPKSQDIYLRLLVKLYRFLARRTNSTFNQVVLKRLFMSRTNRPPLSLSRMIRKMKLPEGMCTARDQPGPQPHPQGRGQDPHFRPAGPGLP

SEQ ID NO: 1031715 - protein, 188 aa, Homo sapiens [sequence omitted]

SEQ ID NO: 1031716 - protein, 82 aa, Homo sapiens
HPTYTSCDVQSYRGIVKCSSLDDSSARDLERSHRQLLTPRLLTFVSRLRRVSHSQPDRRTQPTSLKEFERARGRRASRGYKN

SEQ ID NO: 1031717 - protein, 202 aa, Homo sapiens; identical to SEQ ID NO: 1031712

SEQ ID NO: 1031718 - protein, 115 aa, Homo sapiens
GSLFPDLVRAGGAIMGVDIRHNKDRKVRRKEPKSQDIYLRLLVKLYRFLARRTNSTFNQVVLKRLFMSRTNRPPLSLSRMIRKMKLLPEQEAVFWAIYDVGSEAQLRFSLGTPPS

SEQ ID NO: 1031719 - protein, 253 aa, Homo sapiens
VPGGNGTWTPGGLEARCCSLSLRFLALLGHPNLAAARLRRIPGDSLDLDPQICPTPQADRAGGAIMGVDIRHNKDRKVRRKEPKSQDIYLRLLVKLYRFLARRTNSTFNQVVLKRLFMSRTNRPPLSLSRMIRKMKLPGRENKTAVVVGTITDDVRVQEVPKLKVCALRVTSRARSRILRAGGKILTFDQLALDSPKGCGTVLLSGPRKGREVYRHFGKAPGTPHSHTKPYVRSKGRKFERARGRRASRGYKN

SEQ ID NO: 1031720 - protein, 202 aa, Homo sapiens; identical to SEQ ID NO: 1031712

SEQ ID NO: 1031721 - protein, 211 aa, Homo sapiens
GSLFPDLVRAGGAIMGVDIRHNKDRKVRRKEPKSQDIYLRLLVKLYRFLARRTNSTFNQVVLKRLFMSRTNRPPLSLSRMIRKMKLPGRENKTAVVVGTITDDVRVQEVPKLKVCALRVTSRARSRILRAGGKILTFDQLALDSPKGCGTVLLSGPRKGRELRFAASTHSASPGTRTAHNYSSGECSCRTAAQYKLLIYLYKLSNKKCRRD

SEQ ID NO: 1031722 - protein, 240 aa, Homo sapiens
ERTRRSSPAVTGAERICGLGLRGSGCGLLGLRGAELGSGAQAVPRGAMKGKEEKEGGARLGAGGGSPEKSPELRRSSRSRAIVLFVGLKVPWSAGWPATCRAITRNPLVAVYYTNLGLVLPEDAAARAGPGRLPGCALELDGQSVKAHFFLGQCQLEMESYDEAIANLQRAYSLAKEQRLNFGDDIPSALRIAKKKRWNSIEERRIHQESELHSYLSRLIAAERDKGSWKTVPANTTEGY

SEQ ID NO: 1031723 - protein, 262 aa, Homo sapiens
MRPGVLRGARVLRVCSVSAVAACVPADGCCDACVMLCCPCACACCCAAMNVCNGCDEVMCAVCTGFGAGIGGGSPEKSPELRRSSRSRAIVLFVGLKVPWSAAGLLRAARSPWNPLVAVYYTNLGLVLPEDAAARAGPGRLPGCALELDGQSVKAHFFLGQCQLEMESYDEAIANLQRAYSLAKEQRLNFGDDIPSALRIAKKKRWNSIEERRIHQESELHSYLSRLIAAERDKGSWKTVPANTTEGYEVRQAGFVAMSGLD

SEQ ID NO: 1031724 - protein, 111 aa, Homo sapiens
AAPEALLSPRPRPPTFCTVAELEVSGLRGHAGLGFSRGSEVGNKEGKKEEKQAGEGRKRTARRPRRREPQNFQFYPEAFFVVFFSSDMILSEVGPGLPYVIHGRGLSPKSP

SEQ ID NO: 1031725 - protein, 116 aa, Homo sapiens
GRPRSAAVTPAAPPNFLHSRGAGSFRASRTRWAGFQSRLRGWQQRGKEGGKAGRGGEEENRAEAAAPRAPELPILPRSFFRRVFLLGKQASSTPQSCWGLRQPPLWAHLPAPPRGT

SEQ ID NO: 1031726 - protein, 116 aa, Homo sapiens; identical to SEQ ID NO: 1031725

SEQ ID NO: 1031727 - protein, 116 aa, Homo sapiens; identical to SEQ ID NO: 1031725

SEQ ID NO: 1031728 - protein, 189 aa, Homo sapiens
MARGAALAHGALRACWVYWSAAAGMVGFDLSDALPDNENKKPTAIPKKPSAGDDFDLGDAVVDGENDDPRPPNPPKPMPNPNPNHPSSSGSFSDADLADGVQVEKEKEAVMVEAATGKNGEEADAPGVIPEDCGGLSVVSRGMEPSSSFIAYQKKKLCFKENAEQGEVDMESHRNANAEPAVQRTLLEK

SEQ ID NO: 1031729 - protein, 147 aa, Homo sapiens
AQPALSLQWPLPSPAPFESPGFLPHPARGGVSVLPASPTPCLRDRPCALLGAPMARGAALAHGALRACWVYWSAAAGVVGSDLSDALPDNENKKPTAIPKKPSAGDDFDLGDAVVDGENDDDDDDDDDDDDDDDDDDDDDDDDDDDD

SEQ ID NO: 1031730 - protein, 510 aa, Homo sapiens
MWVMAHHGWKPSGTSETIFLPLLTEFLSIKVTELKGLANHVVVGSVSCETKDLFAALPQVVAVDINDLGTIKLSLEVTWSPFDKDDQPSAASSVNKASTVTKRFSTYSQSPPDTPSLREQAFYNMLRRQEELENGTAWSLSSESSDDSSSPQLSGTARHSPAPRPLVQQPEPLPIQVAFRRPETPSSGPLDEEGAVAPVLANGHAPYSRTLSHISEASVDAALAEASVEAVGPESLAWGPSPPTHPAPTHGEHPSPVPPALDPGHSATSSTLGTTGSVPTSTDPAPSAHLDSVHKSTDSGPSELPGPTHTTTGSTYSAITTTHSAPSPLTHTTTGSTHKPIISTLTTTGPTLNIIGPVQTTTSPTHTMPSPTHTTASPTHTSTSPTHTPTSPTSQNQYVTSHHYKSYPQWYGPSPDCHKCHRILPQGSHHPMHSPILINVSPYHCAAKEISKPTLPRAHSPKSCKEPTQPGPKEVRMTTKSARRTSPGDRTIEQMNAKANTIKGDPRKQQ

SEQ ID NO: 1031731 - protein, 408 aa, Homo sapiens
  misc_feature (400)..(400): Xaa can be any naturally occurring amino acid
MWVMAHHGWKPSGTSETIFLPLLTEFLSIKVTELKGLANHVVVGSVSCETKDLFAALPQVVAVDINDLGTIKLSLEVTWSPFDKDDQPSAASSVNKASTVTKRFSTYSQSPPDTPSLREQAFYNMLRRQEELENGTAWSLSSESSDDSSSPQLSGTARHSPAPRPLVQQPEPLPIQVAFRRPETPSSGPLDEEGAVAPVLANGHAPYSRTLSHISEASVDAALAEASVEAVGPESLAWGPSPPTHPAPTHGEHPSPVPPALDPGHSATSSTLGTTGSVPTSTDPAPSAHLDSVHKSTDSGPSELPGPTHTTTGSTYSAITTTHSAPSPLTHTTTGSTHKPIISTLTTTGPTLNIIGPVQTTTSPTHTMPSPTHTTASPTHTCTSTSPASLSSPDGDYSMXSTLLVMRA

SEQ ID NO: 1031732 - protein, 492 aa, Homo sapiens
MWVMAHHGWKPSGTSETIFLPLLTEFLSIKVTELKGLANHVVVGSVSCETKDLFAALPQVVAVDINDLGTIKLSLEVTWSPFDKDDQPSAASSVNKASTVTKRFSTYSQSPPDTPSLREQAFYNMLRRQEELENGTAWSLSSESSDDSSSPQLSGTARHSPAPRPLVQQPEPLPIQVAFRRPETPSSGPLDEEGAVAPVLANGHAPYSRTLSHISEASVDAALAEASVEAVGPESLAWGPSPPTHPAPTHGEHPSPVPPALDPGHSATSSTLGTTGSVPTSTDPAPSAHLDSVHKSTDSGPSELPGPTHTTTGSTYSAITTTHSAPSPLTHTTTGSTHKPIISTLTTTGPTLNIIGPVQTTTSPTHTMPSPTHTTASPTKYYRMATIITPYSLHYSVITQTNEKEKKRRALISGGTRGSEVGHVIGVLTHFLAQVATCRPQWDREVDSRYRRAARDQQRSTQGGTSDNYTPHQPEHTTPHTQLSPHEHTRKR

SEQ ID NO: 1031733 - protein, 329 aa, Homo sapiens
SGSFWTGIQEEKGGVAPVLANGHAPYSRTLSHISEASVDAALAEASVEAVGPESLAWGPSPPTHPAPTHGEHPSPVPPALDPGHSATSSTLGTTGSVPTSTDPAPSAHLDSVHKSTDSGPSELPGPTHTTTGSTYSAITTTHSAPSPLTHTTTGSTHKPIISTLTTTGPTLNIIGPVQTTTSPTHTMPSPTHTTASPTHTSTSPTHTPTSPTSQNQYVTSHHYKSYPQWYGPSPDCHKCHRILPQGSHHPMHSPILINVSPYHCAAKEISKPTLPRAHSPKSCKEPTQPGPKEVRMTTKSARRTSPGDRTIEQMNAKANTIKGDPRKQQ

SEQ ID NO: 1031734 - protein, 514 aa, Homo sapiens
MVEEVQKHSVHTLVFRSLKRTHDMFVADNGKPVPLDEESHKRKMAIKLRNEYGPVLHMPTSKENLKEKGPQNATDSYVHKQYPANQGQEVEYFVAGTHPYPPGPGVALTADTKIQRMPSESAAQSLAVALPLQTKADANRTAPSGSEYRHPGASDRPQPTAMNSIVMETGNTKNSALMAKKAPTMPKPQWHPPWKLYRVISGHLGWVRCIAVEPGNQWFVTGSADRTIKIWDLASGKLKLSLTGHISTVRGVIVSTRSPYLFSCGEDKQVKCWDLEYNKVIRHYHGHLSAVYGLDLHPTIDVLVTCSRDSTARIWDVRTKASVHTLSGHTNAVATVRCQAAEPQIITGSHDTTIRLWDLVAGKTRVTLTNHKKSVRAVVLHPRHYTFASGSPDNIKQWKFPDGSFIQNLSGHNAIINTLTVNSDGVLVSGADNGTMHLWDWRTGYNFQRVHAAVQPGSLDSESGIFACAFDQSESRLLTAEADKTIKVYREDDTATEETHPVSWKPEIIKRKRF

SEQ ID NO: 1031735 - protein, 514 aa, Homo sapiens; identical to SEQ ID NO: 1031734

SEQ ID NO: 1031736 - protein, 463 aa, Homo sapiens
MVEEVQKHSVHTLVFRSLKRTHDMFVADNGKPVPLDEESHKRKMAIKLRNEYGPVLHMPTSKENLKEKGPQNATDSYVHKQYPANQGQEVEYFVAGTHPYPPGPGVALTADTKIQRMPSESAAQSLAVALPLQTKADANRTAPSGSEYRHPGASDRPQPTAMNSIVMETGNTKNSALMAKKAPTMPKPQWHPPWKLYRVISGHLGWVRCIAVEPGNQWFVTGSADRTIKIWDLASGKLKLSLTGHISTVRGVIVSTRSPYLFSCGEDKQVKCWDLEYNKVIRHYHGHLSAVYGLDLHPTIDVLVTCSRDSTARIWDVRTKASVHTLSGHTNAVATVRCQAAEPQIITGSHDTTIRLWDLVAGKTRVTLTNHKKSVRAVVLHPRHYTFASGSPDNIKQWKFPDGSFIQNLSGHNAIINTLTVNSDGVLVSGDRRNSSSQLETRNYQEKEILMNVEFFLSLFFSF

SEQ ID NO: 1031737 - protein, 139 aa, Homo sapiens
MVEEVQKHSVHTLVFRSLKRTHDMFVADNGKPVPLDEESHKRKMAIKLRNEYGPVLHMPTSKENLKEKGPQNATDSYVHKQYPANQGQEVEYFVAGTHPYPPGPGVALTADTKIQRMPSESAAQSLAVALPLQTKYEIL

SEQ ID NO: 1031738 - protein, 505 aa, Homo sapiens
MVEEVQKHSVHTLVFRSLKRTHDMFVADNGKPVPLDEESHKRKMAIKLRNEYGPVLHMPTSKENLKEKGPQNATDSYVHKQYPANQGQEVEYFVAGVALTADTKIQRMPSESAAQSLAVALPLQTKADANRTAPSGSEYRHPGASDRPQPTAMNSIVMETGNTKNSALMAKKAPTMPKPQWHPPWKLYRVISGHLGWVRCIAVEPGNQWFVTGSADRTIKIWDLASGKLKLSLTGHISTVRGVIVSTRSPYLFSCGEDKQVKCWDLEYNKVIRHYHGHLSAVYGLDLHPTIDVLVTCSRDSTARIWDVRTKASVHTLSGHTNAVATVRCQAAEPQIITGSHDTTIRLWDLVAGKTRVTLTNHKKSVRAVVLHPRHYTFASGSPDNIKQWKFPDGSFIQNLSGHNAIINTLTVNSDGVLVSGADNGTMHLWDWRTGYNFQRVHAAVQPGSLDSESGIFACAFDQSESRLLTAEADKTIKVYREDDTATEETHPVSWKPEIIKRKRF

SEQ ID NO: 1031739 - protein, 448 aa, Homo sapiens
MKRVTNEKWQSSFVMSMVLCCICLLQKKILKRRVLRMQRIHMFINSTLPIKDKKLNTLWQVHIHTHQDLADANRTAPSGSEYRHPGASDRPQPTAMNSIVMETGNTKNSALMAKKAPTMPKPQWHPPWKLYRVISGHLGWVRCIAVEPGNQWFVTGSADRTIKIWDLASGKLKLSLTGHISTVRGVIVSTRSPYLFSCGEDKQVKCWDLEYNKVIRHYHGHLSAVYGLDLHPTIDVLVTCSRDSTARIWDVRTKASVHTLSGHTNAVATVRCQAAEPQIITGSHDTTIRLWDLVAGKTRVTLTNHKKSVRAVVLHPRHYTFASGSPDNIKQWKFPDGSFIQNLSGHNAIINTLTVNSDGVLVSGADNGTMHLWDWRTGYNFQRVHAAVQPGSLDSESGIFACAFDQSESRLLTAEADKTIKVYREDDTATEETHPVSWKPEIIKRKRF

SEQ ID NO: 1031740 - protein, 280 aa, Homo sapiens
MVEEVQKHSVHTLVFRSLKRTHDMFVADNGKPVPLDEESHKRKMAIKLRNEYGPVLHMPTSKENLKEKGPQNATDSYVHKQYPANQGQEVEYFVAGTHPYPPGPGVALTADTKIQRMPSESAAQSLAVALPLQTKADANRTAPSGSEYRHPGASDRPQPTAMNSIVMETGNTKNSALMAKKAPTMPKPQWHPPWKLYRVISGHLGWVRCIAVEPGNQWFVTGSADRTIKIWDLASGINWLGWHIEWRGDIAKDPLSLGEHKEVDWIKVRIQDYGCSAKWE

SEQ ID NO: 1031741 - protein, 512 aa, Homo sapiens
MEVQKHSVHTLVFRSLKRTHDMFVADNGKPVPLDEESHKRKMAIKLRNEYGPVLHMPTSKENLKEKGPQNATDSYVHKQYPANQGQEVEYFVAGTHPYPPGPGVALTADTKIQRMPSESAAQSLAVALPLQTKADANRTAPSGSEYRHPGASDRPQPTAMNSIVMETGNTKNSALMAKKAPTMPKPQWHPPWKLYRVISGHLGWVRCIAVEPGNQWFVTGSADRTIKIWDLASGKLKLSLTGHISTVRGVIVSTRSPYLFSCGEDKQVKCWDLEYNKVIRHYHGHLSAVYGLDLHPTIDVLVTCSRDSTARIWDVRTKASVHTLSGHTNAVATVRCQAAEPQIITGSHDTTIRLWDLVAGKTRVTLTNHKKSVRAVVLHPRHYTFASGSPDNIKQWKFPDGSFIQNLSGHNAIINTLTVNSDGVLVSGADNGTMHLWDWRTGYNFQRVHAAVQPGSLDSESGIFACAFDQSESRLLTAEADKTIKVYREDDTATEETHPVSWKPEIIKRKRF

SEQ ID NO: 1031742 - protein, 139 aa, Homo sapiens; identical to SEQ ID NO: 1031737

SEQ ID NO: 1031743 - protein, 448 aa, Homo sapiens
MVEEVQKHSVHTLVFRSLKRTHDMFVADNGKPVPLDEESHKRKMAIKLRNEYGPVLHMPTSKENLKEKGPQNATDSYVHKQYPANQGQEVEYFVAGTHPYPPGPGVALTADTKIQRMPSESAAQSLAVALPLQTKADANRTAPSGSEYRHPGASDRPQPTAMNSIVMETGKLKLSLTGHISTVRGVIVSTRSPYLFSCGEDKQVKCWDLEYNKVIRHYHGHLSAVYGLDLHPTIDVLVTCSRDSTARIWDVRTKASVHTLSGHTNAVATVRCQAAEPQIITGSHDTTIRLWDLVAGKTRVTLTNHKKSVRAVVLHPRHYTFASGSPDNIKQWKFPDGSFIQNLSGHNAIINTLTVNSDGVLVSGADNGTMHLWDWRTGYNFQRVHAAVQPGSLDSESGIFACAFDQSESRLLTAEADKTIKVYREDDTATEETHPVSWKPEIIKRKRF

SEQ ID NO: 1031744 - protein, 514 aa, Homo sapiens; identical to SEQ ID NO: 1031734

SEQ ID NO: 1031745 - protein, 514 aa, Homo sapiens; identical to SEQ ID NO: 1031734

SEQ ID NO: 1031746 - protein, 197 aa, Homo sapiens
IDHMVQGHAAFPELQVKATARCQSIYAYLNSHLDLIKKAQPVGFLTVDLHVWPDFHGNRSPLADLTLKGMVTGLKLSQDLDDLAILYLATVQAIALGTRFIIEAMEAAGHSISTLFLCGGLSKNPLFVQMHADITGMPVVLSQEVESVLVGAAVLGACASGDFASVQEAMAKMSKVGKVVFPETTGIQRYYDNEIPK

SEQ ID NO: 1031747 - protein, 142 aa, Homo sapiens
MVKVTGLKLSQDLDDLAILYLATVQAIALGTRFIIEAMEAAGHSISTLFLCGGLSKNPLFVQMHADITGMPVVLSQEVESVLVGAAVLGACASGDFASVQSDPRTGPVTFHPLSFHRPLEATQWLVAAILVQMRTLKLRNVV

SEQ ID NO: 1031748 - protein, 204 aa, Homo sapiens
IDHMVQGHAAFPELQVKATARCQSIYAYLNSHLDLIKKAQPVGFLTVDLHVWPDFHGTIWTLKGMVTGLKLSQDLDDLAILYLATVQAIALGTRFIIEAMEAAGHSISTLFLCGGLSKNPLFVQMHADITGMPVVLSQEVESVLVGAAVLGACASGDFASVQSDPRTGPVTFHPLSFHRPLEATQWLVAAILVQMRTLKLRNVV

SEQ ID NO: 1031749 - protein, 165 aa, Homo sapiens
IDHMVQGHAAFPELQVKATARCQSIYAYLNSHLDLIKKAQPVGFLTVDLHVWPDFHGNRSPLADLTLKGMVTGLKLSQDLDDLAILYLATVQAIALGTRFIIEAMEAAGHSISTLFLCGGLSKNPLFVQMHADITGKQGKNEQSGKVVFPETTGIQRYYDNEIPK

SEQ ID NO: 1031750 - protein, 209 aa, Homo sapiens
IDHMVQGHAAFPELQVKATARCQSIYAYLNSHLDLIKKAQPVGFLTVDLHVWPDFHGNRSPLADLTLKGMVTGLKLSQDLDDLAILYLATVQAIALGTRFIIEAMEAAGHSISTLFLCGGLSKNPLFVQMHADITGMPVVLSQEVESVLVGAAVLGACASGDFASVQSDPRTGPVTFHPLSFHRPLEATQWLVAAILVQMRTLKLRNVV

SEQ ID NO: 1031751 - protein, 156 aa, Homo sapiens
SRSEKRNIRVGVTLIFQVTGLKLSQDLDDLAILYLATVQAIALGTRFIIEAMEAAGHSISTLFLCGGLSKNPLFVQMHADITGMPVVLSQEVESVLVGAAVLGACASGDFASVQSDPRTGPVTFHPLSFHRPLEATQWLVAAILVQMRTLKLRNVV

SEQ ID NO: 1031752 - protein, 179 aa, Homo sapiens
MEHNRVLEALLPLKGLEERVAAAVDLIIKSHQGLDRQELSFAARSFYYKLRAAEQYTPKAKYHGNVMLLRAKTGGAYGEDLGADYNLSQVCDGKVSVHVIEGDHRTLLEGSGLESIISIIHSSLAEPRVSVREGLGPFYERCHRVRVTPIASSTPPTLYLPHTDTHDYHSPYHPSRTIS

SEQ ID NO: 1031753 - protein, 2509 aa, Homo sapiens
MEEVVIAGMFGKLPESENLQEFWDNLIGGVDMVTDDDRRWKAGLYGLPRRSGKLKDLSRFDASFFGVHPKQAHTMDPQLRLLLEATYEAIVDGGINPDSLRGTHTGVWVGVSGSETSEALSRDPETLVGYSMVGCQRAMMANRLSFFFDFRGPSIALDTACSSSLMALQNAYQAIHSGQCPAAIVGGINVLLKPNTSVQFLRLGMLSPEGTCKAFDTAGNGYCRSEGVVAVLLTKKSLARKVYTTILNKGTNTDGFKEQGVTFPQDIQEQPIRSLYQSAGVAPESFEYIEAHGPGTKVGDPQERNGITRALCATRQEPLLIGSTKSNMGHPEPASGLDALAKVLLSLEHGLWAPNLHFHSPNPEIPALLDGRLQVVDQPLPVRGGNVGINSFGFGGSNMHIILRPNTQSAPAPAPHATLPRLLRASGRTPEAVQKLLEQGLRHSQGLAFLSMLNDIAAVPATAMPFRGYAVLGGETRWPRVQQVPAGERPLWFICSGMGTQWRGMGLSLMRLDRFRDSILRSDEAVNRFGLKVSQLLLSTDESTFDDIVHSFVSLTAIQIGLIDLLSCMGPEADGIVGHSLGEWLSVRDGCLSQEEAVLAAYWRGQCIKEAPLPAGAMAAVGLSWEECKQRCPPAVVPACHNSKDTVTISGPQAPVFEFVEQLRKEGVFAKEVRTGGMAFHSYFMEAIAPPLLQELKKVIREPKPRSARWLSTSIPEAQWHSSLARTSSAEYNVNNLVSPVLFQEALWHVPEHAVVLEIAPTPCPQAVLKRVRKPSCTIIPRMKKDHRDNLEFFLAGIGRLHLSGIDANPNALFPPVESPAPRGTPLISPLIKWDHSLAWDAPAAEDFPNGSGSPSATIYTCTPSSESPDRYLVDHTIDGRVLFPATGYLSIVWKTLARAWAGLEQLPVVFEDVVQHQATILPKTGTVSLEVRLLEATGAFEVSENGNLVVSGKVYQWDDPDPRLFDHPESPHPNSPRSPLFLAQAEVYKELRLRGYDYGPHFQGILEASLEGDSGRLLWKDNWVSFMDTMLQMSILGSAKHGLYLPTRVTAIHIDPATHRQKLYTLQDKAQVADVVVSRWPRVTVAGGVHISGLHTESAPRRQQEQQVPILEKFCFTPHTEEGCLSERAALQEELQLCKGLVQALQTKVTQQGLKMVVPGLDGAQIPRDPSQQELPRLLSAACRLQLNGNLQLELAQVLAQERPKLPEDPLLSGLLDSPALKACLDTAVENMPSLKMKVVEVLAGHGHLYSRIPGLLSPHPLLQLSYTATDRHPQALEAAQAELQQHDVAQGQWDPADPAPSALGSADLLVCNCAVAALGDPASALSNMVAALREGGFLLLHTLLRGHPLGDIVAFLTSTEPQYGQGILSQDAWESLFSRVSLRLVGLKKSFYGSTLFLCRRPTPQDSPIFLPVDDTSFRWVESLKGILADEDSSRPVWLKAINCATSGVVGLVNCLRREPGGNRLRCVLLSNLSSTSHVPEVDPGSAELQKVLQGDLVMNVYRDGAWGAFRHFLLEEDKPEEPTAHAFVSTLTRGDLSSIRWVCSSLRHAQPTCPGAQLCTVYYASLNFRDIMLATGKLSPDAIPGKWTSQDSLLGMEFSGRDASGKRVMGLVPAKGLATSVLLSPDFLWDVPSNWTLEEAASVPVVYSTAYYALVVRGRVRPGETLLIHSGSGGVGQAAIAIALSLGCRVFTTVGSAEKRAYLQARFPQLDSTSFANSRDTSFEQHVLWHTGGKGVDLVLNSLAEEKLQASVRCLATHGRFLEIGKFDLSQNHPLGMAIFLKNVTFHGVLLDAFFNESSADWREVWALVQAGIRDGVVRPLKCTVFHGAQVEDAFRYMAQGKHIGKVVVQVLAEEPEAVLKGAKPKLMSAISKTFCPAHKSYIIAGGLGGFGLELAQWLIQRGVQKLVLTSRSGIRTGYQAKQVRRWRRQGVQVQVSTSNISSLEGARGLIAEAAQLGPVGGVFNLAVVLRDGLLENQTPEFFQDVCKPKYSGTLNLDRVTREACPELDYFVVFSSVSCGRGNAGQSNYGFANSAMERICEKRRHEGLPGLAVQWGAIGDVGILVETMSTNDTIVSGTLPQRMASCLEVLDLFLNQPHMVLSSFVLAEKAAAYRDRDSQRDLVEAVAHILGIRDLAAVNLDSSLADLGLDSLMSVEVRQTLERELNLVLSVREVRQLTLRKLQELSSKADEASELACPTPKEDGLAQQQTQLNLRSLLVNPEGPTLMRLNSVQSSERPLFLVHPIEGSTTVFHSLASRLSIPTYGLQCTRAAPLDSIHSLAAYYIDCIRQVQPEGPYRVAGYSYGACVAFEMCSQLQAQQSPAPTHNSLFLFDGSPTYVLAYTQSYRAKLTPGCEAEAETEAICFFVQQFTDMEHNRVLEALLPLKGLEERVAAAVDLIIKSHQGLDRQELSFAARSFYYKLRAAEQYTPKAKYHGNVMLLRAKTGGAYGEDLGADYNLSQVCDGKVSVHVIEGDHRTLLEGSGLESIISIIHSSLAEPRVSVREG

SEQ ID NO: 1031754 - protein, 2509 aa, Homo sapiens; identical to SEQ ID NO: 1031753

SEQ ID NO: 1031755 - protein, 2509 aa, Homo sapiens; identical to SEQ ID NO: 1031753

SEQ ID NO: 1031756 - protein, 2509 aa, Homo sapiens; identical to SEQ ID NO: 1031753

SEQ ID NO: 1031757 - protein, 2478 aa, Homo sapiens
MEEVVIAGMFGKLPESENLQEFWDNLIGGVDMVTDDDRRWKAGLYGLPRRSGKLKDLSRFDASFFGVHPKQAHTMDPQLRLLLEATYEAIVDGGINPDSLRGTHTGVWVGVSGSETSEALSRDPETLVGYSMVGCQRAMMANRLSFFFDFRGPSIALDTACSSSLMALQNAYQAIHSGQCPAAIVGGINVLLKPNTSVQFLRLGMLSPEGTCKAFDTAGNGYCRSEGVVAVLLTKKSLARKVYTTILNKGTNTDGFKEQGVTFPQDIQEQPIRSLYQSAGVAPESFEYIEAHGPGTKVGDPQERNGITRALCATRQEPLLIGSTKSNMGHPEPASGLDALAKVLLSLEHGLWAPNLHFHSPNPEIPALLDGRLQVVDQPLPVRGGNVGINSFGFGGSNMHIILRPNTQSAPAPAPHATLPRLLRASGRTPEAVQKLLEQGLRHSQGLAFLSMLNDIAAVPATAMPFRGYAVLGGETRWPRVQQVPAGERPLWFICSGMGTQWRGMGLSLMRLDRFRDSILRSDEAVNRFGLKVSQLLLSTDESTFDDIVHSFVSLTAIQIGLIDLLSCMGPEADGIVGHSLGEWLSVRDGCLSQEEAVLAAYWRGQCIKEAPLPAGAMAAVGLSWEECKQRCPPAVVPACHNSKDTVTISGPQAPVFEFVEQLRKEGVFAKEVRTGGMAFHSYFMEAIAPPLLQELKKVIREPKPRSARWLSTSIPEAQWHSSLARTSSAEYNVNNLVSPVLFQEALWHVPEHAVVLEIAPTPCPQAVLKRVRKPSCTIIPRMKKDHRDNLEFFLAGIGRLHLSGIDANPNALFPPVESPAPRGTPLISPLIKWDHSLAWDAPAAEDFPNGSGSPSATIYTCTPSSESPDRYLVDHTIDGRVLFPATGYLSIVWKTLARAWAGLEQLPVVFEDVVQHQATILPKTGTVSLEVRLLEATGAFEVSENGNLVVSGKVYQWDDPDPRLFDHPESPHPNSPRSPLFLAQAEVYKELRLRGYDYGPHFQGILEASLEGDSGRLLWKDNWVSFMDTMLQMSILGSAKHGLYLPTRVTAIHIDPATHRQKLYTLQDKAQVADVVVSRWPRVTVAGGVHISGLHTESAPRRQQEQQVPILEKFCFTPHTEEGCLSERAALQEELQLCKGLVQALQTKVTQQGLKMVVPGLDGAQIPRDPSQQELPRLLSAACRLQLNGNLQLELAQVLAQERPKLPEDPLLSGLLDSPALKACLDTAVENMPSLKMKVVEVLAGHGHLYSRIPGLLSPHPLLQLSYTATDRHPQALEAAQAELQQHDVAQGQWDPADPAPSALGSADLLVCNCAVAALGDPASALSNMVAALREGGFLLLHTLLRGHPLGDIVAFLTSTEPQYGQGILSQDAWESLFSRVSLRLVGLKKSFYGSTLFLCRRPTPQDSPIFLPVDDTSFRWVESLKGILADEDSSRPVWLKAINCATSGVVGLVNCLRREPGGNRLRCVLLSNLSSTSHVPEVDPGSAELQKVLQGDLVMNVYRDGAWGAFRHFLLEEDKPEEPTAHAFVSTLTRGDLSSIRWVCSSLRHAQPTCPGAQLCTVYYASLNFRDIMLATGKLSPDAIPGKWTSQDSLLGMEFSGRDASGKRVMGLVPAKGLATSVLLSPDFLWDVPSNWTLEEAASVPVVYSTAYYALVVRGRVRPGETLLIHSGSGGVGQAAIAIALSLGCRVFTTVGSAEKRAYLQARFPQLDSTSFANSRDTSFEQHVLWHTGGKGVDLVLNSLAEEKLQASVRCLATHGRFLEIGKFDLSQNHPLGMAIFLKNVTFHGVLLDAFFNESSADWREVWALVQAGIRDGVVRPLKCTVFHGAQVEDAFRYMAQGKHIGKVVVQVLAEEPEAVLKGAKPKLMSAISKTFCPAHKSYIIAGGLGGFGLELAQWLIQRGVQKLVLTSRSGIRTGYQAKQVRRWRRQGVQVQVSTSNISSLEGARGLIAEAAQLGPVGGVFNLAVVLRDGLLENQTPEFFQDVCKPKYSGTLNLDRVTREACPELDYFVVFSSVSCGRGNAGQSNYGFANSAMERICEKRRHEGLPGLAVQWGAIGDVGILVETMSTNDTIVSGTLPQRMASCLEVLDLFLNQPHMVLSSFVLAEKAAAYRDRDSQRDLVEAVAHILGIRDLAAVNLDSSLADLGLDSLMSVEVRQTLERELNLVLSVREVRQLTLRKLQELSSKADEASELACPTPKEDGLAQQQTQLNLRSLLVNPEGPTLMRLNSVQSSERPLFLVHPIEGSTTVFHSLASRLSIPTYGLQCTRAAPLDSIHSLAAYYIDCIRQVQPEGPYRVAGYSYGACVAFEMCSQLQAQQSPAPTHNSLFLFDGSPTYVLAYTQSYRAKLTPGCEAEAETEAICFFVQQFTDMEHNRVLEALLPLKGLEERVAAAVDLIIKSHQGLDRQELSFAARSFYYKLRAAEQYTPKAKYHGNVMLLRAKACGWGPLSAGIWFSPLSGGSWATSPEEAGGL

SEQ ID NO: 1031758 - protein, 2335 aa, Homo sapiens
MEEVVIAGMFGKLPESENLQEFWDNLIGGVDMVTDDDRRWKAGLYGLPRRSGKLKDLSRFDASFFGVHPKQAHTMDPQLRLLLEATYEAIVDGGINPDSLRGTHTGVWVGVSGSETSEALSRDPETLVGYSMVGCQRAMMANRLSFFFDFRGPSIALDTACSSSLMALQNAYQAIHSGQCPAAIVGGINVLLKPNTSVQFLRLGMLSPEGTCKAFDTAGNGYCRSEGVVAVLLTKKSLARKVYTTILNKGTNTDGFKEQGVTFPQDIQEQPIRSLYQSAGVAPESFEYIEAHGPGTKVGDPQERNGITRALCATRQEPLLIGSTKSNMGHPEPASGLDALAKVLLSLEHGLWAPNLHFHSPNPEIPALLDGRLQVVDQPLPVRGGNVGINSFGFGGSNMHIILRPNTQSAPAPAPHATLPRLLRASGRTPEAVQKLLEQGLRHSQGLAFLSMLNDIAAVPATAMPFRGYAVLGGETRWPRVQQVPAGERPLWFICSGMGTQWRGMGLSLMRLDRFRDSILRSDEAVNRFGLKVSQLLLSTDESTFDDIVHSFVSLTAIQIGLIDLLSCMGPEADGIVGHSLGEWLSVRDGCLSQEEAVLAAYWRGQCIKEAPLPAGAMAAVGLSWEECKQRCPPAVVPACHNSKDTVTISGPQAPVFEFVEQLRKEGVFAKEVRTGGMAFHSYFMEAIAPPLLQELKKVIREPKPRSARWLSTSIPEAQWHSSLARTSSAEYNVNNLVSPVLFQEALWHVPEHAVVLEIAPTPCPQAVLKRVRKPSCTIIPRMKKDHRDNLEFFLAGIGRLHLSGIDANPNALFPPVESPAPRGTPLISPLIKWDHSLAWDAPAAEDFPNGSGSPSATIYTCTPSSESPDRYLVDHTIDGRVLFPATGYLSIVWKTLARAWAGLEQLPVVFEDVVQHQATILPKTGTVSLEVRLLEATGAFEVSENGNLVVSGKVYQWDDPDPRLFDHPESPHPNSPRSPLFLAQAEVYKELRLRGYDYGPHFQGILEASLEGDSGRLLWKDNWVSFMDTMLQMSILGSAKHGLYLPTRVTAIHIDPATHRQKLYTLQDKAQVADVVVSRWPRVTVAGGVHISGLHTESAPRRQQEQQVPILEKFCFTPHTEEGCLSERAALQEELQLCKGLVQALQTKVTQQGLKMVVPGLDGAQIPRDPSQQELPRLLSAACRLQLNGNLQLELAQVLAQERPKLPEDPLLSGLLDSPALKACLDTAVENMPSLKMKVVEVLAGHGHLYSRIPGLLSPHPLLQLSYTATDRHPQALEAAQAELQQHDVAQGQWDPADPAPSALGSADLLVCNCAVAALGDPASALSNMVAALREGGFLLLHTLLRGHPLGDIVAFLTSTEPQYGQGILSQDAWESLFSRVSLRLVGLKKSFYGSTLFLCRRPTPQDSPIFLPVDDTSFRWVESLKGILADEDSSRPVWLKAINCATSGVVGLVNCLRREPGGNRLRCVLLSNLSSTSHVPEVDPGSAELQKVLQGDLVMNVYRDGAWGAFRHFLLEEDKPEEPTAHAFVSTLTRGDLSSIRWVCSSLRHAQPTCPGAQLCTVYYASLNFRDIMLATGKLSPDAIPGKWTSQDSLLGMEFSGRDASGKRVMGLVPAKGLATSVLLSPDFLWDVPSNWTLEEAASVPVVYSTAYYALVVRGRVRPGETLLIHSGSGGVGQAAIAIALSLGCRVFTTVGSAEKRAYLQARFPQLDSTSFANSRDTSFEQHVLWHTGGKGVDLVLNSLAEEKLQASVRCLATHGRFLEIGKFDLSQNHPLGMAIFLKNVTFHGVLLDAFFNESSADWREVWALVQAGIRDGVVRPLKCTVFHGAQVEDAFRYMAQGKHIGKVVVQVLAEEPEAVLKGAKPKLMSAISKTFCPAHKSYIIAGGLGGFGLELAQWLIQRGVQKLVLTSRSGIRTGYQAKQVRRWRRQGVQVQVSTSNISSLEGARGLIAEAAQLGPVGGVFNLAVVLRDGLLDSLMSVEVRQTLERELNLVLSVREVRQLTLRKLQELSSKADEASELACPTPKEDGLAQQQTQLNLRSLLVNPEGPTLMRLNSVQSSERPLFLVHPIEGSTTVFHSLASRLSIPTYGLQCTRAAPLDSIHSLAAYYIDCIRQVQPEGPYRVAGYSYGACVAFEMCSQLQAQQSPAPTHNSLFLFDGSPTYVLAYTQSYRAKLTPGCEAEAETEAICFFVQQFTDMEHNRVLEALLPLKGLEERVAAAVDLIIKSHQGLDRQELSFAARSFYYKLRAAEQYTPKAKYHGNVMLLRAKTGGAYGEDLGADYNLSQVCDGKVSVHVIEGDHRTLLEGSGLESIISIIHSSLAEPRVSVREG

SEQ ID NO: 1031759 - protein, 359 aa, Homo sapiens
GCHSERSYPDSHLTEHRGDLRACLCVLAWVPGLCTQTSLASAPVFTELACPTPKEDGLAQQQTQLNLRSLLVNPEGPTLMRLNSVQSSERPLFLVHPIEGSTTVFHSLASRLSIPTYGLQCTRAAPLDSIHSLAAYYIDCIRQVQPEGPYRVAGYSYGACVAFEMCSQLQAQQSPAPTHNSLFLFDGSPTYVLAYTQSYRAKLTPGCEAEAETEAICFFVQQFTDMEHNRVLEALLPLKGLEERVAAAVDLIIKSHQGLDRQELSFAARSFYYKLRAAEQYTPKAKYHGNVMLLRAKTGGAYGEDLGADYNLSQVCDGKVSVHVIEGDHRTLLEGSGLESIISIIHSSLAEPRVSVREG

SEQ ID NO: 1031760 - protein, 2151 aa, Homo sapiens
MEEVVIAGMFGKLPESENLQEFWDNLIGGVDMVTDDDRRWKAGLYGLPRRSGKLKDLSRFDASFFGVHPKQAHTMDPQLRLLLEATYEAIVDGGINPDSLRGTHTGVWVGVSGSETSEALSRDPETLVGYSMVGCQRAMMANRLSFFFDFRGPSIALDTACSSSLMALQNAYQAIHSGQCPAAIVGGINVLLKPNTSVQFLRLGMLSPEGTCKAFDTAGNGYCRSEGVVAVLLTKKSLARKVYTTILNKGTNTDGFKEQGVTFPQDIQEQPIRSLYQSAGVAPESFEYIEAHGPGTKVGDPQERNGITRALCATRQEPLLIGSTKSNMGHPEPASGLDALAKVLLSLEHGLWAPNLHFHSPNPEIPALLDGRLQVVDQPLPVRGGNVGINSFGFGGSNMHIILRPNTQSAPAPAPHATLPRLLRASGRTPEAVQKLLEQGLRHSQGLAFLSMLNDIAAVPATAMPFRGYAVLGGETRWPRVQQVPAGERPLWFICSGMGTQWRGMGLSLMRLDRFRDSILRSDEAVNRFGLKVSQLLLSTDESTFDDIVHSFVSLTAIQIGLIDLLSCMGPEADGIVGHSLGEWLSVRDGCLSQEEAVLAAYWRGQCIKEAPLPAGAMAAVGLSWEECKQRCPPAVVPACHNSKDTVTISGPQAPVFEFVEQLRKEGVFAKEVRTGGMAFHSYFMEAIAPPLLQELKKVIREPKPRSARWLSTSIPEAQWHSSLARTSSAEYNVNNLVSPVLFQEALWHVPEHAVVLEIAPTPCPQAVLKRVRKPSCTIIPRMKKDHRDNLEFFLAGIGRLHLSGIDANPNALFPPVESPAPRGTPLISPLIKWDHSLAWDAPAAEDFPNGSGSPSATIYTCTPSSESPDRYLVDHTIDGRVLFPATGYLSIVWKTLARAWAGLEQLPVVFEDVVQHQATILPKTGTVSLEVRLLEATGAFEVSENGNLVVSGKVYQWDDPDPRLFDHPESPHPNSPRSPLFLAQAEVYKELRLRGYDYGPHFQGILEASLEGDSGRLLWKDNWVSFMDTMLQMSILGSAKHGLYLPTRVTAIHIDPATHRQKLYTLQDKAQVADVVVSRWPRVTVAGGVHISGLHTESAPRRQQEQQVPILEKFCFTPHTEEGCLSERAALQEELQLCKGLVQALQTKVTQQGLKMVVPGLDGAQIPRDPSQQELPRLLSAACRLQLNGNLQLELAQVLAQERPKLPEDPLLSGLLDSPALKACLDTAVENMPSLKMKVVEVLAGHGHLYSRIPGLLSPHPLLQLSYTATDRHPQALEAAQAELQQHDVAQGQWDPADPAPSALGSADLLVCNCAVAALGDPASALSNMVAALREGGFLLLHTLLRGHPLGDIVAFLTSTEPQYGQGILSQDAWESLFSRVSLRLVGLKKSFYGSTLFLCRRPTPQDSPIFLPVDDTSFRWVESLKGILADEDSSRPVWLKAINCATSGVVGLVNCLRREPGGNRLRCVLLSNLSSTSHVPEVDPGSAELQKVLQGDLVMNVYRDGAWGAFRHFLLEEDKPEEPTAHAFVSTLTRGDLSSIRWVCSSLRHAQPTCPGAQLCTVYYASLNFRDIMLATGKLSPDAIPGKWTSQDSLLGMEFSGRDASGKRVMGLVPAKGLATSVLLSPDFLWDVPSNWTLEEAASVPVVYSTAYYALVVRGRVRPGETLLIHSGSGGVGQAAIAIALSLGCRVFTTVGSAEKRAYLQARFPQLDSTSFANSRDTSFEQHVLWHTGGKGVDLVLNSLAEEKLQASVRCLATHGRFLEIGKFDLSQNHPLGMAIFLKNVTFHGVLLDAFFNESSADWREVWALVQAGIRDGVVRPLKCTVFHGAQVEDAFRYMAQGKHIGKVVVQVLAEEPEAVLKGAKPKLMSAISKTFCPAHKSYIIAGGLGGFGLELAQWLIQRGVQKLVLTSRSGIRTGYQAKQVRRWRRQGVQVQVSTSNISSLEGARGLIAEAAQLGPVGGVFNLAVVLRDGLLENQTPEFFQDVCKPKYSGTLNLDRVTREACPELDYFVVFSSVSCGRGNAGQSNYGFANSAMERICEKRRHEGLDRQELSFAARSFYYKLRAAEQYTPKAKYHGNVMLLRAKTGGAYGEDLGADYNLSQVCDGKVSVHVIEGDHRTLLEGSGLESIISIIHSSLAEPRVSVREG

SEQ ID NO: 1031761 - protein, 159 aa, Homo sapiens
MEHNRVLEALLPLKGLEERVAAAVDLIIKSHQGLDRQELSFAARSFYYKLRAAEQYTPKAKYHGNVMLLRAKTGGAYGEDLGADYNLSQVRKGPDGNGDRDRSGVGRQLIASLQVCDGKVSVHVIEGDHRTLLEGSGLESIISIIHSSLAEPRVSVREG

SEQ ID NO: 1031762 - protein, 1347 aa, Homo sapiens
MEEVVIAGMFGKLPESENLQEFWDNLIGGVDMVTDDDRRWKAGLYGLPRRSGKLKDLSRFDASFFGVHPKQAHTMDPQLRLLLEATYEAIVDGGINPDSLRGTHTGVWVGVSGSETSEALSRDPETLVGYSMVGCQRAMMANRLSFFFDFRGPSIALDTACSSSLMALQNAYQAIHSGQCPAAIVGGINVLLKPNTSVQFLRLGMLSPEGTCKAFDTAGNGYCRSEGVVAVLLTKKSLARKVYTTILNKGTNTDGFKEQGVTFPQDIQEQPIRSLYQSAGVAPESFEYIEAHGPGTKVGDPQERNGITRALCATRQEPLLIGSTKSNMGHPEPASGLDALAKVLLSLEHGLWAPNLHFHSPNPEIPALLDGRLQVVDQPLPVRGGNVGINSFGFGGSNMHIILRPNTQSAPAPAPHATLPRLLRASGRTPEAVQKLLEQGLRHSQGLAFLSMLNDIAAVPATAMPFRGYAVLGGETRWPRVQQVPAGERPLWFICSGMGTQWRGMGLSLMRLDRFRDSILRSDEAVNRFGLKVSQLLLSTDESTFDDIVHSFVSLTAIQIGLIDLLSCMGPEADGIVGHSLGEWLSVRDGCLSQEEAVLAAYWRGQCIKEAPLPAGAMAAVGLSWEECKQRCPPAVVPACHNSKDTVTISGPQAPVFEFVEQLRKEGVFAKEVRTGGMAFHSYFMEAIAPPLLQELKKVIREPKPRSARWLSTSIPEAQWHSSLARTSSAEYNVNNLVSPVLFQEALWHVPEHAVVLEIAPTPCPQAVLKRVRKPSCTIIPRMKKDHRDNLEFFLAGIGRLHLSGIDANPNALFPPVESPAPRGTPLISPLIKWDHSLAWDAPAAEDFPNGSGSPSATIYTCTPSSESPDRYLVDHTIDGRVLFPATGYLSIVWKTLARAWAGLEQLPVVFEDVVQHQATILPKTGTVSLEVRLLEATGAFEVSENGNLVVSGKVYQWDDPDPRLFDHPESPHPNSPRSPLFLAQAEVYKELRLRGYDYGPHFQGILEASLEGDSGRLLWKDNWVSFMDTMLQMSILGSAKHGLYLPTRVTAIHIDPATHRQKLYTLQDKAQVADVVVSRWPRVTVAGGVHISGLHTESAPRRQQEQQVPILEKFCFTPHTEEGCLSERAALQEELQLCKGLVQALQTKVTQQGLKMVVPGLDGAQIPRDPSQQELPRLLSAACRLQLNGNLQLELAQVLAQERPKLPEDPLLSGLLDSPALKACLDTAVENMPSLKMKVVEVLAGHGHLYSRIPGLLSPHPLLQLSYTATDRHPQALEAAQAELQQHDVAQGQWDPADPAPSALGSADLLVCNCAVVLLTASVHTCGAEDGFCLNMSGGPSGLCFT

SEQ ID NO: 1031763 - protein, 200 aa, Homo sapiens
SQMLTTESPRTNHQRELVADLNGVEPSTVTGRVLYIVYRYIIKARAVRVRMETKAICLLRAARFTDMEHNRVLEALLPLKGLEERVAAAVDLIIKSHQGLDRQELSFAARSFYYKLRAAEQYTPKAKYHGNVMLLRAKTGGAYGEDLGADYNLSQVCDGKVSVHVIEGDHRTLLEGSGLESIISIIHSSLAEPRVSVREG

SEQ ID NO: 1031764 - protein, 2509 aa, Homo sapiens; identical to SEQ ID NO: 1031753

SEQ ID NO: 1031765 - protein, 2509 aa, Homo sapiens; identical to SEQ ID NO: 1031753

SEQ ID NO: 1031766 - protein, 1077 aa, Homo sapiens
NEYYSAIPGVISYEGRRSLESLVNCLRREPGGNRLRCVLLSNLSSTSHVPEVDPGSAELQKVLQGDLVMNVYRDGAWGAFRHFLLEEDKPEEPTAHAFVSTLTRGDLSSIRWVCSSLRHAQPTCPGAQLCTVYYASLNFRDIMLATGKLSPDAIPGKWTSQDSLLGMEFSGRDASGKRVMGLVPAKGLATSVLLSPDFLWDVPSNWTLEEAASVPVVYSTAYYALVVRGRVRPGETLLIHSGSGGVGQAAIAIALSLGCRVFTTVGSAEKRAYLQARFPQLDSTSFANSRDTSFEQHVLWHTGGKGVDLVLNSLAEEKLQASVRCLATHGRFLEIGKFDLSQNHPLGMAIFLKNVTFHGVLLDAFFNESSADWREVWALVQAGIRDGVVRPLKCTVFHGAQVEDAFRYMAQGKHIGKVVVQVLAEEPEAVLKGAKPKLMSAISKTFCPAHKSYIIAGGLGGFGLELAQWLIQRGVQKLVLTSRSGIRTGYQAKQVRRWRRQGVQVQVSTSNISSLEGARGLIAEAAQLGPVGGVFNLAVVLRDGLLENQTPEFFQDVCKPKYSGTLNLDRVTREACPELDYFVVFSSVSCGRGNAGQSNYGFANSAMERICEKRRHEGLPGLAVQWGAIGDVGILVETMSTNDTIVSGTLPQRMASCLEVLDLFLNQPHMVLSSFVLAEKAAAYRDRDSQRDLVEAVAHILGIRDLAAVNLDSSLADLGLDSLMSVEVRQTLERELNLVLSVREVRQLTLRKLQELSSKADEASELACPTPKEDGLAQQQTQLNLRSLLVNPEGPTLMRLNSVQSSERPLFLVHPIEGSTTVFHSLASRLSIPTYGLQCTRAAPLDSIHSLAAYYIDCIRQVQPEGPYRVAGYSYGACVAFEMCSQLQAQQSPAPTHNSLFLFDGSPTYVLAYTQSYRAKLTPGCEAEAETEAICFFVQQFTDMEHNRVLEALLPLKGLEERVAAAVDLIIKSHQGLDRQELSFAARSFYYKLRAAEQYTPKAKYHGNVMLLRAKTGGAYGEDLGADYNLSQVCDGKVSVHVIEGDHRTLLEGSGLESIISIIHSSLAEPRVSVREG

SEQ ID NO: 1031767 - protein, 2334 aa, Homo sapiens
MEEVVIAGMFGKLPESENLQEFWDNLIGGVDMVTDDDRRWKAGLYGLPRRSGKLKDLSRFDASFFGVHPKQAHTMDPQLRLLLEATYEAIVDGGINPDSLRGTHTGVWVGVSGSETSEALSRDPETLVGYSMVGCQRAMMANRLSFFFDFRGPSIALDTACSSSLMALQNAYQAIHSGQCPAAIVGGINVLLKPNTSVQFLRLGMLSPEGTCKAFDTAGNGYCRSEGVVAVLLTKKSLARKVYTTILNKGTNTDGFKEQGVTFPQDIQEQPIRSLYQSAGVAPESFEYIEAHGPGTKVGDPQERNGITRALCATRQEPLLIGSTKSNMGHPEPASGLDALAKVLLSLEHGLWAPNLHFHSPNPEIPALLDGRLQVVDQPLPVRGGNVGINSFGFGGSNMHIILRPNTQSAPAPAPHATLPRLLRASGRTPEAVQKLLEQGLRHSQGLAFLSMLNDIAAVPATAMPFRGYAVLGGETRWPRVQQVPAGERPLWFICSGMGTQWRGMGLSLMRLDRFRDSILRSDEAVNRFGLKVSQLLLSTDESTFDDIVHSFVSLTAIQIGLIDLLSCMGPEADGIVGHSLGEWLSVRDGCLSQEEAVLAAYWRGQCIKEAPLPAGAMAAVGLSWEECKQRCPPAVVPACHNSKDTVTISGPQAPVFEFVEQLRKEGVFAKEVRTGGMAFHSYFMEAIAPPLLQELKKVIREPKPRSARWLSTSIPEAQWHSSLARTSSAEYNVNNLVSPVLFQEALWHVPEHAVVLEIAPTPCPQAVLKRVRKPSCTIIPRMKKDHRDNLEFFLAGIGRLHLSGIDANPNALFPPVESPAPRGTPLISPLIKWDHSLAWDAPAAEDFPNGSGSPSATIYTCTPSSESPDRYLVDHTIDGRVLFPATGYLSIVWKTLARAWAGLEQLPVVFEDVVQHQATILPKTGTVSLEVRLLEATGAFEVSENGNLVVSGKVYQWDDPDPRLFDHPESPHPNSPRSPLFLAQAEVYKELRLRGYDYGPHFQGILEASLEGDSGRLLWKDNWVSFMDTMLQMSILGSAKHGLYLPTRVTAIHIDPATHRQKLYTLQDKAQVADVVVSRWPRVTVAGGVHISGLHTESAPRRQQEQQVPILEKFCFTPHTEEGCLSERAALQEELQLCKGLVQALQTKVTQQGLKMVVPGLDGAQIPRDPSQQELPRLLSAACRLQLNGNLQLELAQVLAQERPKLPEDPLLSGLLDSPALKACLDTAVENMPSLKMKVVEVLAGHGHLYSRIPGLLSPHPLLQLSYTATDRHPQALEAAQAELQQHDVAQGQWDPADPAPSALGSADLLVCNCAVAALGDPASALSNMVAALREGGFLLLHTLLRGHPLGDIVAFLTSTEPQYGQGILSQDAWESLFSRVSLRLVGLKKSFYGSTLFLCRRPTPQDSPIFLPVDDTSFRWVESLKGILADEDSSRPVWLKAINCATSGVVGLVNCLRREPGGNRLRCVLLSNLSSTSHVPEVDPGSAELQKVLQGDLVMNVYRDGAWGAFRHFLLEEDKPEEPTAHAFVSTLTRGDLSSIRWVCSSLRHAQPTCPGAQLCTVYYASLNFRDIMLATGKLSPDAIPGKWTSQDSLLGMEFSGRDASGKRVMGLVPAKGLATSVLLSPDFLWDVPSNWTLEEAASVPVVYSTAYYALVVRGRVRPGETLLIHSGSGGVGQAAIAIALSLGCRVFTTVGSAEKRAYLQARFPQLDSTSFANSRDTSFEQHVLWHTGGKGVDLVLNSLAEEKLQASVRCLATHGRFLEIGKFDLSQNHPLGMAIFLKNVTFHGVLLDAFFNESSADWREVWALVQAGIRDGVVRPLKCTVFHGAQVEDAFRYMAQGKHIGKVVVQVLAEEPEAVLKGAKPKLMSAISKTFCPAHKSYIIAGGLGGFGLELAQWLIQRGVQKLVLTSRSGIRTGYQAKQVRRWRRQGVQVQVSTSNISSLEGARGLIAEAAQLGPVGGVFNLAVVLRDGLLENQTPEFFQDVCKPKYSGTLNLDRVTREACPELDYFVVFSSVSCGRGNAGQSNYGFANSAMERICEKRRHEGLPGLAVQWGAIGDVGILVETMSTNDTIVSGTLPQRMASCLEVLDLFLNQPHMVLSSFVLAEKAAAYRDRDSQRDLVEAVAHILGIRDLAAVNLDSSLADLGLDSLMSVEVRQTLERELNLVLSVREVRQLTLRKLQELSSKADEASELACPTPKEDGLAQQQTQLNLRSLLVNPEGPTLMRLNSVQSSERPLFLVHPIEGSTTVFHSLASRLSIPTYGLQCTRGRCSPRAPTAWPATPTGPAWPLKCAPSCRPSRAQPPPTTASSCSTARPPTYWPTPRATGQS

SEQ ID NO: 1031768 - protein, 2159 aa, Homo sapiens
MEEVVIAGMFGKLPESENLQEFWDNLIGGVDMVTDDDRRWKAGLYGLPRRSGKLKDLSRFDASFFGVHPKQAHTMDPQLRLLLEATYEAIVDGGINPDSLRGTHTGVWVGVSGSETSEALSRDPETLVGYSMVGCQRAMMANRLSFFFDFRGPSIALDTACSSSLMALQNAYQAIHSGQCPAAIVGGINVLLKPNTSVQFLRLGMLSPEGTCKAFDTAGNGYCRSEGVVAVLLTKKSLARKVYTTILNKGTNTDGFKEQGVTFPQDIQEQPIRSLYQSAGVAPESFEYIEAHGPGTKVGDPQERNGITRALCATRQEPLLIGSTKSNMGHPEPASGLDALAKVLLSLEHGLWAPNLHFHSPNPEIPALLDGRLQVVDQPLPVRGGNVGINSFGFGGSNMHIILRPNTQSAPAPAPHATLPRLLRASGRTPEAVQKLLEQGLRHSQGLAFLSMLNDIAAVPATAMPFRGYAVLGGETRWPRVQQVPAGERPLWFICSGMGTQWRGMGLSLMRLDRFRDSILRSDEAVNRFGLKVSQLLLSTDESTFDDIVHSFVSLTAIQIGLIDLLSCMGPEADGIVGHSLGEWLSVRDGCLSQEEAVLAAYWRGQCIKEAPLPAGAMAAVGLSWEECKQRCPPAVVPACHNSKDTVTISGPQAPVFEFVEQLRKEGVFAKEVRTGGMAFHSYFMEAIAPPLLQELKKVIREPKPRSARWLSTSIPEAQWHSSLARTSSAEYNVNNLVSPVLFQEALWHVPEHAVVLEIAPTPCPQAVLKRVRKPSCTIIPRMKKDHRDNLEFFLAGIGRLHLSGIDANPNALFPPVESPAPRGTPLISPLIKWDHSLAWDAPAAEDFPNGSGSPSATIYTCTPSSESPDRYLVDHTIDGRVLFPATGYLSIVWKTLARAWAGLEQLPVVFEDVVQHQATILPKTGTVSLEVRLLEATGAFEVSENGNLVVSGKVYQWDDPDPRLFDHPESPHPNSPRSPLFLAQAEVYKELRLRGYDYGPHFQGILEASLEGDSGRLLWKDNWVSFMDTMLQMSILGSAKHGLYLPTRVTAIHIDPATHRQKLYTLQDKAQVADVVVSRWPRVTVAGGVHISGLHTESAPRRQQEQQVPILEKFCFTPHTEEGCLSERAALQEELQLCKGLVQALQTKVTQQGLKMVVPGLDGAQIPRDPSQQELPRLLSAACRLQLNGNLQLELAQVLAQERPKLPEDPLLSGLLDSPALKACLDTAVENMPSLKMKVVEVLAGHGHLYSRIPGLLSPHPLLQLSYTATDRHPQALEAAQAELQQHDVAQGQWDPADPAPSALGSADLLVCNCAVAALGDPASALSNMVAALREGGFLLLHTLLRGHPLGDIVAFLTSTEPQYGQGILSQDAWESLFSRVSLRLVGLKKSFYGSTLFLCRRPTPQDSPIFLPVDDTSFRWVESLKGILADEDSSRPVWLKAINCATSGVVGLVNCLRREPGGNRLRCVLLSNLSSTSHVPEVDPGSAELQKVLQGDLVMNVYRDGAWGAFRHFLLEEDKPEEPTAHAFVSTLTRGDLSSIRWVCSSLRHAQPTCPGAQLCTVYYASLNFRDIMLATGKLSPDAIPGKWTSQDSLLGMEFSGRDASGKRVMGLVPAKGLATSVLLSPDFLWDVPSNWTLEEAASVPVVYSTAYYALVVRGRVRPGETLLIHSGSGGVGQAAIAIALSLGCRVFTTVGSAEKRAYLQARFPQLDSTSFANSRDTSFEQHVLWHTGGKGVDLVLNSLAEEKLQASVRCLATHGRFLEIGKFDLSQNHPLGMAIFLKNVTFHGVLLDAFFNESSADWREVWALVQAGIRDGVVRPLKCTVFHGAQVEDAFRYMAQGKHIGKVVVQVLAEEPEAVLKGAKPKLMSAISKTFCPAHKSYIIAGGLGGFGLELAQWLIQRGVQKLVLTSRSGIRTGYQAKQVRRWRRQGVQVQVSTSNISSLEGARGLIAEAAQLGPVGGVFNLAVVLRDGLLENQTPEFFQDVCKPKYSGTLNLDRVTREACPELDYFVVFSSVSCGRGNAGQSNYGFANSAMERICEKRRHEGLPGLAVQWGAIGDVGILVETMSTNDTIVSGTLPQRMASCLEVLDLFLNQPHMVLSSFVLAEKAAAYRDRDSQRDLVEAVAHILGEHSQEEPRQVFPLLASGSWDIAARS

SEQ ID NO: 1031769 - protein, 1453 aa, Homo sapiens
  misc_feature (1445)..(1445): Xaa can be any naturally occurring amino acid
MEEVVIAGMFGKLPESENLQEFWDNLIGGVDMVTDDDRRWKAGLYGLPRRSGKLKDLSRFDASFFGVHPKQAHTMDPQLRLLLEATYEAIVDGGINPDSLRGTHTGVWVGVSGSETSEALSRDPETLVGYSMVGCQRAMMANRLSFFFDFRGPSIALDTACSSSLMALQNAYQAIHSGQCPAAIVGGINVLLKPNTSVQFLRLGMLSPEGTCKAFDTAGNGYCRSEGVVAVLLTKKSLARKVYTTILNKGTNTDGFKEQGVTFPQDIQEQPIRSLYQSAGVAPESFEYIEAHGPGTKVGDPQERNGITRALCATRQEPLLIGSTKSNMGHPEPASGLDALAKVLLSLEHGLWAPNLHFHSPNPEIPALLDGRLQVVDQPLPVRGGNVGINSFGFGGSNMHIILRPNTQSAPAPAPHATLPRLLRASGRTPEAVQKLLEQGLRHSQGLAFLSMLNDIAAVPATAMPFRGYAVLGGETRWPRVQQVPAGERPLWFICSGMGTQWRGMGLSLMRLDRFRDSILRSDEAVNRFGLKVSQLLLSTDESTFDDIVHSFVSLTAIQIGLIDLLSCMGPEADGIVGHSLGEWLSVRDGCLSQEEAVLAAYWRGQCIKEAPLPAGAMAAVGLSWEECKQRCPPAVVPACHNSKDTVTISGPQAPVFEFVEQLRKEGVFAKEVRTGGMAFHSYFMEAIAPPLLQELKKVIREPKPRSARWLSTSIPEAQWHSSLARTSSAEYNVNNLVSPVLFQEALWHVPEHAVVLEIAPTPCPQAVLKRVRKPSCTIIPRMKKDHRDNLEFFLAGIGRLHLSGIDANPNALFPPVESPAPRGTPLISPLIKWDHSLAWDAPAAEDFPNGSGSPSATIYTCTPSSESPDRYLVDHTIDGRVLFPATGYLSIVWKTLARAWAGLEQLPVVFEDVVQHQATILPKTGTVSLEVRLLEATGAFEVSENGNLVVSGKVYQWDDPDPRLFDHPESPHPNSPRSPLFLAQAEVYKELRLRGYDYGPHFQGILEASLEGDSGRLLWKDNWVSFMDTMLQMSILGSAKHGLYLPTRVTAIHIDPATHRQKLYTLQDKAQVADVVVSRWPRVTVAGGVHISGLHTESAPRRQQEQQVPILEKFCFTPHTEEGCLSERAALQEELQLCKGLVQALQTKVTQQGLKMVVPGLDGAQIPRDPSQQELPRLLSAACRLQLNGNLQLELAQVLAQERPKLPEDPLLSGLLDSPALKACLDTAVENMPSLKMKVVEVLAGHGHLYSRIPGLLSPHPLLQLSYTATDRHPQALEAAQAELQQHDVAQGQWDPADPAPSALGSADLLVCNCAVAALGDPASALSNMVAALREGGFLLLHTLLRGHPLGDIVAFLTSTEPQYGQGILSQDAWESLFSRVSLRLVGLKKSFYGSTLFLCRRPTPQDSPIFLPVDDTSFRWVESLKVKPWPTFRAHPTFQLGEXGLTLPDPL

SEQ ID NO: 1031770 - protein, 439 aa, Homo sapiens
MSTNDTIVSGTLPQRMASCLEVLDLFLNQPHMVLSSFVLAEKAAAYRDRDSQRDLVEAVAHILGIRDLAAVNLDSSLADLGLDSLMSVEVRQTLERELNLVLSVREVRQLTLRKLQELSSKADEASELACPTPKEDGLAQQQTQLNLRSLLVNPEGPTLMRLNSVQSSERPLFLVHPIEGSTTVFHSLASRLSIPTYGLQCTRAAPLDSIHSLAAYYIDCIRQVQPEGPYRVAGYSYGACVAFEMCSQLQAQQSPAPTHNSLFLFDGSPTYVLAYTQSYRAKLTPGCEAEAETEAICFFVQQFTDMEHNRVLEALLPLKGLEERVAAAVDLIIKSHQGLDRQELSFAARSFYYKLRAAEQYTPKAKYHGNVMLLRAKTGGAYGEDLGADYNLSQVCDGKVSVHVIEGDHRTLLEGSGLESIISIIHSSLAEPRVSVREG

SEQ ID NO: 1031771 - protein, 78 aa, Homo sapiens
GKRVRVQDWGNGGFQRQQGSLESRIGGYRTGAPGGSYRDSYDSYATHKRVKARSGSRSSVPMAGVFKELWELRVNVNG

SEQ ID NO: 1031772 - protein, 78 aa, Homo sapiens; identical to SEQ ID NO: 1031771

SEQ ID NO: 1031773 - protein, 78 aa, Homo sapiens; identical to SEQ ID NO: 1031771

SEQ ID NO: 1031774 - protein, 813 aa, Homo sapiens
PSRALPEPQEAQKLAAERARAPVVPYGVDLHYWGQELPTAGKIVKSDSQHRFWKPSEVEEEVVNADISEMLRSRHITFAGKFEPVQHWCRAPRPDGRLCERQDRLKTFHSCPRPSGSRGGTEPSPRPCGSQEPSSEGRVIPVPFPGKIVPRDDEGRPLDPEDRAREQRRQLQKQERLEWQDPELMRDVEAATGQDLGSSRYSGKGRGKKRRYPSLTNLKAQADTARARIGRKSLRQVRVAAGSPPTAWPPRVRVFEGGHLSAKIFQGLGASRGSPALSSPGGPPSLSPGRGSASQQGQQAGLLRNAPQHSPGEEGLDRQAPPSSLPGGAMPGHRPWLVQSEPLVSPLPGCTPRSVPAYFCSGDFREGDDCKGGQNGGPRVSPSRAQPQHVFSEHWLWEAGLVSLQPSMGLVTGEDLAGPECEAHQPGVPACSLSAGAPATRTALCFCLHIALFSPKKIQNAVFRSHLRLLTPSQICVKSLLVQVCLVAPVRWPPPIAIPETLPWTHLEGAKCTGQRRPLLASMTVHRPEWARVGGAFTALRPGFPQACGWYIHSLAVGGAGALVGAVERLPGAPGTGLDPSRMPATQGTLALGAQGEAVFPVDQPGAEASLGADAQEEEWPVGPCQASSLCLMGTLKPMAGAGSSPQLCGPDPSLQKGSGVTTGKTLPRGAPTAAPGSPTGAAAERQLHHIVASGPAGSTAPHPRGSQQLSWSAQHTSSCSPECLPGPCPPCCSPPGFQPWPWSRACSSGQGCPDASWLHLLRGRSPGGQGGGCPHPGVREATGEVPRWGWGHLHRAEPPAADSASGTWGGPF

SEQ ID NO: 1031775 - protein, 241 aa, Homo sapiens
KDTGDLKDSSLLKPYRKHKKQHKERHKMGEEVIPLRVLSKSEWMDLKKEYLALQKASMASLKKTISQIKSESEMETDSGVPQNTGMKNEKTANREECRTQEKVNATGPQFVSGVIVKIISTEPLPGRKQVRDTLAAISEVLYVDLLEGDTECHARFKTPEDAQAVINAYTEINKKHCWKLEILSGDHEQRYWQKILVDRQAKLNQPREKKRGTEKLITKAEKIRLAKTQQASKHIRFSEYD

SEQ ID NO: 1031776 - protein, 223 aa, Homo sapiens
KDTGDLKDSSLLKPYRKHKKQHKERHKMGEEVIPLRVLSKSEWMDLKKEYLALQKASMASLKKTISQIKSESEMETDSGVPQNTGMKNEKTANREECRTQEKVNATGPQFVSGVIVKIISTEPLPGRKQVRDTLAAISEVLYVDLLEGDTECHARFKTPEDAQAVINAYTEINKKHCWKLEILSGDHEQRYWQKILVDRQAKLNQPREKKRGTEKLIDSFLFF

SEQ ID NO: 1031777 - protein, 241 aa, Homo sapiens; identical to SEQ ID NO: 1031775

SEQ ID NO: 1031778 - protein, 284 aa, Homo sapiens
MAVGENDERLEGVQAAAALAVRFQDPALVAGALHAELVLVALLAAFEMLGTVALDLAGVVVGPQLPCPEGRNTQCLRQVPLSSLAAATVIQRALVQSSPSSEPSPQSSCAYPTCFPLTQFTCNNGRCININWRCDNDNDCGDNSDEAGCSHSCSSTQFKCNSGRCIPEHWTCDGDNDCGDYSDETHANCTNQGGHQGPVGVGMRSSPLHQTPSLSICLSDPRCVGHHLGARGSLGMALVLQELPVLWEREVAEKSLPHAVNIMRFAVGGLGFELQLCSLLSGWP

SEQ ID NO: 1031779 - protein, 222 aa, Homo sapiens
DESMPLVQPAPAPPTSAPVPVACCIPIFWTCDLDDDCGDRSDESASCAYPTCFPLTQFTCNNGRCININWRCDNDNDCGDNSDEAGCSHSCSSTQFKCNSGRCIPEHWTCDGDNDCGDYSDETHANCTNQGGHQGPVGVGMRSSPLHQTPSLSICLSDPRCVGHHLGARGSLGMALVLQELPVLWEREVAEKSLPHAVNIMRFAVGGLGFELQLCSLLSGWP

SEQ ID NO: 1031780 - protein, 140 aa, Homo sapiens
  misc_feature (131)..(131): Xaa can be any naturally occurring amino acid
MAVGENDERLEGVQAAAALAVRFQDPALVAGALHAELVLVALLAAFEMLGTVALDLAGVVVGPQLPCPEGRNTQCLRQVPLSSCGCSHRYSESTGRRARPHLSRRHSRRCHHTACQGAGRLRCCWHKGARXAAGPGLAVL

SEQ ID NO: 1031781 - protein, 301 aa, Homo sapiens
MAVGENDERLEGVQAAAALAVRFQDPALVAGALHAELVLVALLAAFEMLGTVALDLAGVVVGPQLPCPEGRNTQCLRQVPLSSLAAATVIQRALVQSSPSSEPSPQSSCAYPTCFPLTQFTCNNGRCININWRCDNDNDCGDNSDEAGCSHSCSSTQFKCNSGRCIPEHWTCDGDNDCGDYSDETHANCTNQATRPPGGCHTDEFQCRLDGLCIPLRWRCDGDTDWMDSSDEKSCEGVTHVCDPSVKFGCKDSARCISKAWVCDGDNDCEDNSDEENCESLACRPPSHPCANNTSVCLPPD

SEQ ID NO: 1031782 - protein, 214 aa, Homo sapiens
KTPERVMRLTDCGDRSDESASCAYPTCFPLTQFTCNNGRCININWRCDNDNDCGDNSDEAGCSHSCSSTQFKCNSGRCIPEHWTCDGDNDCGDYSDETHANCTNQATRPPGGCHTDEFQCRLDGLCIPLRWRCDGDTDWMDSSDEKSCEGVTHVCDPSVKFGCKDSARCISKAWVCDGDNDCEDNSDEENCESLACRPPSHPCANNTSVCLPPD

SEQ ID NO: 1031783 - protein, 69 aa, Homo sapiens
EPAKITQELVPPDGPKKEPMKEKQKQTAGLAHLPTPVGQGSASGNGSCPGNEQRFTRQHFDSMLSLFLY

SEQ ID NO: 1031784 - protein, 69 aa, Homo sapiens; identical to SEQ ID NO: 1031783

SEQ ID NO: 1031785 - protein, 147 aa, Homo sapiens
PAHAARSLSEAAVRVAAGARWGMAGSRGAGRTAAPSVRPEKRRSEPELEPEPEPEPPLLCTSPLSHSTGSDSGVSDSEESVFSGLEDSGSDSSEDDDEGDEEGEDGALDDEGHSGIKKTTEEQVQAFLFYQFNLLVTVKNVRKDWMR

SEQ ID NO: 1031786 - protein, 746 aa, Homo sapiens
MAGSRGAGRTAAPSVRPEKRRSEPELEPEPEPEPPLLCTSPLSHSTGSDSGVSDSEESVFSGLEDSGSDSSEDDDEGDEEGEDGALDDEGHSGIKKTTEEQVQASTPCPRTEMASARIGDEYAEDSSDEEDIRNTVGNVPLEWYDDFPHVGYDLDGRRIYKPLRTRDELDQFLDKMDDPDYWRTVQDPMTGRDLRLTDEQVALVRRLQSGQFGDVGFNPYEPAVDFFSGDVMIHPVTNRPADKRSFIPSLVEKEKVSRMVHAIKMGWIQPRRPRDPTPSFYDLWAQEDPNAVLGRHKMHVPAPKLALPGHAESYNPPPEYLLSEEERLAWEQQEPGERKLSFLPRKFPSLRAVPAYGRFIQERFERCLDLYLCPRQRKMRVNVDPEDLIPKLPRPRDLQPFPTCQALVYRGHSDLVRCLSVSPGGQWLVSGSDDGSLRLWEVATARCVRTVPVGGVVKSVAWNPSPAVCLVAAAVEDSVLLLNPALGDRLVAGSTDQLLSAFVPPEEPPLQPARWLEASEEERQVGLRLRICHGKPVTQVTWHGRGDYLAVVLATQGHTQVLIHQLSRRRSQSPFRRSHGQVQRVAFHPARPFLLVASQRSVRLYHLLRQELTKKLMPNCKWVSSLAVHPAGDNVICGSYDSKLVWFDLDLSTKPYRMLRHHKKALRAVAFHPRYPLFASGSDDGSVIVCHGMVYNDLLQNPLLVPVKVLKGHVLTRDLGVLDVIFHPTQPWVFSSGADGTVRLFT

SEQ ID NO: 1031787 - protein, 442 aa, Homo sapiens
PAHAARSLSEAAVRVAAGARWGMAGSRGAGRTAAPSVRPEKRRSEPELEPEPEPEPPLLCTSPLSHSTGSDSGVSDSEESVFSGLEDSGSDSSEDDDEGDEEGEDGALDDEGHSGIKKTTEEQVQASTPCPRTEMASARIGDEYAEDSSDEEDIRNTVGNVPLEWYDDFPHVGYDLDGRRIYKPLRTRDELDQFLDKMDDPDYWRTVQDPMTGRDLRLTDEQVALVRRLQSGQFGDVGFNPYEPAVDFFSGDVMIHPVTNRPADKRSFIPSLVEKEKVSRMVHAIKMGWIQPRRPRDPTPSFYDLWAQEDPNAVLGRHKMHVPAPKLALPGHAESYNPPPEYLLSEEERLAWEQQEPGERKLSFLPRKFPSLRAVPAYGRFIQERFERCLDLYLCPRQRKMRSTGATVTLSGASVSLLGASGWFQALTTAPCGSGRWPLPAV

SEQ ID NO: 1031788 - protein, 784 aa, Homo sapiens
  misc_feature (724)..(728): Xaa can be any naturally occurring amino acid
  misc_feature (731)..(731): Xaa can be any naturally occurring amino acid
  misc_feature (733)..(733): Xaa can be any naturally occurring amino acid
  misc_feature (736)..(737): Xaa can be any naturally occurring amino acid
  misc_feature (740)..(740): Xaa can be any naturally occurring amino acid
  misc_feature (744)..(744): Xaa can be any naturally occurring amino acid
PAHAARSLSEAAVRVAAGARWGMAGSRGAGRTAAPSVRPEKRRSEPELEPEPEPEPPLLCTSPLSHSTGSDSGVSDSEESVFSGLEDSGSDSSEDDDEGDEEGEDGALDDEGHSGIKKTTEEQVQASTPCPRTEMASARIGDEYAEDSSDEEDIRNTVGNVPLEWYDDFPHVGYDLDGRRIYKPLRTRDELDQFLDKMDDPDYWRTVQDPMTGRDLRLTDEQVALVRRLQSGQFGDVGFNPYEPAVDFFSGDVMIHPVTNRPADKRSFIPSLVEKEKVSRMVHAIKMGWIQPRRPRDPTPSFYDLWAQEDPNAVLGRHKMHVPAPKLALPGHAESYNPPPEYLLSEEERLAWEQQEPGERKLSFLPRKFPSLRAVPAYGRFIQERFERCLDLYLCPRQRKMRVNVDPEDLIPKLPRPRDLQPFPTCQALVYRGHSDLVRCLSVSPGGQWLVSGSDDGSLRLWEVATARCVRTVPVGGVVKSVAWNPSPAVCLVAAAVEDSVLLLNPALGDRLVAGSTDQLLSAFVPPEEPPLQPARWLEASEEERQVGLRLRICHGKPVTQVTWHGRGDYLAVVLATQGHTQVLIHQLSRRRSQSPFRRSHGQVQRVAFHPARPFLLVASQRSVRLYHLLRQELTKKLMPNCKWVSSLAVHPAGDNVICGSYDSKLVWFDLDLSTKPYRMLRHHKKALRAVAFHPRYPLFASGSDDGSVIVCHGMVYNDHILKXXXXXTHXKXMNXXKNXNPKXEKYWTSSSTPPSRGSSPRGQTGLSASSPSCSACLGLGWSC

SEQ ID NO: 1031789 - protein, 489 aa, Homo sapiens
PAHAARSLSEAAVRVAAGARWGMAGSRGAGRTAAPSVRPEKRRSEPELEPEPEPEPPLLCTSPLSHSTGSDSGVSDSEESVFSGLEDSGSDSSEDDDEGDEEGEDGALDDEGHSGIKKTTEEQVQASTPCPRTEMASARIGDEYAEDSSDEEDIRNTVGNVPLEWYDDFPHVGYDLDGRRIYKPLRTRDELDQFLDKMDDPDYWRTVQDPMTGRDLRLTDEQVALVRRLQSGQFGDVGFNPYEPAVDFFSGDVMIHPVTNRPADKRSFIPSLVEKEKVSRMVHAIKMGWIQPRRPRDPTPSFYDLWAQEDPNAVLGRHKMHVPAPKLALPGHAESYNPPPEYLLSEEERLAWEQQEPGERKLSFLPRKFPSLRAVPAYGRFIQERFERCLDLYLCPRQRKMRVNVDPEDLIPKLPRPRDLQPFPTCQALVYRGHSDLVRCLSVSPGGQWLVSGSDDGSLRLWEVATARCVRTVPVGGVVKSVAWLGWSC

SEQ ID NO: 1031790 - protein, 199 aa, Homo sapiens
  misc_feature (8)..(8): Xaa can be any naturally occurring amino acid
CTLQVRGXVTGRAVHPAGESGNTCITAFGPGDNVICGSYDSKLVWFDLDLSTKPYRMLRRGKLGVEAASRAPPFSPSLPSTWFPPPRHHKKALRAVAFHPRYPLFASGSDDGSVIVCHGMVYKWVLTLPGPLPRAVVSGRALSPPRPHSDLLQNPLLVPVKVLKGHVLTRDLGVLDVIFHPTQPWVFSSGADGTVRLFT

SEQ ID NO: 1031791 - protein, 791 aa, Homo sapiens
PAHAARSLSEAAVRVAAGARWGMAGSRGAGRTAAPSVRPEKRRSEPELEPEPEPEPPLLCTSPLSHSTGSDSGVSDSEESVFSGLEDSGSDSSEDDDEGDEEGEDGALDDEGHSGIKKTTEEQVQASTPCPRTEMASARIGDEYAEDSSDEEDIRNTVGNVPLEWYDDFPHVGYDLDGRRIYKPLRTRDELDQFLDKMDDPDYWRTVQDPMTGRDLRLTDEQVALVRRLQSGQFGDVGFNPYEPAVDFFSGDVMIHPVTNRPADKRSFIPSLVEKEKVSRMVHAIKMGWIQPRRPRDPTPSFYDLWAQEDPNAVLGRHKMHVPAPKLALPGHAESYNPPPEYLLSEEERLAWEQQEPGERKLSFLPRKFPSLRAVPAYGRFIQERFERCLDLYLCPRQRKMRVCGGGTPGGGTGGKADLALLLPRVNVDPEDLIPKLPRPRDLQPFPTCQALVYRGHSDLVRCLSVSPGGQWLVSGSDDGSLRLWEVATARCVRTVPVGGVVKSVAWNPSPAVCLVAAAVEDSVLLLNPALGDRLVAGSTDQLLSAFVPPEEPPLQPARWLEASEEERQVGLRLRICHGKPVTQVTWHGRGDYLAVVLATQGHTQVLIHQLSRRRSQSPFRRSHGQVQRVAFHPARPFLLVASQRSVRLYHLLRQELTKKLMPNCKWVSSLAVHPAGDNVICGSYDSKLVWFDLDLSTKPYRMLRHHKKALRAVAFHPRYPLFASGSDDGSVIVCHGMVYNDLLQNPLLVPVKVLKGHVLTRDLGVLDVIFHPTQPWVFSSGADGTVRLFT

SEQ ID NO: 1031792 - protein, 698 aa, Homo sapiens
LLRTRPGRCRKRLCGWRPARGGAWRVRGVRGARRRRACGRRSGGLSPNWSLSPSRSSTPCPRTEMASARIGDEYAEDSSDEEDIRNTVGNVPLEWYDDFPHVGYDLDGRRIYKPLRTRDELDQFLDKMDDPDYWRTVQDPMTGRDLRLTDEQVALVRRLQSGQFGDVGFNPYEPAVDFFSGDVMIHPVTNRPADKRSFIPSLVEKEKVSRMVHAIKMGWIQPRRPRDPTPSFYDLWAQEDPNAVLGRHKMHVPAPKLALPGHAESYNPPPEYLLSEEERLAWEQQEPGERKLSFLPRKFPSLRAVPAYGRFIQERFERCLDLYLCPRQRKMRVNVDPEDLIPKLPRPRDLQPFPTCQALVYRGHSDLVRCLSVSPGGQWLVSGSDDGSLRLWEVATARCVRTVPVGGVVKSVAWNPSPAVCLVAAAVEDSVLLLNPALGDRLVAGSTDQLLSAFVPPEEPPLQPARWLEASEEERQVGLRLRICHGKPVTQVTWHGRGDYLAVVLATQGHTQVLIHQLSRRRSQSPFRRSHGQVQRVAFHPARPFLLVASQRSVRLYHLLRQELTKKLMPNCKWVSSLAVHPAGDNVICGSYDSKLVWFDLDLSTKPYRMLRHHKKALRAVAFHPRYPLFASGSDDGSVIVCHGMVYNDLLQNPLLVPVKVLKGHVLTRDLGVLDVIFHPTQPWVFSSGADGTVRLFT

SEQ ID NO: 1031793 - protein, 468 aa, Homo sapiens
PAHAARSLSEAAVRVAAGARWGMAGSRGAGRTAAPSVRPEKRRSEPELEPEPEPEPPLLCTSPLSHSTGSDSGVSDSEESVFSGLEDSGSDSSEDDDEGDEEGEDGALDDEGHSGIKKTTEEQVQASTPCPRTEMASARIGDEYAEDSSDEEDIRNTVGNVPLEWYDDFPHVGYDLDGRRIYKPLRTRDELDQFLDKMDDPDYWRTVQDPMTGRDLRLTDEQVALVRRLQSGQFGDVGFNPYEPAVDFFSGDVMIHPVTNRPADKRSFIPSLVEKEKVSRMVHAIKMGWIQPRRPRDPTPSFYDLWAQEDPNAVLGRHKMHVPAPKLALPGHAESYNPPPEYLLSEEERLAWEQQEPGERKLSFLPRKFPSLRAVPAYGRFIQERFERCLDLYLCPRQRKMRVNVDPEDLIPKLPRPRDLQPFPTCQALVYRGHSDLVRCLSVSPGGQWLVSGSSPSCSACLGLGWSC

SEQ ID NO: 1031794 - protein, 746 aa, Homo sapiens; identical to SEQ ID NO: 1031786

SEQ ID NO: 1031795 - protein, 191 aa, Homo sapiens
  misc_feature (3)..(3): Xaa can be any naturally occurring amino acid
MDXAASEFFRSGKYDLDFKSPDDPSRYISPDQLADLYKSFIKDYPVVSIEDPFDQDNWGAWQKFTASAGIQVVGDDLTVTNPKRIAKAVNEKSCNCLLLKVNQIGSVTESLQACKLAQANGWGVMVSHRSGETEDTFIADLVVGLCTGQIKTGAPCRSERLAKYNQLLRIEEELGSKAKFAGRNFRNPLAK

SEQ ID NO: 1031796 - protein, 366 aa, Homo sapiens
VVCCRLVLGLGGASLSVLFAPGSCASCLSVCAAVGVFVESLCFVVLLVLSAVGLLVVGSVGGRRVAGVSFPVCLACDFLVLALVWSVWLYGLPVAFGCVMGVSVGSSVVLSRYFVILVCEVAVVCVGSPLCAPSLNVGVRVSRAYGPGILVSNGRQMCFMSLCCYVSCYCLECHSMRIMPCIRRRLFGSGWLLCCSFGDVACLCVTVASSHLAILAYVVFGFRYGPRYDGAVMDLDSDKSSLVLWSGGAFSDGLDEVSPVMGFMGLGCYYTDRHPIAFRPRVLASPSVTCWLHRPLPLCQLRQLEAPDQHLQGSLLVSAPPPWSSYRFLRTSTEAKLPGALLAALALQSCNWPKSLFFSPHFPPSV

SEQ ID NO: 1031797 - protein, 191 aa, Homo sapiens; identical to SEQ ID NO: 1031795
  misc_feature (3)..(3): Xaa can be any naturally occurring amino acid

SEQ ID NO: 1031798 - protein, 67 aa, Homo sapiens
MIIPVRCFTCGKIVGNKWEAYLGLLQAEYTEGDALDALGLKRYCCRRMLLAHVDLIEKLLNYAPLEK

SEQ ID NO: 1031799 - protein, 67 aa, Homo sapiens; identical to SEQ ID NO: 1031798

SEQ ID NO: 1031800 - protein, 67 aa, Homo sapiens; identical to SEQ ID NO: 1031798

SEQ ID NO: 1031801 - protein, 67 aa, Homo sapiens; identical to SEQ ID NO: 1031798

SEQ ID NO: 1031802 - protein, 245 aa, Homo sapiens
MAGLELLSDQGYRVDGRRAGELRKIQARMGVFAQADGSAYIEQGNTKALAVVYGPHEIRGSRARALPDRALVNCQYSSATFSTGERKRRPHGDRKSCEMGLQLRQTFEAAILTQLHPRSQIDIYVQVLQADGGTYAACVNAATLAVLDAGIPMRDFVCACSAGFVDGTALADLSHVEEAAGGPQLALALLPASGQIALLEMDARLHEDHLERVLEAAAQAARDVHTLLDRVVRQHVREASILLGD

SEQ ID NO: 1031803 - protein, 52 aa, Homo sapiens
MGVFAQADGSAYIEQGNTKALAVVYGPHELTALAYIEQGNTKALAVVYGPAR

SEQ ID NO: 1031804 - protein, 147 aa, Homo sapiens
MGLQLRQTFEAAILTQLHPRSQIDIYVQVLQADGGTYAACVNAATLAVLDAGIPMRDFVCACSAGFVDGTALADLSHVEEAAGGPQLALALLPASGQIALLEMDARLHEDHLERVLEAAAQAARDVHTLLDRVVRQHVREASILLGD

SEQ ID NO: 1031805 - protein, 245 aa, Homo sapiens; identical to SEQ ID NO: 1031802

SEQ ID NO: 1031806 - protein, 147 aa, Homo sapiens; identical to SEQ ID NO: 1031804

SEQ ID NO: 1031807 - protein, 152 aa, Homo sapiens
YYQADDANVVTDRDLEVDTTLKSLSQQIENIRSPERSRKNPARTCRDLKMCHSDWKSGEYWIDPNQGLPASLESNVFCNMETGETCVYPTQPSVAQKNWYISKNPKDKRHVWFGENMTDGFQFDYGGQGSDPAEDGIQLTFLRTDVHRGLPE

SEQ ID NO: 1031808 - protein, 329 aa, Homo sapiens
MSAEASGPAAAAAPSLEAPKPSGLEPGPAAYGLKPLTPNSKYVKLNVGGSLHYTTLRTLTGQDTMLKAMFSGRVEVLTDAGGWVLIDRSGRHFGTILNYLRDGSVPLPESTRELGELLGEARYYLVQGLIEDCQLALQQKRETLSPLCLIPMVTSPREEQQLLASTSKPVVKLLHNRSNNKYSYTSTSDDNLLKNIELFDKLALRFHGRLLFLKDVLGDEICCWSFYGQGRKIAEVCCTSIVYATEKKQTKVEFPEARIFEETLNILIYETPRGPDPALLEATGGAAGAGGAGRGEDEENREHRVRRIHVRRHITHDERPHGQQIVFKD

SEQ ID NO: 1031809 - protein, 170 aa, Homo sapiens
MHPGPSSGGTEGGVPTALRPPGPLVPSTSDDNLLKNIELFDKLALRFHGRLLFLKDVLGDEICCWSFYGQGRKIAEVCCTSIVYATEKKQTKVEFPEARIFEETLNILIYETPRGPDPALLEATGGAAGAGGAGRGEDEENREHRVRRIHVRRHITHDERPHGQQIVFKD

SEQ ID NO: 1031810 - protein, 224 aa, Homo sapiens
MSAEASGPAAAAAPSLEAPKPSGLEPGPAAYGLKPLTPNSKYVKLNVGGSLHYTTLRTLTGQDTMLKAMFSGRVEVLTDAGGWVLIDRSGRHFGTILNYLRDGSVPLPESTRELGELLGEARYYLVQGLIEDCQLALQQKRETLSPLCLIPMVTSPREEQQLLASTSKPVVKLLHNRSNNKYSYTPPHHPPYLLNFVLDWPGPAQLSVISLFHIIYYFNFLLNY

SEQ ID NO: 1031811 - protein, 158 aa, Homo sapiens
MSAEASGPAAAAAPSLEAPKPSGLEPGPAAYGLKPLTPNSKYVKLNVGGSLHYTTLRTLTGQDTMLKAMFSGRVEVLTDAGGWVLIDRSGRHFGTILNYLRDGSVPLPESTRELGELLGEARYYLVQGLIEDCQLALQVRAFGVPMPMFLGRAAQAGY

SEQ ID NO: 1031812 - protein, 456 aa, Homo sapiens
MSAEASGPAAAAAPSLEAPKPSGLEPGPAAYGLKPLTPNSKYVKLNVGGSLHYTTLRTLTGQDTMLKAMFSGRVEVLTDAGGWVLIDRSGRHFGTILNYLRDGSVPLPESTRELGELLGEARYYLVQGLIEDCQLALQQKRETLSPLCLIPMVTSPREEQQLLASTSKPVVKLLHNRSNNKYSYKELAESSPLRSVLLLSSILQMRRSGHQEVKYLPSVTQLKNGDTRTPGEVAWLPVPHWSCCAVLCWDLLSACGFPSETRLAWPQGWRRLSVEHQSPGQEQRTGNASRPVFWGYRGRGANCAEASWSPVPSTSDDNLLKNIELFDKLALRFHGRLLFLKDVLGDEICCWSFYGQGRKIAEVCCTSIVYATEKKQTKVEFPEARIFEETLNILIYETPRGPDPALLEATGGAAGAGGAGRGEDEENREHRVRRIHVRRHITHDERPHGQQIVFKD

SEQ ID NO: 1031813 - protein, 401 aa, Homo sapiens
MSAEASGPAAAAAPSLEAPKPSGLEPGPAAYGLKPLTPNSKYVKLNVGGSLHYTTLRTLTGQDTMLKAMFSGRVEVLTDAGGWVLIDRSGRHFGTILNYLRDGSVPLPESTRELGELLGEARYYLVQGLIEDCQLALQSRAYSGFSSCSRNVFLQLVHQTRVQSQIFTLHLVICKLTMESMTLRIVSCNNVEEMIRVIGILWHECDVLVQQKRETLSPLCLIPMVTSPREEQQLLASTSKPVVKLLHNRSNNKYSYTSTSDDNLLKNIELFDKLALRFHGRLLFLKDVLGDEICCWSFYGQGRKIAEVCCTSIVYATEKKQTKVEFPEARIFEETLNILIYETPRGPDPALLEATGGAAGAGGAGRGEDEENREHRVRRIHVRRHITHDERPHGQQIVFKD

SEQ ID NO: 1031814 - protein, 195 aa, Homo sapiens
NLLRTELLFVTAIFAVPRTIPGAVHSLSICQMKKYTKRLGREGDEGEKTNNSACLTSELSLEDMTLLSKGVAERPGQAQGPDCRARRCVGAGALGRGMALRDCTRRKELGPAGKQTKVEFPEARIFEETLNILIYETPRGPDPALLEATGGAAGAGGAGRGEDEENREHRVRRIHVRRHITHDERPHGQQIVFKD

SEQ ID NO: 1031815 - protein, 329 aa, Homo sapiens [sequence omitted]

SEQ ID NO: 1031816 - protein, 329 aa, Homo sapiens [sequence omitted]

SEQ ID NO: 1031817 - protein, 528 aa, Homo sapiens
MSAEASGPAAAAAPSLEAPKPSGLEPGPAAYGLKPLTPNSKYVKLNVGGSLHYTTLRTLTGQDTMLKAMFSGRVEVLTDAGGWVLIDRSGRHFGTILNYLRDGSVPLPESTRELGELLGEARYYLVQGLIEDCQLALQSRAYSGFSSCSRNVFLQLVHQTRVQSQIFTLHLVICKLTMESMTLRIVSCNNVEEMIRVIGILWHECDVLVQQKRETLSPLCLIPMVTSPREEQQLLASTSKPVVKLLHNRSNNKYSYKELAESSPSEVSTVVSSILQMRRSGHQEVKYLPSVTQLKNGDTRTPGEVAWLPVPHWSCCAVLCWDLLSACGFPSETRLAWPQGWRRLSVEHQSPGQEQRTGNASRPVFWGYRGRGANCAEASWSPVPSTSDDNLLKNIELFDKLALRFHGRLLFLKDVLGDEICCWSFYGQGRKIAEVCCTSIVYATEKKQTKVEFPEARIFEETLNILIYETPRGPDPALLEATGGAAGAGGAGRGEDEENREHRVRRIHVRRHITHDERPHGQQIVFKD

SEQ ID NO: 1031818 - protein, 178 aa, Homo sapiens
MVTSPREEQQLLASTSKPVVKLLHNRSNNKYSYTSTSDDNLLKNIELFDKLALRFHGRLLFLKDVLGDEICCWSFYGQGRKIAEVCCTSIVYATEKKQTKVEFPEARIFEETLNILIYETPRGPDPALLEATGGAAGAGGAGRGEDEENREHRVRRIHVRRHITHDERPHGQQIVFKD

SEQ ID NO: 1031819 - protein, 263 aa, Homo sapiens
  misc_feature (77)..(77): Xaa can be any naturally occurring amino acid
PLWTEPPLSCCLPATYPADMGTAGAMQLCWVILGFLLFRESQVWGWGTRLLWKLQVKLRGGIFTGRDFSQPPYPLFXPGHNSQPTMTQTSSSQGGLGGLSLTTEPVSSNPGYIPSSEANRPSHLSSTGTPGAGVPSSGRDGGTSRDTFQTVPPNSTTMSLSMREDATILPSPTSETVLTVAAFGVISFIVILVVVVIILVGVVSLRFKCRKSKESEDPQKPGSSGLSESCSTANGEKDSITLISMKNINMNNGKQSLSAEKVL

SEQ ID NO: 1031820 - protein, 271 aa, Homo sapiens
PLWTEPPLSCCLPATYPADMGTAGAMQLCWVILGFLLFRGHNSQPTMTQTSSSQGGLGGLSLTTEPVSSNPGYIPSSEANRPSHLSSTGTPGAGVPSSGRDGGTSRDTFQTVPPNSTTMSLSMREDATILPSPTSETVLTVAAFGESGRRRWDIGGNPTPGIDLDSGSGNASSNLTHLFQEVLADEEDPCGRGAPALQLALLGCAGFHVLMQGWSRVESPLWLGGGRLRAHLFSREVELTLLLEPAYHSTYLGRECRTLVGPFVPPTGPLR

SEQ ID NO: 1031821 - protein, 223 aa, Homo sapiens
PLWTEPPLSCCLPATYPADMGTAGAMQLCWVILGFLLFRGHNSQPTMTQTSSSQGGLGGLSLTTEPVSSNPGYIPSSEANRPSHLSSTGTPGAGVPSSGRDGGTSRDTFQTVPPNSTTMSLSMREDATILPSPTSETVLTVAAFGVISFIVILVVVVIILVGVVSLRFKCRKSKESEDPQKPGSSGLSESCSTANGEKDSITLISMKNINMNNGKQSLSAEKI

SEQ ID NO: 1031822 - protein, 260 aa, Homo sapiens
PLWTEPPLSCCLPATYPADMGTAGAMQLCWVILGFLLFRGHNSQPTMTQTSSSQGGLGGLSLTTEPVSSNPGYIPSSEANRPSHLSSTGTPGAGVPSSGRDGGTSRDTFQTVPPNSTTMSLSMREDATILPSPTSETVLTVAAFGMESGGEPTLARGRQAESSPVQQRSGTHFAPGASYHSVISFIVILVVVVIILVGVVSLRFKCRKSKESEDPQKPGSSGLSESCSTANGEKDSITLISMKNINMNNGKQSLSAEKVL

SEQ ID NO: 1031823 - protein, 224 aa, Homo sapiens
PLWTEPPLSCCLPATYPADMGTAGAMQLCWVILGFLLFRGHNSQPTMTQTSSSQGGLGGLSLTTEPVSSNPGYIPSSEANRPSHLSSTGTPGAGVPSSGRDGGTSRDTFQTVPPNSTTMSLSMREDATILPSPTSETVLTVAAFGVISFIVILVVVVIILVGVVSLRFKCRKSKESEDPQKPGSSGLSESCSTANGEKDSITLISMKNINMNNGKQSLSAEKVL

SEQ ID NO: 1031824 - protein, 224 aa, Homo sapiens; identical to SEQ ID NO: 1031823

SEQ ID NO: 1031825 - protein, 797 aa, Homo sapiens
MQDGNFLLSALQPEAGVCSLALPSDLQLDRRGAEGPEAERLRAARVQEQVRARLLQLGQQPRHNGAAEPEPEAETARGTSRGQYHTLQAGFSSRSQGLSGDKTSGFRPIAKPAYSPASWSSRSAVDLSCSRRLSSAHNGGSAFGAAGYGGAQPTPPMPTRPVSFHERGGVGSRADYDTLSLRSLRLGPGGLDDRYSLVSEQLEPAATSTYRAFAYERQASSSSSRAGGLDWPEATEVSPSRTIRAPAVRTLQRFQSSHRSRGVGGAVPGAVLEPVARAPSVRSLSLSLADSGHLPDVHGFNSYGSHRTLQRLSSGFDDIDLPSAVKYLMASDPNLQVLGAAYIQHKCYSDAAAKKQARSLQAVPRLVKLFNHANQEVQRHATGAMRNLIYDNADNKLALVEENGIFELLRTLREQDDELRKNVTGILWNLSSSDHLKDRLARDTLEQLTDLVLSPLSGAGGPPLIQQNASEAEIFYNATGFLRNLSSASQATRQKMRECHGLVDALVTSINHALDAGKCEDKSVENAVCVLRNLSYRLYDEMPPSALQRLEGRGRRDLAGAPPGEVVGCFTPQSRRLRELPLAADALTFAEVSKDPKGLEWLWSPQIVGLYNRLLQRCELNRHTTEAAAGALQNITAGDRRWAGVLSRLALEQERILNPLLDRVRTADHHQLRSLTGLIRNLSRNARNKDEMSTKVVSHLIEKLPGSVGEKSPPAEVLVNIIAVLNNLVVASPIAARDLLYFDGLRKLIFIKKKRDSPDSEKSSRAASSLLANLWQYNKLHRDFRAKGYRKEDFLGP

SEQ ID NO: 1031826 - protein, 797 aa, Homo sapiens; identical to SEQ ID NO: 1031825

SEQ ID NO: 1031827 - protein, 776 aa, Homo sapiens
MSGTNLTLSHNSITFRLRVQLAPLTLLNFSTQDIGCAQQPRHNGAAEPEPEAETARGTSRGQYHTLQAGFSSRSQGLSGDKTSGFRPIAKPAYSPASWSSRSAVDLSCSRRLSSAHNGGSAFGAAGYGGAQPTPPMPTRPVSFHERGGVGSRADYDTLSLRSLRLGPGGLDDRYSLVSEQLEPAATSTYRAFAYERQASSSSSRAGGLDWPEATEVSPSRTIRAPAVRTLQRFQSSHRSRGVGGAVPGAVLEPVARAPSVRSLSLSLADSGHLPDVHGFNSYGSHRTLQRLSSGFDDIDLPSAVKYLMASDPNLQVLGAAYIQHKCYSDAAAKKQARSLQAVPRLVKLFNHANQEVQRHATGAMRNLIYDNADNKLALVEENGIFELLRTLREQDDELRKNVTGILWNLSSSDHLKDRLARDTLEQLTDLVLSPLSGAGGPPLIQQNASEAEIFYNATGFLRNLSSASQATRQKMRECHGLVDALVTSINHALDAGKCEDKSVENAVCVLRNLSYRLYDEMPPSALQRLEGRGRRDLAGAPPGEVVGCFTPQSRRLRELPLAADALTFAEVSKDPKGLEWLWSPQIVGLYNRLLQRCELNRHTTEAAAGALQNITAGDRRWAGVLSRLALEQERILNPLLDRVRTADHHQLRSLTGLIRNLSRNARNKDEMSTKVVSHLIEKLPGSVGEKSPPAEVLVNIIAVLNNLVVASPIAARDLLYFDGLRKLIFIKKKRDSPDSEKSSRAASSLLANLWQYNKLHRDFRAKGYRKEDFLGP

SEQ ID NO: 1031828 - protein, 824 aa, Homo sapiens
MQDGNFLLSALQPEAGVCSLALPSDLQLDRRGAEGPEAERLRAARVQEQVRARLLQLGQQPRHNGAAEPEPEAETARGTSRGQYHTLQAGFSSRSQGLSGDKTSGFRPIAKPAYSPASWSSRSAVDLSCSRRLSSAHNGGSAFGAAGYGGAQPTPPMPTRPVSFHERGGVGSRADYDTLSLRSLRLGPGGLDDRYSLVSEQLEPAATSTYRAFAYERQASSSSSRAGGLDWPEATEVSPSRTIRAPAVRTLQRFQSSHRSRGVGGAVPGAVLEPVARAPSVRSLSLSLADSGHLPDVHGFNSYGSHRTLQRLSSGFDDIDLPSAVKYLMASDPNLQVLGAAYIQHKCYSDAAAKKQARSLQAVPRLVKLFNHANQEVQRHATGAMRNLIYDNADNKLALVEENGIFELLRTLREQDDELRKNVTGILWNLSSSDHLKDRLARDTLEQLTDLVLSPLSGAGGPPLIQQNASEAEIFYNATGFLRNLSSASQATRQKMRECHGLVDALVTSINHALDAGKCEDKVRGAVWRRAVPRAAALTRAPAPRPLPQSVENAVCVLRNLSYRLYDEMPPSALQRLEGRGRRDLAGAPPGEVVGCFTPQSRRLRELPLAADALTFAEVSKDPKGLEWLWSPQIVGLYNRLLQRCELNRHTTEAAAGALQNITAGDRRWAGVLSRLALEQERILNPLLDRVRTADHHQLRSLTGLIRNLSRNARNKDEMSTKVVSHLIEKLPGSVGEKSPPAEVLVNIIAVLNNLVVASPIAARDLLYFDGLRKLIFIKKKRDSPDSEKSSRAASSLLANLWQYNKLHRDFRAKGYRKEDFLGP

SEQ ID NO: 1031829 - protein, 815 aa, Homo sapiens
EGLGCRSSGARSQKPERVLEASVGGEGVLGPEAGVCSLALPSDLQLDRRGAEGPEAERLRAARVQEQVRARLLQLGQQPRHNGAAEPEPEAETARGTSRGQYHTLQAGFSSRSQGLSGDKTSGFRPIAKPAYSPASWSSRSAVDLSCSRRLSSAHNGGSAFGAAGYGGAQPTPPMPTRPVSFHERGGVGSRADYDTLSLRSLRLGPGGLDDRYSLVSEQLEPAATSTYRAFAYERQASSSSSRAGGLDWPEATEVSPSRTIRAPAVRTLQRFQSSHRSRGVGGAVPGAVLEPVARAPSVRSLSLSLADSGHLPDVHGFNSYGSHRTLQRLSSGFDDIDLPSAVKYLMASDPNLQVLGAAYIQHKCYSDAAAKKQARSLQAVPRLVKLFNHANQEVQRHATGAMRNLIYDNADNKLALVEENGIFELLRTLREQDDELRKNVTGILWNLSSSDHLKDRLARDTLEQLTDLVLSPLSGAGGPPLIQQNASEAEIFYNATGFLRNLSSASQATRQKMRECHGLVDALVTSINHALDAGKCEDKSVENAVCVLRNLSYRLYDEMPPSALQRLEGRGRRDLAGAPPGEVVGCFTPQSRRLRELPLAADALTFAEVSKDPKGLEWLWSPQIVGLYNRLLQRCELNRHTTEAAAGALQNITAGDRRWAGVLSRLALEQERILNPLLDRVRTADHHQLRSLTGLIRNLSRNARNKDEMSTKVVSHLIEKLPGSVGEKSPPAEVLVNIIAVLNNLVVASPIAARDLLYFDGLRKLIFIKKKRDSPDSEKSSRAASSLLANLWQYNKLHRDFRAKGYRKEDFLGP

SEQ ID NO: 1031830 - protein, 839 aa, Homo sapiens
MQDGNFLLSALQPEAGVCSLALPSDLQLDRRGAEGPEAERLRAARVQEQVRARLLQLGQQPRHNGAAEPEPEAETARGTSRGQYHTLQAGFSSRSQGLSGDKTSVSDGPSPRGTIWALQSGEWEALQRARTQVSPGTPLTAPFDPQGFRPIAKPAYSPASWSSRSAVDLSCSRRLSSAHNGGSAFGAAGYGGAQPTPPMPTRPVSFHERGGVGSRADYDTLSLRSLRLGPGGLDDRYSLVSEQLEPAATSTYRAFAYERQASSSSSRAGGLDWPEATEVSPSRTIRAPAVRTLQRFQSSHRSRGVGGAVPGAVLEPVARAPSVRSLSLSLADSGHLPDVHGFNSYGSHRTLQRLSSGFDDIDLPSAVKYLMASDPNLQVLGAAYIQHKCYSDAAAKKQARSLQAVPRLVKLFNHANQEVQRHATGAMRNLIYDNADNKLALVEENGIFELLRTLREQDDELRKNVTGILWNLSSSDHLKDRLARDTLEQLTDLVLSPLSGAGGPPLIQQNASEAEIFYNATGFLRNLSSASQATRQKMRECHGLVDALVTSINHALDAGKCEDKSVENAVCVLRNLSYRLYDEMPPSALQRLEGRGRRDLAGAPPGEVVGCFTPQSRRLRELPLAADALTFAEVSKDPKGLEWLWSPQIVGLYNRLLQRCELNRHTTEAAAGALQNITAGDRRWAGVLSRLALEQERILNPLLDRVRTADHHQLRSLTGLIRNLSRNARNKDEMSTKVVSHLIEKLPGSVGEKSPPAEVLVNIIAVLNNLVVASPIAARDLLYFDGLRKLIFIKKKRDSPDSEKSSRAASSLLANLWQYNKLHRDFRAKGYRKEDFLGP

SEQ ID NO: 1031831 - protein, 383 aa, Homo sapiens
MQDGNFLLSALQPEAGVCSLALPSDLQLDRRGAEGPEAERLRAARVQEQVRARLLQLGQQPRHNGAAEPEPEAETARGTSRGQYHTLQAGFSSRSQGLSGDKTSGFRPIAKPAYSPASWSSRSAVDLSCSRRLSSAHNGGSAFGAAGYGGAQPTPPMPTRPVSFHERGGVGSRADYDTLSLRSLRLGPGGLDDRYSLVSEQLEPAATSTYRAFAYERQASSSSSRAGGLDWPEATEVSPSRTIRAPAVRTLQRFQSSHRSRGVGGAVPGAVLEPVARAPSVRSLSLSLADSGHLPDVHGFNSYGSHRTLQRLSSGFDDIDLPSAVKYLMASDPNLQVLGAAYIQHKCYSDAAAKKQVTTPTTHSLPPGDLLRGPHHLPLSSAH

SEQ ID NO: 1031832 - protein, 188 aa, Homo sapiens
SFAGGGERGEHAMKASGTLREYKVVGRCLPTPKCHTPPLYRMRIFAPNHVVAKSRFWYFVSQLKKMKKSSGEIVYCGQVFEKSPLRVKNFGIWLRYDSRSGTHNMYREYRDLTTAGAVTQCYRDMGARHRARAHSIQIMKVEEIAASKCRRPAVKQFHDSKIKFPLPPRVLRRQHKPRFTTKRPNPFF

SEQ ID NO: 1031833 - protein, 188 aa, Homo sapiens; identical to SEQ ID NO: 1031832

SEQ ID NO: 1031834 - protein, 188 aa, Homo sapiens; identical to SEQ ID NO: 1031832

SEQ ID NO: 1031835 - protein, 218 aa, Homo sapiens
SFAGGGERGEHAMKASGTLREYKVVGRCLPTPKCHTPPLYRMRIFAPNHVVAKSRFWYFVSQLKKMKKSSGGDRASRVGQGVLRNGPPLRVEGTPGDRGLAVIDSRRGGTPQTLYRGKYGGPLNHRRRGQPTGGLTEHNGVCAANPAPRAPTPIPRSWEGGRKIRGQAKVAAGPGLGKEQVPGLPKIKGPPLAPKAGPWRRQEKAQVQPSKEAKNLSS

SEQ ID NO: 1031836 - protein, 144 aa, Homo sapiens
SFAGGGERGEHAMKASGTLREYKVVGRCLPTPKCHTPPLYRMRIFAPNHVVAKSRFWYFVSQLKKMKKSSGEIVYCGQVFEKSPLRVKNFGIWLRYDSRSGTHNMYREYRDLTTAGAVTQCYARYGSPDRCCTGSVHAHHEAWK

SEQ ID NO: 1031837 - protein, 469 aa, Homo sapiens
LLLQRLDQRSHCVPLWVALAPRNSRRLCLERFSACRSQGAPAHRLRGHTRMLAIMEASTDFLPGLNFSNCSRRALEKALLDGMGSCLFERLPSLPPMAAFCGNMFVEPGEQCDCGFLDDCVDPCCDSLTCQLRPGAQCASDGPCCQNCQLRPSGWQCRPTRGDCDLPEFCPGDSSQCPPDVSLGDGEPCAGGQAVCMHGRCASYAQQCQSLWGPGAQPAAPLCLQTANTRGNAFGSCGRNPSGSYVSCTPRDAICGQLQCQTGRTQPLLGSIRDLLWETIDVNGTELNCSWVHLDLGSDVAQPLLTLPGTACGPGLVCIDHRCQRVDLLGAQECRSKCHGHGVCDSNRHCYCEEGWAPPDCTTQLKATSSLTTGLLLSLLVLLVLVMLGASYWYRARLHQRLCQLKGPTCQYRAAQSGPSERPGPPQRALLARGTKQASALSFPAPPSRPLPPDPVSKRLQVNLGQGPP

SEQ ID NO: 1031838 - protein, 436 aa, Homo sapiens
DHDLPGNSCPCPGPAPAKTCIMEASTDFLPGLNFSNCSRRALEKALLDGMGSCLFERLPSLPPMAAFCGNMFVEPGEQCDCGFLDDCVDPCCDSLTCQLRPGAQCASDGPCCQNCQLRPSGWQCRPTRGDCDLPEFCPGDSSQCPPDVSLGDGEPCAGGQAVCMHGRCASYAQQCQSLWGPGAQPAAPLCLQTANTRGNAFGSCGRNPSGSYVSCTPRDAICGQLQCQTGRTQPLLGSIRDLLWETIDVNGTELNCSWVHLDLGSDVAQPLLTLPGTACGPGLVCIDHRCQRVDLLGAQECRSKCHGHGVCDSNRHCYCEEGWAPPDCTTQLKATSSLTTGLLLSLLVLLVLVMLGASYWYRARLHQRLCQLKGPTCQYRAAQSGPSERPGPPQRALLARGTKQASALSFPAPPSRPLPPDPVSKRLQVNLGQGPP

SEQ ID NO: 1031839 - protein, 498 aa, Homo sapiens
LLLQRLDQRSHCVPLWVALAPRNSRRLCLERFSACRSQGAPAHRLRGHTRMLAIMEASTDFLPGLNFSNCSRRALEKALLDGMGSCLFERLPSLPPMAAFCGNMFVEPGEQCDCGFLDDCVDPCCDSLTCQLRPGAQCASDGPCCQNCQLRPSGWQCRPTRGDCDLPEFCPGDSSQCPPDVSLGDGEPCAGGQAVCMHGRCASYAQQCQSLWGPGAQPAAPLCLQTANTRGNAFGSCGRNPSGSYVSCTPRDAICGQLQCQTGRTQPLLGSIRDLLWETIDVNGTELNCSWVHLDLGSDVAQPLLTLPGTACGPGLVCIDHRCQRVDLLGAQECRSKCHGHGVCDSNRHCYCEEGWAPPDCTTQLKATSSLTTGLLLSLLVLLVLVMLGASYWYRARLHQRLCQLKGPTCQYRAAQSGPSERPGPPQRALLARGTKAELADRPNPPTRPLPADPVVRSPKSQGPAKPPPQGSHCLRPQAGAIVVTARPGAESRLVVPP

SEQ ID NO: 1031840 - protein, 474 aa, Homo sapiens
LLLQRLDQRSHCVPLWVALAPRNSRRLCLERFSACRSQGAPAHRLRGHTRMLAIMEASTDFLPGLNFSNCSRRALEKALLDGMGSCLFERLPSLPPMAAFCGNMFVEPGEQCDCGFLDDCVDPCCDSLTCQLRPGAQCASDGPCCQNCQLRPSGWQCRPTRGDCDLPEFCPGDSSQCPPDVSLGDGEPCAGGQAVCMHGRCASYAQQCQSLWGPGAQPAAPLCLQTANTRGNAFGSCGRNPSGSYVSCTPRDAICGQLQCQTGRTQPLLGSIRDLLWETIDVNGTELNCSWVHLDLGSDVAQPLLTLPGTACGPGLVCIDHRCQRVDLLGAQECRSKCHGHGVCDSNRHCYCEEGWAPPDCTTQLKATSSLTTGLLLSLLVLLVLVMLGASYWYRARLHQRLCQLKGPTCQYRAAQSGPSERPGPPQRALLARGTKSLRGQPSPHPKEATACDPRPVPSGDCPAGAESRLVVPP

SEQ ID NO: 1031841 - protein, 326 aa, Homo sapiens
LLLQRLDQRSHCVPLWVALAPRNSRRLCLERFSACRSQGAPAHRLRGHTRMLAIMEASTDFLPGLNFSNCSRRALEKALLDGMGSCLFERLPSLPPMAAFCGNMFVEPGEQCDCGFLDDCVDPCCDSLTCQLRPGAQCASDGPCCQNCQLRPSGWQCRPTRGDCDLPEFCPGDSSQCPPDVSLGDGEPCAGGQAVCMHGRCASYAQQCQSLWGPGAQPAAPLCLQTANTRGNAFGSCGRNPSGSYVSCTPRDAICGQLQCQTGRTQPLLGSIRDLLWETIDVNGTELNCSWVHLDLGSDVAQPLLTLPGTACGPGLVSSLGGQDQV

SEQ ID NO: 1031842 - protein, 148 aa, Homo sapiens
MHRAAQSGPSERPGPPQRALLARGTKVSPGCQRKGTPPWPGIQLGPWGVRIKGSRLRERLALPKSQSKESGPALPSPPLATGREAESRRVGRAASWSRSCWAPSAGQEVALRGGSIHAPSSDPRRAQGQWCSEWPSVGPGHHVRKAAG

SEQ ID NO: 1031843 - protein, 499 aa, Homo sapiens
LLLQRLDQRSHCVPLWVALAPRNSRRLCLERFSACRSQGAPAHRLRGHTRMLAIMEASTDFLPGLNFSNCSRRALEKALLDGMGSCLFERLPSLPPMAAFCGNMFVEPGEQCDCGFLDDCVDPCCDSLTCQLRPGAQCASDGPCCQNCQLRPSGWQCRPTRGDCDLPEFCPGDSSQCPPDVSLGDGEPCAGGQAVCMHGRCASYAQQCQSLWGPGAQPAAPLCLQTANTRGNAFGSCGRNPSGSYVSCTPRDAICGQLQCQTGRTQPLLGSIRDLLWETIDVNGTELNCSWVHLDLGSDVAQPLLTLPGTACGPGLVCIDHRCQRVDLLGAQECRSKCHGHGVCDSNRHCYCEEGWAPPDCTTQLKATSSLTTGLLLSLLVLLVLVMLGASYWYRARLHQRLCQLKGPTCQYRAAQSGPSERPGPPQRALLARGTKQASALSFPAPPSRPLPPDPVSKRLQSQGPAKPPPQGSHCLRPQAGAIVVTARPGAESRLVVPP

SEQ ID NO: 1031844 - protein, 437 aa, Homo sapiens
LLLQRLDQRSHCVPLWVALAPRNSRRLCLERFSACRSQGAPAHRLRGHTRMLAIMEASTDFLPGLNFSNCSRRALEKALLDGMGSCLFERLPSLPPMAAFCGNMFVEPGEQCDCGFLDDCVDPCCDSLTCQLRPGAQCASDGPCCQNCQLRPSGWQCRPTRGDCDLPEFCPGDSSQCPPDVSLGDGEPCAGGQAVCMHGRCASYAQQCQSLWGPGAQPAAPLCLQTANTRGNAFGSCGRNPSGSYVSCTPRDAICGQLQCQTGRTQPLLGSIRDLLWETIDVNGTELNCSWVHLDLGSDVAQPLLTLPGTACGPGLVCIDHRCQRVDLLGAQECRSKCHGHGVCDSNRHCYCEEGWAPPDCTTQLKATSSLTTGLLLSLLVLLVLVMLGASYWYRARLHQRLCQLKGPTCQYRAAQSGPSERPGPPQRALLARGTKQ

SEQ ID NO: 1031845 - protein, 451 aa, Homo sapiens
LLLQRLDQRSHCVPLWVALAPRNSRRLCLERFSACRSQGAPAHRLRGHTRMLAIMEASTDFLPGLNFSNCSRRALEKALLDGMGSCLFERLPSLPPMAAFCGNMFVEPGEQCDCGFLDDCVDPCCDSLTCQLRPGAQCASDGPCCQNCQLRPSGWQCRPTRGDCDLPEFCPGDSSQCPPDVSLGDGEPCAGGQAVCMHGRCASYAQQCQSLWGPGAQPAAPLCLQTANTRGNAFGSCGRNPSGSYVSCTPRDAICGQLQCQTGRTQPLLGSIRDLLWETIDVNGTELNCSWVHLDLGSDVAQPLLTLPGTACGPGLVCIDHRCQRVDLLGAQECRSKCHGHGVCDSNRHCYCEEGWAPPDCTTQLKATSSLTTGLLLSLLVLLVLVMLGASYWYRARLHQRLCQLKGPTCQYRVSGASQAPTPRKPLPATPGRCHRVTARPGAESRLVVPP

SEQ ID NO: 1031846 - protein, 385 aa, Homo sapiens
MAAATIVHDTSEAVELCPAYGLYLKPITKMTISVALPQLKQPGKSISNWEVMERLKGMVQNHQFSTLRISKSTMDFIRFEGEVENKSLVKSFLACLDGKTIKLSGFSDILKVRAAEFKIDFPTRHDWDSFFRDAKDMNETLPGERPDTIHLEGLPCKWFALKESGSEKPSEDVLVKVFEKFGEIRNVDIPMLDPYREEMTGRNFHTFSFGGHLNFEAYVQYREYMGFIQAMSALRGMKLMYKGEDGKAVACNIKVSFDSTKHLSDASIKKRQLERQKLQELEQQREEQKRREKEAEERQRAEERKQKELEELERERKREEKLRKREQKQRDRELRRNQKKLEKLQAEEQKQLQEKIKLEERKLLLAQRNLQSIRLIAELLSRAKL

SEQ ID NO: 1031847 - protein, 550 aa, Homo sapiens [sequence omitted]

SEQ ID NO: 1031848 - protein, 529 aa, Homo sapiens
MAAATIVHDTSEAVELCPAYGLYLKPITKMTISVALPQLKQPGKSISNWEVMERLKGMVQNHQFSTLRISKSTMDFIRFEGEVENKSLVKSFLACLDGKTIKLSGFSDILKVRAAEFKIDFPTRHDWDSFFRDAKDMNETLPGERPDTIHLEGLPCKWFALKESGSEKPSEDVLVKVFEKFGEIRNVDIPMLDPYREEMTGRNFHTFSFGGHLNFEAYVQYREYMGFIQAMSALRGMKLMYKGEDGKAVACNIKVSFDSTKHLSDASIKKRQLERQKLQELEQQREEQKRREKEAEERQRAEERKQKELEELERERKRRGARAASSPAFLTTTNSPRASLPASRMSPERTPGQNRTSATGSPARAGAGPPETGLLTGTSGRGAGPGGPAAGRTGGHARSGGPTRSTPTRMTAPAGAARARTTPGPGGPTAKTGTGGSGAGSGGAAPAGSTAATAAEASGRAPGPRAGTAVPGTGNDGHGLPTACPGKTRTCSSLLAAPWPLSVHPCKAKTLLQPRMSTEPAGRKEDTML

SEQ ID NO: 1031849 - protein, 418 aa, Homo sapiens
MPAGLAPPHWRGRWGVLVLTVCVLCFRPKVPEAMAAATIVHDTSEAVELCPAYGLYLKPITKMTISVALPQLKQPGKSISNWEVMERLKGMVQNHQFSTLRISKSTMDFIRFEGEVENKSLVKSFLACLDGKTIKLSGFSDILKVRAAEFKIDFPTRHDWDSFFRDAKDMNETLPGERPDTIHLEGLPCKWFALKESGSEKPSEDVLVKVFEKFGEIRNVDIPMLDPYREEMTGRNFHTFSFGGHLNFEAYVQYREYMGFIQAMSALRGMKLMYKGEDGKAVACNIKVSFDSTKHLSDASIKKRQLERQKLQELEQQREEQKRREKEAEERQRAEERKQKELEELERERKREEKLRKREQKQRDRELRRNQKKLEKLQAEEQKQLQEKIKLEERKLLLAQRNLQSIRLIAELLSRAKL

SEQ ID NO: 1031850 - protein, 258 aa, Homo sapiens
MDGLDLARRRRRPPPLGWSPARPLILHPHARRFRAPVVWSPRMALQRRGARAASSPAFLTTTNSPRASLPASRMSPERTPGQNRTSATGSPARAGAGPPETGLLTGTSGRGAGPGGPAAGRTGGHARSGGPTRSTPTRMTAPAGAARARTTPGPGGPTAKTGTGGSGAGSGGAAPAGSTAATAAEASGRAPGPRAGTAVPGTGNDGHGLPTACPGKTRTCSSLLAAPWPLSVHPCKAKTLLQPRMSTEPAGRKEDTML

SEQ ID NO: 1031851 - protein, 550 aa, Homo sapiens [sequence omitted]

SEQ ID NO: 1031852 - protein, 373 aa, Homo sapiens
MGSSEDQAYRLLNDYANGFMVSQVLFAACELGVFDLLAEAPGPLDVAAVAAGVRASAHGTELLLDICVSLKLLKVETRGGKAFYRNTELSSDYLTTVSPTSQCSMLKYMGRTSYRCWGHLADAVREGRNQYLETFGVPAEELFTAIYRSEGERLQFMQALQEVWSVNGRSVLTAFDLSVFPLMCDLGGTRIKLETIILSKLSQGQKTKHRVFSLIGGAGALAKECMSLYPGCKITVFDIPEVVWTAKQHFSFQEEEQIDFQEGDFFKDPLPEADLYILARVLHDWADGKCSHLLERIYHTCKPGGGILVIESLLDEDRRGPLLTQLYSLNMLVQTEGQERTPTHYHMLLSSAGFRDFQFKKTGAIYDAILARK

SEQ ID NO: 1031853 - protein, 451 aa, Homo sapiens
MAAATIVHDTSEAVELCPAYGLYLKPITKMTISVALPQLKQPGKSISNWEVMERLKGMVQNHQFSTLRISKSTMDFIRFEGEVENKSLVKSFLACLDGKTIKLSGFSDILKVRAAEFKIDFPTRHDWDSFFRDAKDMNETLPGERPDTIHLEGLPCKWFALKESGSEKPSEDVLVKVFEKFGEIRNVDIPMLDPYREEMTGRNFHTFSFGGHLNFEAYVQYREYMGFIQAMSALRGMKLMYKGEDGKAVACNIKVSFDSTKHLSDASIKKRQLERQKLQELEQQREEQKRREKEAEERQRAEERKQKELEELERERKREEKLRKREQKQRDRELRRNQKKLEKLQAEEQKQLQEKIKLEERKLLLAQRNLQSIRLIAELLSRAKVPGGSLCSRQPRPGCPQCPPLKCGRRHGAVFPAGCSCSYETSFNAEDDGSFPGGCSARLSFPMISEL

SEQ ID NO: 1031854 - protein, 298 aa, Homo sapiens
MGSSEDQAYRLLNDYANGFMVSQVLFAACELGVFDLLAEAPGPLDVAAVAAGVRASAHGTELLLDICVSLKLLKVETRGGKAFYRNTELSSDYLTTVSPTSQCSMLKYMGRTSYRCWGHLADAVREGRNQYLETFGVPAEELFTAIYRSEGERLQFMQALQEVWSVNGRSVLTAFDLSVFPLMCDLGGDFFKDPLPEADLYILARVLHDWADGKCSHLLERIYHTCKPGGGILVIESLLDEDRRGPLLTQLYSLNMLVQTEGQERTPTHYHMLLSSAGFRDFQFKKTGAIYDAILARK

SEQ ID NO: 1031855 - protein, 556 aa, Homo sapiens
MAAATIVHDTSEAVELCPAYGLYLKPITKMTISVALPQLKQPGKSISNWEVMERLKGMVQNHQFSTLRISKSTMDFIRFEGEVENKSLVKSFLACLDGKTIKLSGFSDILKVRAAEFKIDFPTRHDWDSFFRDAKDMNETLPGERPDTIHLEGLPCKWFALKESGSEKPSEDVLVKVFEKFGEIRNVDIPMLDPYREEMTGRNFHTFSFGGHLNFEAYVQYREYMGFIQAMSALRGMKLMYKGEDGKAVACNIKVSFDSTKHLSDASIKKRQLERQKLQELEQQREEQKRREKEAEERQRAEESSVSGWLFPTLPAGSVLLEDKRSRGSGSHGWIGDKMGSSEDQAYRLLNDYANGFMVSQVLFAACELGVFDLLAEAPGPLDVAAVAAGVRASAHGTELLLDICVSLKLLKVETRGGKAFYRNTELSSDYLTTVSPTSQCSMLKYMGRTSYRCWGHLADAVREGRNQYLETFGVPAEELFTAIYRSEGERLQFMQALQEVWSVNGRSVLTAFDLSVFPLMCDLGGTRIKLETIILSKLSQGQKTKHRVFSLIGGN

SEQ ID NO: 1031856 - protein, 342 aa, Homo sapiens
MAAATIVHDTSEAVELCPAYGLYLKPITKMTISVALPQLKQPGKSISNWEVMERLKGMVQNHQFSTLRISKSTMDFIRFEGEVENKSLVKSFLACLDGKTIKLSGFSDILKVRAAEFKIDFPTRHDWDSFFRDAKDMNETLPGERPDTIHLEGLPCKWFALKESGSEKPSEDVLVKVFEKFGEIRNVDIPMLDPYREEMTGRNFHTFSFGGHLNFEAYVQYREYMGFIQAMSALRGMKLMYKGEDGKAVACNIKVSFDSTKHLSDASIKKRQLERQKLQELEQQREEQKRREKEAEERQRAEERYLLRDGPSALVSGTWECAQTRVRVSACIPVRVCVHACL

SEQ ID NO: 1031857 - protein, 451 aa, Homo sapiens; identical to SEQ ID NO: 1031853

SEQ ID NO: 1031858 - protein, 185 aa, Homo sapiens
MSPERTPGQNRTSATGSPARAGAGPPETGLLTGTSGRGAGPGGPAAGRTGGHARSGGPTRSTPTRMTAPAGAARARTTPGPGGPTAKTGTGGSGAGSGGAAPAGSTAATAAEASGRAPGPRAGTAVPGTGNDGHGLPTACPGKTRTCSSLLAAPWPLSVHPCKAKTLLQPRMSTEPAGRKEDTML

SEQ ID NO: 1031859 - protein, 320 aa, Homo sapiens [sequence omitted]

SEQ ID NO: 1031860 - protein, 682 aa, Homo sapiens
MAAATIVHDTSEAVELCPAYGLYLKPITKMTISVALPQLKQPGKSISNWEVMERLKGMVQNHQFSTLRISKSTMDFIRFEGEVENKSLVKSFLACLDGKTIKLSGFSDILKVRAAEFKIDFPTRHDWDSFFRDAKDMNETLPGERPDTIHLEGLPCKWFALKESGSEKPSEDVLVKVFEKFGEIRNVDIPMLDPYREEMTGRNFHTFSFGGHLNFEAYVQYREYMGFIQAMSALRGMKLMYKGEDGKAVACNIKVSFDSTKHLSDASIKKRQLERQKLQELEQQREEQKRREKEAEERQRAEESSVSGWLFPTLPAGSVLLEDKRSRGSGSHGWIGDKMGSSEDQAYRLLNDYANGFMVSQVLFAACELGVFDLLAEAPGPLDVAAVAAGVRASAHGTELLLDICVSLKLLKVETRGGKAFYRNTELSSDYLTTVSPTSQCSMLKYMGRTSYRCWGHLADAVREGRNQYLETFGVPAEELFTAIYRSEGERLQFMQALQEVWSVNGRSVLTAFDLSVFPLMCDLGWGWSSGKECMSLYPGCKITVFDIPEVVWTAKQHFSFQEEEQIDFQEGDFFKDPLPEADLYILARVLHDWADGKCSHLLERIYHTCKPGGGILVIESLLDEDRRGPLLTQLYSLNMLVQTEGQERTPTHYHMLLSSAGFRDFQFKKTGAIYDAILARK

SEQ ID NO: 1031861 - protein, 334 aa, Homo sapiens
MAAATIVHDTSEAVELCPAYGLYLKPITKMTISVALPQLKQPGKSISNWEVMERLKGMVQNHQFSTLRISKSTMDFIRFEGEVENKSLVKSFLACLDGKTIKLSGFSDILKVRAAEFKIDFPTRHDWDSFFRDAKDMNETLPGERPDTIHLEGLPCKWFALKESGSEKPSEDVLVKVFEKFGEIRNVDIPMLDPYREEMTGRNFHTFSFGGHLNFEAYVQYREYMGFIQAMSALRGMKLMYKGEDGKAVACNIKVSFDSTKHLSDASIKKRQLERQKLQELEQQREEQKRREKEAEERQRAEERKQKELEELERERKTKHSRTAQKLITNLSNS

SEQ ID NO: 1031862 - protein, 373 aa, Homo sapiens; identical to SEQ ID NO: 1031852

SEQ ID NO: 1031863 - protein, 550 aa, Homo sapiens [sequence omitted]

SEQ ID NO: 1031864 - protein, 373 aa, Homo sapiens; identical to SEQ ID NO: 1031852

SEQ ID NO: 1031865 - protein, 550 aa, Homo sapiens [sequence omitted]

SEQ ID NO: 1031866 - protein, 104 aa, Homo sapiens
  misc_feature (19)..(19): Xaa can be any naturally occurring amino acid
  misc_feature (23)..(23): Xaa can be any naturally occurring amino acid
  misc_feature (28)..(28): Xaa can be any naturally occurring amino acid
VSLPGVLGYPSFCCSGKEXPAQXMEYKXTDAPQPDVKEEEEEKEEEKDKGDEEEEGEEKLEEKQKSDAEEDGGTVSQEEEDRKPKAEEDEILNRSPRNRKPRRE

SEQ ID NO: 1031867 - protein, 104 aa, Homo sapiens; identical to SEQ ID NO: 1031866
  misc_feature (19)..(19): Xaa can be any naturally occurring amino acid
  misc_feature (23)..(23): Xaa can be any naturally occurring amino acid
  misc_feature (28)..(28): Xaa can be any naturally occurring amino acid

SEQ ID NO: 1031868 - protein, 104 aa, Homo sapiens; identical to SEQ ID NO: 1031866
  misc_feature (19)..(19): Xaa can be any naturally occurring amino acid
  misc_feature (23)..(23): Xaa can be any naturally occurring amino acid
  misc_feature (28)..(28): Xaa can be any naturally occurring amino acid

SEQ ID NO: 1031869 - protein, 104 aa, Homo sapiens; identical to SEQ ID NO: 1031866
  misc_feature (19)..(19): Xaa can be any naturally occurring amino acid
  misc_feature (23)..(23): Xaa can be any naturally occurring amino acid
  misc_feature (28)..(28): Xaa can be any naturally occurring amino acid

SEQ ID NO: 1031870 - protein, 105 aa, Homo sapiens
  misc_feature (19)..(19): Xaa can be any naturally occurring amino acid
  misc_feature (24)..(24): Xaa can be any naturally occurring amino acid
  misc_feature (29)..(29): Xaa can be any naturally occurring amino acid
LEAFLVSWVIPPSAVLEKXTQPSXWSIRXTDAPQPDVKEEEEEKEEEKDKGDEEEEGEEKLEEKQKSDAEEDGGTVSQEEEDRKPKAEEDEILNRSPRNRKPRRE

SEQ ID NO: 1031871 - protein, 104 aa, Homo sapiens; identical to SEQ ID NO: 1031866
  misc_feature (19)..(19): Xaa can be any naturally occurring amino acid
  misc_feature (23)..(23): Xaa can be any naturally occurring amino acid
  misc_feature (28)..(28): Xaa can be any naturally occurring amino acid

SEQ ID NO: 1031872 - protein, 105 aa, Homo sapiens; identical to SEQ ID NO: 1031870
  misc_feature (19)..(19): Xaa can be any naturally occurring amino acid
  misc_feature (24)..(24): Xaa can be any naturally occurring amino acid
  misc_feature (29)..(29): Xaa can be any naturally occurring amino acid

SEQ ID NO: 1031873 - protein, 104 aa, Homo sapiens; identical to SEQ ID NO: 1031866
  misc_feature (19)..(19): Xaa can be any naturally occurring amino acid
  misc_feature (23)..(23): Xaa can be any naturally occurring amino acid
  misc_feature (28)..(28): Xaa can be any naturally occurring amino acid

SEQ ID NO: 1031874 - protein, 104 aa, Homo sapiens; identical to SEQ ID NO: 1031866
  misc_feature (19)..(19): Xaa can be any naturally occurring amino acid
  misc_feature (23)..(23): Xaa can be any naturally occurring amino acid
  misc_feature (28)..(28): Xaa can be any naturally occurring amino acid

SEQ ID NO: 1031875 - protein, 104 aa, Homo sapiens; identical to SEQ ID NO: 1031866
  misc_feature (19)..(19): Xaa can be any naturally occurring amino acid
  misc_feature (23)..(23): Xaa can be any naturally occurring amino acid
  misc_feature (28)..(28): Xaa can be any naturally occurring amino acid

SEQ ID NO: 1031876 - protein, 104 aa, Homo sapiens; identical to SEQ ID NO: 1031866
  misc_feature (19)..(19): Xaa can be any naturally occurring amino acid
  misc_feature (23)..(23): Xaa can be any naturally occurring amino acid
  misc_feature (28)..(28): Xaa can be any naturally occurring amino acid

SEQ ID NO: 1031877 - protein, 111 aa, Homo sapiens
CWSVRYFAFRCCWVVSVCLRSACGLFISPPPLLLFFPISFSRFSFLLLAPREWSRWGWHPRCARLRVVVFFLCGGGLVLLCVRLVCLLCGVSSPLPLLDVGFCSFQSIVPV

SEQ ID NO: 1031878 - protein, 105 aa, Homo sapiens; identical to SEQ ID NO: 1031870
  misc_feature (19)..(19): Xaa can be any naturally occurring amino acid
  misc_feature (24)..(24): Xaa can be any naturally occurring amino acid
  misc_feature (29)..(29): Xaa can be any naturally occurring amino acid

SEQ ID NO: 1031879 - protein, 104 aa, Homo sapiens; identical to SEQ ID NO: 1031866
  misc_feature (19)..(19): Xaa can be any naturally occurring amino acid
  misc_feature (23)..(23): Xaa can be any naturally occurring amino acid
  misc_feature (28)..(28): Xaa can be any naturally occurring amino acid

SEQ ID NO: 1031880 - protein, 104 aa, Homo sapiens; identical to SEQ ID NO: 1031866
  misc_feature (19)..(19): Xaa can be any naturally occurring amino acid
  misc_feature (23)..(23): Xaa can be any naturally occurring amino acid
  misc_feature (28)..(28): Xaa can be any naturally occurring amino acid

SEQ ID NO: 1031881 - protein, 104 aa, Homo sapiens; identical to SEQ ID NO: 1031866
  misc_feature (19)..(19): Xaa can be any naturally occurring amino acid
  misc_feature (23)..(23): Xaa can be any naturally occurring amino acid
  misc_feature (28)..(28): Xaa can be any naturally occurring amino acid

SEQ ID NO: 1031882 - protein, 104 aa, Homo sapiens; identical to SEQ ID NO: 1031866
  misc_feature (19)..(19): Xaa can be any naturally occurring amino acid
  misc_feature (23)..(23): Xaa can be any naturally occurring amino acid
  misc_feature (28)..(28): Xaa can be any naturally occurring amino acid

SEQ ID NO: 1031883 - protein, 104 aa, Homo sapiens; identical to SEQ ID NO: 1031866
  misc_feature (19)..(19): Xaa can be any naturally occurring amino acid
  misc_feature (23)..(23): Xaa can be any naturally occurring amino acid
  misc_feature (28)..(28): Xaa can be any naturally occurring amino acid

SEQ ID NO: 1031884 - protein, 104 aa, Homo sapiens; identical to SEQ ID NO: 1031866
  misc_feature (19)..(19): Xaa can be any naturally occurring amino acid
  misc_feature (23)..(23): Xaa can be any naturally occurring amino acid
  misc_feature (28)..(28): Xaa can be any naturally occurring amino acid

SEQ ID NO: 1031885 - protein, 109 aa, Homo sapiens
  misc_feature (5)..(5): Xaa can be any naturally occurring amino acid
MEYKXTDAPQPDVKEEEEEKEEEKDKGDEEEEGEEKLEEKQKSDAEEDGGTVSQEEEDRKPKAWHLGIYIPLGRVRLWPSGAGGLLRNASRAWHVSSGIDVFITSSTVC

SEQ ID NO: 1031886 - protein, 104 aa, Homo sapiens; identical to SEQ ID NO: 1031866
  misc_feature (19)..(19): Xaa can be any naturally occurring amino acid
  misc_feature (23)..(23): Xaa can be any naturally occurring amino acid
  misc_feature (28)..(28): Xaa can be any naturally occurring amino acid

SEQ ID NO: 1031887 - protein, 104 aa, Homo sapiens; identical to SEQ ID NO: 1031866
  misc_feature (19)..(19): Xaa can be any naturally occurring amino acid
  misc_feature (23)..(23): Xaa can be any naturally occurring amino acid
  misc_feature (28)..(28): Xaa can be any naturally occurring amino acid

SEQ ID NO: 1031888 - protein, 104 aa, Homo sapiens; identical to SEQ ID NO: 1031866
  misc_feature (19)..(19): Xaa can be any naturally occurring amino acid
  misc_feature (23)..(23): Xaa can be any naturally occurring amino acid
  misc_feature (28)..(28): Xaa can be any naturally occurring amino acid

SEQ ID NO: 1031889 - protein, 104 aa, Homo sapiens; identical to SEQ ID NO: 1031866
  misc_feature (19)..(19): Xaa can be any naturally occurring amino acid
  misc_feature (23)..(23): Xaa can be any naturally occurring amino acid
  misc_feature (28)..(28): Xaa can be any naturally occurring amino acid

SEQ ID NO: 1031890 - protein, 104 aa, Homo sapiens; identical to SEQ ID NO: 1031866
  misc_feature (19)..(19): Xaa can be any naturally occurring amino acid
  misc_feature (23)..(23): Xaa can be any naturally occurring amino acid
  misc_feature (28)..(28): Xaa can be any naturally occurring amino acid

SEQ ID NO: 1031891 - protein, 104 aa, Homo sapiens; identical to SEQ ID NO: 1031866
  misc_feature (19)..(19): Xaa can be any naturally occurring amino acid
  misc_feature (23)..(23): Xaa can be any naturally occurring amino acid
  misc_feature (28)..(28): Xaa can be any naturally occurring amino acid

SEQ ID NO: 1031892 - protein, 778 aa, Homo sapiens
MAQKMDCGAGLLGFQAEASVEDSALLMQTLMEAIQISEAPPTNQATAAASPQSSQPPTANEMADIQVSAAAARPKSAFKVQNATTKGPNGVYDFSQAHNAKDVPNTQPKAAFKSQNATSKGPNAAYDFSQAATTGELAANKSEMAFKAQNATTKVGPNATYNFSQSLNANDLANSRPKTPFKAWNDTTKAPTADTQTQNVNQAKMATSQADIETDPGISEPDGATAQTSADGSQAQNLESRTIIRGKRTRKINNLNVEENSSGDQRRAPLAAGTWRSAPVPVTTQNPPGAPPNVLWQTPLAWQNPSGWQNQTARQTPPARQSPPARQTPPAWQNPVAWQNPVIWPNPVIWQNPVIWPNPIVWPGPVVWPNPLAWQNPPGWQTPPGWQTPPGWQGPPDWQGPPDWPLPPDWPLPPDWPLPTDWPLPPDWIPADWPIPPDWQNLRPSPNLRPSPNSRASQNPGAAQPRDVALLQERANKLVKYLMLKDYTKVPIKRSEMLRDIIREYTDVYPEIIERACFVLEKKFGIQLKEIDKEEHLYILISTPESLAGILGTTKDTPKLGLLLVILGVIFMNGNRASEAVLWEALRKMGLRPGVRHPLLGDLRKLLTYEFVKQKYLDYRRVPNSNPPEYEFLWGLRSYHETSKMKVLRFIAEVQKRDPRDWTAQFMEAADEALDALDAAAAEAEARAEARTRMGIGDEAVSGPWSWDDIEFELLTWDEEGDFGDPWSRIPFTFWARYHQNARSRFPQTFAGPIIGPGGTASANFAANFGAIGFFWVE

SEQ ID NO: 1031893 - protein, 574 aa, Homo sapiens
MATSQADIETDPGISEPDGATAQTSADGSQAQNLESRTIIRGKRTRKINNLNVEENSSGDQRRAPLAAGTWRSAPVPVTTQNPPGAPPNVLWQTPLAWQNPSGWQNQTARQTPPARQSPPARQTPPAWQNPVAWQNPVIWPNPVIWQNPVIWPNPIVWPGPVVWPNPLAWQNPPGWQTPPGWQTPPGWQGPPDWQGPPDWPLPPDWPLPPDWPLPTDWPLPPDWIPADWPIPPDWQNLRPSPNLRPSPNSRASQNPGAAQPRDVALLQERANKLVKYLMLKDYTKVPIKRSEMLRDIIREYTDVYPEIIERACFVLEKKFGIQLKEIDKEEHLYILISTPESLAGILGTTKDTPKLGLLLVILGVIFMNGNRASEAVLWEALRKMGLRPGVRHPLLGDLRKLLTYEFVKQKYLDYRRVPNSNPPEYEFLWGLRSYHETSKMKVLRFIAEVQKRDPRDWTAQFMEAADEALDALDAAAAEAEARAEARTRMGIGDEAVSGPWSWDDIEFELLTWDEEGDFGDPWSRIPFTFWARYHQNARSRFPQTFAGPIIGPGGTASANFAANFGAIGFFWVE

SEQ ID NO: 1031894 - protein, 574 aa, Homo sapiens; identical to SEQ ID NO: 1031893

SEQ ID NO: 1031895 - protein, 574 aa, Homo sapiens; identical to SEQ ID NO: 1031893

SEQ ID NO: 1031896 - protein, 574 aa, Homo sapiens; identical to SEQ ID NO: 1031893

SEQ ID NO: 1031897 - protein, 574 aa, Homo sapiens; identical to SEQ ID NO: 1031893

SEQ ID NO: 1031898 - protein, 574 aa, Homo sapiens; identical to SEQ ID NO: 1031893

SEQ ID NO: 1031899 - protein, 574 aa, Homo sapiens; identical to SEQ ID NO: 1031893

SEQ ID NO: 1031900 - protein, 469 aa, Homo sapiens
MAQKMDCGAGLLGFQAEASVEDSALLMQTLMEAIQISEAPPTNQATAAASPQSSQPPTANEMADIQVSAAAARPKSAFKVQNATTKGPNGVYDFSQAHNAKDVPNTQPKAAFKSQNATPKGPNAAYDFSQAATTGELAANKSEMAFKAQNATTKVGPNATYNFSQSLNANDLANSRPKTPFKAWNDTTKAPTADTQTQNVNQAKMATSQADIETDPGISEPDGATAQTSADGSQAQNLESRTIIRGKRTRKINNLNVEENSSGDQRRAPLAAGTWRSAPVPVTTQNPPGAPPNVLWQTPLAWQNPSGWQNQTARQTPPARQSPPARQTPPAWQNPVAWQNPVIWPNPVIWQNPVIWPNPIVWPGPVVWPNPLAWQNPPGWQTPPGWQTPPGWQGPPDWQGPPDWPLPPDWPLPPDWPLPTDWPLPPDWIPADWPIPPDWQNWRSANWPFPIVGQTGWPPWPLGAMGLWP

SEQ ID NO: 1031901 - protein, 348 aa, Homo sapiens
MAQKMDCGAGLLGFQAEASVEDSALLMQTLMEAIQISEAPPTNQATAAASPQSSQPPTANEMADIQVSAAAARPKSAFKVQNATTKGPNGVYDFSQAHNAKDVPNTQPKAAFKSQNATPKGPNAAYDFSQAATTGELAANKSEMAFKAQNATTKVGPNATYNFSQSLNANDLANSRPKTPFKAWNDTTKAPTADTQTQNVNQAKMATSQADIETDPGISEPDGATAQTSADGSQAQNLESRTIIRGKRTRKINNLNVEENSSGDQRRAPLAAGTWRSAPVPVTTQNPPGAPPNVLWQTPLAWQNPSGWQNQTARQPVPTSLPTLVPLVSSGLSEMLDIAINRSSLSPV

SEQ ID NO: 1031902 - protein, 350 aa, Homo sapiens
LYGLGTRLGGGFFLRPSPNLRPSPNSRASQNPGAAQPRDVALLQERANKLVKYLMLKDYTKVPIKRSEMLRDIIREYTDVYPEIIERACFVLEKKFGIQLKEIDKEEHLYILISTPESLAGILGTTKDTPKLGLLLVILGVIFMNGNRASEAVLWEALRKMGLRPGVRHPLLGDLRKLLTYEFVKQKYLDYRRVPNSNPPEYEFLWGLRSYHETSKMKVLRFIAEVQKRDPRDWTAQFMEAADEALDALDAAAAEAEARAEARTRMGIGDEAVSGPWSWDDIEFELLTWDEEGDFGDPWSRIPFTFWARYHQNARSRFPQTFAGPIIGPGGTASANFAANFGAIGFFWVE

SEQ ID NO: 1031903 - protein, 218 aa, Homo sapiens
MPRMCPTRSPRQPLSPKMLPHLWEALRKMGLRPGVRHPLLGDLRKLLTYEFVKQKYLDYRRVPNSNPPEYEFLWGLRSYHETSKMKVLRFIAEVQKRDPRDWTAQFMEAADEALDALDAAAAEAEARAEARTRMGIGDEAVSGPWSWDDIEFELLTWDEEGDFGDPWSRIPFTFWARYHQNARSRFPQTFAGPIIGPGGTASANFAANFGAIGFFWVE

SEQ ID NO: 1031904 - protein, 296 aa, Homo sapiens
MLKDYTKVPIKRSEMLRDIIREYTDVYPEIIERACFVLEKKFGIQLKEIDKEEHLYILISTPESLAGILGTTKDTPKLGLLLVILGVIFMNGNRASEAVLWEALRKMGLRPGVRHPLLGDLRKLLTYEFVKQKYLDYRRVPNSNPPEYEFLWGLRSYHETSKMKVLRFIAEVQKRDPRDWTAQFMEAADEALDALDAAAAEAEARAEARTRMGIGDEAVSGPWSWDDIEFELLTWDEEGDFGDPWSRIPFTFWARYHQNARSRFPQTFAGPIIGPGGTASANFAANFGAIGFFWVE

SEQ ID NO: 1031905 - protein, 574 aa, Homo sapiens; identical to SEQ ID NO: 1031893

SEQ ID NO: 1031906 - protein, 574 aa, Homo sapiens; identical to SEQ ID NO: 1031893

SEQ ID NO: 1031907 - protein, 574 aa, Homo sapiens; identical to SEQ ID NO: 1031893

SEQ ID NO: 1031908 - protein, 574 aa, Homo sapiens; identical to SEQ ID NO: 1031893

SEQ ID NO: 1031909 - protein, 442 aa, Homo sapiens
DLVPGAGRQGAQVACPEASAASPRGRGWGSRCPPWAARFTLCGHSPWGPKSLPEGRPVELRGCWARVCGPQSPLNLTVPQIVNTCSGPDIARSVSCPLLSRDAVDFLRGHLVPKEMSLWESLGESWMRPRSEWPREPQVPLYVPKFHSGWEPPVDVLQEAPWEVEGLASAPIEEVSPVSRQSIRNSQKHSPTSEPTPPGDALPPVSSPHTHRGYQPTPAMAKYVKILYDFTARNANELSVLKDEVLEVLEDGRQWWKLRSRSGQAGYVPCNILGEARPEDAGAPFEQAGQKYWGPASPTHKLPPSFPGNKDELMQHMDEVNDELIRKISNIRAQPQRHFRVERSQPVSQPLTYESGPDEVRAWLEAKAFSPRIVENLGILTGPQLFSLNKEELKKVCGEEGVRVYSQLTMQKAFLEKQQSGSELEELMNKFHSMNQRRGEDS

SEQ ID NO: 1031910 - protein, 190 aa, Homo sapiens
AAADPEVGQRAERGRRGRGGEEPGRGGEEPAGEGRSPAGREGSGAFPAGLSRTPSPSRGHQEKIRQRQSILPPPQGPAPIPFQHRGGDSPEAKNRVGPQVPLSEPGGPRGWRGLHRARCGGLGEQPPCPPSGFRRRESQEEPRAVLAQKIEKETQILNCALDDIEPGGPRGWRGLHRARCGGLGEQPPCP

SEQ ID NO: 1031911 - protein, 174 aa, Homo sapiens
DLVPGAGRQGAQVACPEASAASPRGRGWGSRCPPWAARFTLCGHSPWGPKSLPEGRPVELRGCWARVCGPQSPLNLTVPQIVNTCSGPDIARSVSCPLLSRDAVDFLRGHLVPKEMSLWESLGESWMRPREGRAEQCRGFMGGQRCMGASKGVLVGQFWRGRADFRTSHPSSEW

SEQ ID NO: 1031912 - protein, 327 aa, Homo sapiens
MSLWESLGESWMRPRSEWPREPQVPLYVPKFHSGWEPPVDVLQEAPWEVEGLASAPIEEVSPVSRQSIRNSQKHSPTSEPTPPGDALPPVSSPHTHRGCQPTPAMAKYVKILYDFTARNANELSVLKDEVLEVLEDGRQWWKLRSRSGQAGYVPCNILGEARPEDAGAPFEQAGQKYWGPASPTHKLPPSFPGNKDELMQHMDEVNDELIRKISNIRAQPQRHFRVERSQPVSQPLTYESGPDEVRAWLEAKAFSPRIVENLGILTGPQLFSLNKEELKKVCGEEGVRVYSQLTMQKAFLEKQQSGSELEELMNKFHSMNQRRGEDS

SEQ ID NO: 1031913 - protein, 327 aa, Homo sapiens; identical to SEQ ID NO: 1031912

SEQ ID NO: 1031914 - protein, 327 aa, Homo sapiens; identical to SEQ ID NO: 1031912

SEQ ID NO: 1031915 - protein, 715 aa, Homo sapiens
MSQSGAVSCCPGATNGSLGRSDGVAKMSPKDLFEQRKKYSNSNVIMHETSQYHVQHLATFIMDKSEAITSVDDAIRKLVQLSSKEKIWTQEMLLQVNDQSLRLLDIESQEELEDFPLPTVQRSQTVLNQLRYPSVLLLVCQDSEQSKPDVHFFHCDEVEAELVHEDIESALADCRLGKKMRPQTLKGHQEKIRQRQSILPPPQGPAPIPFQHRGGDSPEAKNRVGPQVPLSEPGFRRRESQEEPRAVLAQKIEKETQILNCALDDIEWFVARLQKAAEAFKQLNQRKKGKKKGKKAPAEGVLTLRARPPSEGEFIDCFQKIKLAINLLAKLQKHIQNPSAAELVHFLFGPLDLIVNTCSGPDIARSVSCPLLSRDAVDFLRGHLVPKEMSLWESLGESWMRPRSEWPREPQVPLYVPKFHSGWEPPVDVLQEAPWEVEGLASAPIEEVSPVSRQSIRNSQKHSPTSEPTPPGDALPPVSSPHTHRGYQPTPAMAKYVKILYDFTARNANELSVLKDEVLEVLEDGRQWWKLRSRSGQAGYVPCNILGEARPEDAGAPFEQAGQKYWGPASPTHKLPPSFPGNKDELMQHMDEVNDELIRKISNIRAQPQRHFRVERSQPVSQPLTYESGPDEVRAWLEAKAFSPRIVENLGILTGPQLFSLNKEELKKVCGEEGVRVYSQLTMQKAFLEKQQSGSELEELMNKFHSMNQRRGEDS

SEQ ID NO: 1031916 - protein, 327 aa, Homo sapiens; identical to SEQ ID NO: 1031912

SEQ ID NO: 1031917 - protein, 613 aa, Homo sapiens
AAADPEVGQRAERGRRGRGGEEPGRGGEEPAGEGRSPAGREGSGAFPAGLSRTPSPSRGHQEKIRQRQSILPPPQGPAPIPFQHRGGDSPEAKNRVGPQVPLSEPGGPRGWRGLHRARCGGLGEQPPCPPSGFRRRESQEEPRAVLAQKIEKETQILNCALDDIEWFVARLQKAAEAFKQLNQRKKGKKKGKKAPAEGVLTLRARPPSEGEFIDCFQKIKLAINLLAKLQKHIQNPSAAELVHFLFGPLDLIVNTCSGPDIARSVSCPLLSRDAVDFLRGHLVPKEMSLWESLGESWMRPRSEWPREPQVPLYVPKFHSGWEPPVDVLQEAPWEVEGLASAPIEEVSPVSRQSIRNSQKHSPTSEPTPPGDALPPVSSPHTHRGYQPTPAMAKYVKILYDFTARNANELSVLKDEVLEVLEDGRQWWKLRSRSGQAGYVPCNILGEARPEDAGAPFEQAGQKYWGPASPTHKLPPSFPGNKDELMQHMDEVNDELIRKISNIRAQPQRHFRVERSQPVSQPLTYESGPDEVRAWLEAKAFSPRIVENLGILTGPQLFSLNKEELKKVCGEEGVRVYSQLTMQKAFLEKQQSGSELEELMNKFHSMNQRRGEDS

SEQ ID NO: 1031918 - protein, 335 aa, Homo sapiens
  misc_feature (324)..(324): Xaa can be any naturally occurring amino acid
MSQSGAVSCCPGATNGSLGRSDGVAKMSPKDLFEQRKKYSNSNVIMHETSQYHVQHLATFIMDKSEAITSVDDAIRKLVQLSSKEKIWTQEMLLQVNDQSLRLLDIESQEELEDFPLPTVQRSQTVLNQLRYPSVLLLVCQDSEQSKPDVHFFHCDEVEAELVHEDIESALADCRLGKKMRPQTLKGHQEKIRQRQSILPPPQGPAPIPFQHRGGDSPEAKNRVGPQVPLSEPGFRRRESQEEPRAVLAQKIEKETQILNCALDDIEWFVARLQKAAEAFKQLNQRKKGKKKGKKAPAGAGDRDGAGRCRGRGQQVQGTGTGTXPGTSMGATHGG

SEQ ID NO: 1031919 - protein, 122 aa, Homo sapiens
MSQSGAVSCCPGATNGSLGRSDGVAKMSPKDLFGELRFENGLDVTVGEMGTASRWGTAAPAPQLCLVWPRGSPGAQGGLWTLINLPKAPGHWIPSPTPVRGEAFTNNSGSINIDSAALIAVT

SEQ ID NO: 1031920 - protein, 114 aa, Homo sapiens
NQEARSCLGSGQALGPKEEGHFLPALHRAHLWRLPRKCSGQPRVNTLALPLWDHSPGTQTLGHAHSHPYPGPAAGALGPCMGLGRPVPLHLVLVQLTAVAAGATRCVHCTLALF

SEQ ID NO: 1031921 - protein, 759 aa, Homo sapiens
MSQSGAVSCCPGATNGSLGRSDGVAKMSPKDLFEQRKKYSNSNVIMHETSQYHVQHLATFIMDKSEAITSVDDAIRKLVQLSSKEKIWTQEMLLQVNDQSLRLLDIESQEELEDFPLPTVQRSQTVLNQLRYPSVLLLVCQDSEQSKPDVHFFHCDEVEAELVHEDIESALADCRLGKKMRPQTLKGHQEKIRQRQSILPPPQGPAPIPFQHRGGDSPEAKNRVGPQVPLSEPGFRRRESQEEPRAVLAQKIEKETQILNCALDDIEWFVARLQKAAEAFKQLNQRKKGKKKGKKAPAEGVLTLRARPPSEGEFIDCFQKIKLAINLLAKLQKHIQNPSAAELVHFLFGPLDLIVNTCSGPDIARSVSCPLLSRDAVDFLRGHLVPKEMSLWESLGESWMRPRSEWPREPQVPLYVPKFHSGWEPPVDVLQEAPWEVEGLASAPIEEVSPVSRQSIRNSQKHSPTSEPTPPGDALPPVSSPHTHRGYQPTPAMAKYVKILYDFTARNANELSVLKDEVLEVLEDGRQWWKLRSRSGQAGYVPCNILGEARPEDAGAPFEQAGQKYWGPASPTHKLPPSFPGNKDGESCCFEAGVPGPGHLGEEVWGGSLGRGRGQGQGSGGPESRAPSELMQHMDEVNDELIRKISNIRAQPQRHFRVERSQPVSQPLTYESGPDEVRAWLEAKAFSPRIVENLGILTGPQLFSLNKEELKKVCGEEGVRVYSQLTMQKAFLEKQQSGSELEELMNKFHSMNQRRGEDS

SEQ ID NO: 1031922 - protein, 660 aa, Homo sapiens
MSQSGAVSCCPGATNGSLGRSDGVAKMSPKDLFEQRKKYSNSNVIMHETSQYHVQHLATFIMDKSEAITSVDDAIRKLVQLSSKEKIWTQEMLLQVNDQSLRLLDIESQEELEDFPLPTVQRSQTVLNQLRYPSVLLLVCQDSEQSKPDVHFFHCDEVEAELVHEDIESALADCRLGKKMRPQTLKGHQEKIRQRQSILPPPQGPAPIPFQHRGGDSPEAKNRVGPQVPLSEPGFRRRESQEEPRAVLAQKIEKETQILNCALDDIEWFVARLQKAAEAFKQLNQRKKGKKKGKKAPAIVNTCSGPDIARSVSCPLLSRDAVDFLRGHLVPKEMSLWESLGESWMRPRSEWPREPQVPLYVPKFHSGWEPPVDVLQEAPWEVEGLASAPIEEVSPVSRQSIRNSQKHSPTSEPTPPGDALPPVSSPHTHRGYQPTPAMAKYVKILYDFTARNANELSVLKDEVLEVLEDGRQWWKLRSRSGQAGYVPCNILGEARPEDAGAPFEQAGQKYWGPASPTHKLPPSFPGNKDELMQHMDEVNDELIRKISNIRAQPQRHFRVERSQPVSQPLTYESGPDEVRAWLEAKAFSPRIVENLGILTGPQLFSLNKEELKKVCGEEGVRVYSQLTMQKAFLEKQQSGSELEELMNKFHSMNQRRGEDS

SEQ ID NO: 1031923 - protein, 223 aa, Homo sapiens [sequence omitted]

SEQ ID NO: 1031924 - protein, 223 aa, Homo sapiens
MSQSGAVSCCPGATNGSLGRSDGVAKMSPKDLFEQRKKYSNSNVIMHETSQYHVQHLATFIMDKSEAITSVDDAIRKLVQLSSKEKIWTQEMLLQVNDQSLRLLDIESQEELEDFPLPTVQRSQTVLNQLRYPSVLLLVCQDSEQSKPDVHFFHCDEVEAELVHEDIESALADCRLGKKMRPQTLKGHQEKIRQRQSILPPPQGPARHTLPRIPLWKGDHSRV

SEQ ID NO: 1031925 - protein, 57 aa, Homo sapiens
MSQSGAVSCCPGATNGSLGRSDGVAKMSPKDLFPPQRERHPTEERHPTERARDPLDH

SEQ ID NO: 1031926 - protein, 327 aa, Homo sapiens; identical to SEQ ID NO: 1031912

SEQ ID NO: 1031927 - protein, 327 aa, Homo sapiens; identical to SEQ ID NO: 1031912

SEQ ID NO: 1031928 - protein, 284 aa, Homo sapiens
ASGERWWKGGFSRFCEQQDPPEGLTVEVALHSPTSEPTPPGDALPPVSSPHTHRGYQPTPAMAKYVKILYDFTARNANELSVLKDEVLEVLEDGRQWWKLRSRSGQAGYVPCNILGEARPEDAGAPFEQAGQKYWGPASPTHKLPPSFPGNKDELMQHMDEVNDELIRKISNIRAQPQRHFRVERSQPVSQPLTYESGPDEVRAWLEAKAFSPRIVENLGILTGPQLFSLNKEELKKVCGEEGVRVYSQLTMQKAFLEKQQSGSELEELMNKFHSMNQRRGEDS

SEQ ID NO: 1031929 - protein, 240 aa, Homo sapiens
MDQDGDQQLGPSRILAPQTLKEIDDVYEKYKKEDDLNQKKRLQQLLQRALINSQELGDEKIQIVTQMLELVENRARQMELHSQCFQDPAESERASDKAKMDSSQPERSSRRPRRQRTSESRDLCHMANGIEDCDDQPPKEKKSKSAKKKKRSKAKQEREASPVEFAIDPNEPTYCLCNQVSYGEMIGCDNEQCPIEWFHFSCVSLTYKPKGKWYCPKCRGDNEKTMDKSTEKTKKDRRSR

SEQ ID NO: 1031930 - protein, 280 aa, Homo sapiens
MLGQQQQQLYSSAALLTGERSRLLTCYVQDYLECVESLPHDMQRNVSVLRELDNKYQETLKEIDDVYEKYKKEDDLNQKKRLQQLLQRALINSQELGDEKIQIVTQMLELVENRARQMELHSQCFQDPAESERASDKAKMDSSQPERSSRRPRRQRTSESRDLCHMANGIEDCDDQPPKEKKSKSAKKKKRSKAKQEREASPVEFAIDPNEPTYCLCNQVSYGEMIGCDNEQCPIEWFHFSCVSLTYKPKGKWYCPKCRGDNEKTMDKSTEKTKKDRRSR

SEQ ID NO: 1031931 - protein, 280 aa, Homo sapiens; identical to SEQ ID NO: 1031930

SEQ ID NO: 1031932 - protein, 247 aa, Homo sapiens
  misc_feature (218)..(218): Xaa can be any naturally occurring amino acid
  misc_feature (243)..(243): Xaa can be any naturally occurring amino acid
MLGQQQQQLYSSAALLTGERSRLLTCYVQDYLECVESLPHDMQRNVSVLRELDNKYQETLKEIDDVYEKYKKEDDLNQKKRLQQLLQRALINSQELGDEKIQIVTQMLELVENRARQMELHSQCFQDPAESERASDKAKMDSSQPERSSRRPRRQRTSESRDLCHMANGIEDCDDQPPKEKKSKSAKKKKRSKAKQGKGKLSPVWSFALGSLLEPYIXVYWQPKCFFWGEVVRGVGPLNQCSXLDWV

SEQ ID NO: 1031933 - protein, 292 aa, Homo sapiens
CSEAMSAAFLRPAGGGGADEELPPSAVTAHAPHCWGGRAVRPTSNELRGWPCELLADLCENMDNACRLLPAVWHAPAGGPGTLDVLCGLAGTCVCAGLAQLIGTCSQNVAAIQEQVLGLGALRKLLRLLDRDACDTVRVKALFAISCLVREQEAGLLQFLRLDGFSVLMRAMQQQVQKLKVKSAFLLQNLLVGHPEHKGTLCSMGMVQQLVALVRTEHSPFHEHVLGALCSLVTDFPQGVRECREPELGLEELLRHRCQLLQQHEEYQEELEFCEKLLQTCFSSPADDSMDR

SEQ ID NO: 1031934 - protein, 267 aa, Homo sapiens
CSEAMSAAFLRPAGGGGADEELPPSAVTAHAPHCWGGRAVRPTSNELRGWPCELLADLCENMDNACRLLPAVWHAPAGGPGTLDVLCGLAGTCVCAGLAQLIGTCSQNVAAIQEQVLGLGALRKLLRLLDRDACDTVRVKALFAISCLVREQEAGLLQFLRLDGFSVLMRAMQQQVQKLKVKSAFLLQNLLVGHPEHKGTLCSMGMVQQLVALVRTEHSPFHEHVLGALCSLVTDFPQGVRECREPELGLEESFSDVRKHEAWIHVS

SEQ ID NO: 1031935 - protein, 223 aa, Homo sapiens
  misc_feature (23)..(23): Xaa can be any naturally occurring amino acid
MKMPKLSSFLDPLLWAVPGGGGXGTRWRPGQLIGTCSQNVAAIQEQVLGLGALRKLLRLLDRDACDTVRVKALFAISCLVREQEAGLLQFLRLDGFSVLMRAMQQQVQKLKVKSAFLLQNLLVGHPEHKGTLCSMGMVQQLVALVRTEHSPFHEHVLGALCSLVTDFPQGVRECREPELGLEELLRHRCQLLQQHEEYQEELEFCEKLLQTCFSSPADDSMDR

SEQ ID NO: 1031936 - protein, 223 aa, Homo sapiens; identical to SEQ ID NO: 1031935
  misc_feature (23)..(23): Xaa can be any naturally occurring amino acid

SEQ ID NO: 1031937 - protein, 178 aa, Homo sapiens
MSSFSRAPQQWATFARIWYLLDGKMQPPGKLAAMASIRLQGLHKPVYHALSDCGDHVVIMNTRHIAFSGNKWEQKVYSSHTGYPGGFRQVTAAQLHLRDPVAIVKLAIYGMLPKNLHRRTMMERLHLFPDEYIPEDILKNLVEELPQPRKIPKRLDEYTQEEIDAFPRLWTPPEDYRL

SEQ ID NO: 1031938 - protein, 183 aa, Homo sapiens
GSPGLQEYSKMSSFSRAPQQWATFARIWYLLDGKMQPPGKLAAMASIRLQGLHKPVYHALSDCGDHVVIMNTRHIAFSGNKWEQKVYSSHTGYPGGFRQVTAAQLHLRDPVAIVKLAIYGMLPKNLHRRTMMERLHLFPDEYIPEDILKNLVEELPQPRKIPKRLDGVHTRRNRRLPKIVDST

SEQ ID NO: 1031939 - protein, 156 aa, Homo sapiens
MSSFSRAPQQWATFARIWYLLDGKMQPPGKLAAMASIRLQGLHKPVYHALSDCGDHVVIMNTRHIAFSGNKWEQKVYSSHTGYPGGFRQVTAAQLHLRDPVAIVKLAIYGMLPKYIPEDILKNLVEELPQPRKIPKRLDGVHTRRNRRLPKIVDST

SEQ ID NO: 1031940 - protein, 173 aa, Homo sapiens
MSSFSRAPQQWATFARIWYLLDGKMQPPGKLAAMASIRLQGLHKPVYHALSDCGDHVVIMNTRHIAFSGNKWEQKVYSSHTGYPGGFRQVTAAQLHLRDPVAIVKLAIYGMLPKNLHRRTMMERLHLFPDEYIPEDILKNLVEELPQPRKIPKRLDGVHTRRNRRLPKIVDST

SEQ ID NO: 1031941 - protein, 173 aa, Homo sapiens; identical to SEQ ID NO: 1031940

SEQ ID NO: 1031942 - protein, 162 aa, Homo sapiens
MSSFSRAPQQWATFARIWYLLDGKMQPPGKLAAMASIRLQGLHKPVYHALSDCGDHVVIMNTRHIAFSGNKWEQKVYSSHTGYPGGFRQVTAAQLHLRDPVAIVKLAIYGMLPKNLHRRTMMERLHLFPDEYIPEDILKNLVEELPQPRKIPKRLDGNQDCI

SEQ ID NO: 1031943 - protein, 149 aa, Homo sapiens
MQPPGKLAAMASIRLQGLHKPVYHALSDCGDHVVIMNTRHIAFSGNKWEQKVYSSHTGYPGGFRQVTAAQLHLRDPVAIVKLAIYGMLPKNLHRRTMMERLHLFPDEYIPEDILKNLVEELPQPRKIPKRLDGVHTRRNRRLPKIVDST

SEQ ID NO: 1031944 - protein, 173 aa, Homo sapiens; identical to SEQ ID NO: 1031940

SEQ ID NO: 1031945 - protein, 107 aa, Homo sapiens
GSPGLQEYSKMSSFSRAPQQWATFARIWYLLDGKMQPPGKLAAMASIRLQGLHKPVYHALSDCGDHVVIMNTRHIAFVTFHLFPQVHLKYLEQLFCFLEPDFAHSSP

SEQ ID NO: 1031946 - protein, 109 aa, Homo sapiens
GGISGSLRLGRLEIMSSVGFPQFFHQARYFGSYSLNNCIICSFHDEIAAVEKTGGNSRKREKPTSARRARNCPAWVLAFPAGPVRLSDPAWLLGEGRTVLLVEEYVEFL

SEQ ID NO: 1031947 - protein, 173 aa, Homo sapiens; identical to SEQ ID NO: 1031940

SEQ ID NO: 1031948 - protein, 158 aa, Homo sapiens
MSSFSRAPQQWATFARIWYLLDGKMQPPGKLAAMASIRLQGLHKPVYHALSDCGDHVVIMNTRHIAFSGNKWEQKVYSSHTGYPGGFRQVTAAQLHLRDPVAIVKLAIYGMLPKNLHRRTMMERLHLFPDEYIPEDILKNLVEELPQPRKIPKRLDGI

SEQ ID NO: 1031949 - protein, 213 aa, Homo sapiens
MSSFSRAPQVSSDSYGLMGFIILAEGERWFRQIKYEAGAAGKPRPSAKRQWATFARIWYLLDGKMQPPGKLAAMASIRLQGLHKPVYHALSDCGDHVVIMNTRHIAFSGNKWEQKVYSSHTGYPGGFRQVTAAQLHLRDPVAIVKLAIYGMLPKNLHRRTMMERLHLFPDEYIPEDILKNLVEELPQPRKIPKRLDGVHTRRNRRLPKIVDST

SEQ ID NO: 1031950 - protein, 178 aa, Homo sapiens; identical to SEQ ID NO: 1031937

SEQ ID NO: 1031951 - protein, 147 aa, Homo sapiens
LTLSLYIPLPCFKKNSVHVSPEMLCDCGDHVVIMNTRHIAFSGNKWEQKVYSSHTGYPGGFRQVTAAQLHLRDPVAIVKLAIYGMLPKNLHRRTMMERLHLFPDEYIPEDILKNLVEELPQPRKIPKRLDGVHTRRNRRLPKIVDST

SEQ ID NO: 1031952 - protein, 178 aa, Homo sapiens; identical to SEQ ID NO: 1031937

SEQ ID NO: 1031953 - protein, 173 aa, Homo sapiens; identical to SEQ ID NO: 1031940

SEQ ID NO: 1031954 - protein, 154 aa, Homo sapiens
MSSFSRAPQQWATFARIWYLLDGKMQPPGKLAAMASIRLQGLHKPVYHALSDCGDHVVIMNTRHIAFSGNKWEQKVYSSHTGYPGGFRQVTAAQLHLRDPVAIVKLAIYGMLPKNLHRRTMMERLHLFPDDLKIIGYKRIRIAENNSEVIETFF

SEQ ID NO: 1031955 - protein, 246 aa, Homo sapiens
PSAPGFLLQQAWVTLSLGLSAAILVPRSLHKMPGEATETVPATEQELPQPQAETGSGTESDSDESVPELEEQDSTQATTQQAQLAAAAEIDEEPVSKAKQSRSEKKARKAMSKLGLRQVTGVTRVTIRKSKNILFVITKPDVYKSPASDTYIVFGEAKIEDLSQQAQLAAAEKFKVQGEAVSNIQENTQTPTVQEESEEEEVDETGVEVKDIELVMSQANVSRAKAVRALKNNSNDIVNAIMELTM

SEQ ID NO: 1031956 - protein, 333 aa, Homo sapiens
SSGIIAHSAHYGLGHSKYFLCLLAVYPQPILAFFRAKPPRGLRVKDELEALLGHRVPTRPWASGQNGVCGWCPGKSRVEGLRGGPRIRACRDGSSCSVEGGRGVRLVLGTASQDPEKEMPGEATETVPATEQELPQPQAETGSGTESDSDESVPELEEQDSTQATTQQAQLAAAAEIDEEPVSKAKQSRSEKKARKAMSKLGLRQVTGVTRVTIRKSKNILFVITKPDVYKSPASDTYIVFGEAKIEDLSQQAQLAAAEKFKVQGEAVSNIQENTQTPTVQEESEEEEVDETGVEVKDIELVMSQANVSRAKAVRALKNNSNDIVNAIMELTM

SEQ ID NO: 1031957 - protein, 215 aa, Homo sapiens
MPGEATETVPATEQELPQPQAETGSGTESDSDESVPELEEQDSTQATTQQAQLAAAAEIDEEPVSKAKQSRSEKKARKAMSKLGLRQVTGVTRVTIRKSKNILFVITKPDVYKSPASDTYIVFGEAKIEDLSQQAQLAAAEKFKVQGEAVSNIQENTQTPTVQEESEEEEVDETGVEVKDIELVMSQANVSRAKAVRALKNNSNDIVNAIMELTM

SEQ ID NO: 1031958 - protein, 207 aa, Homo sapiens
  misc_feature (1)..(1): Xaa can be any naturally occurring amino acid
XYSTGCYCVHMIGKKGSSRSLIGDESVPELEEQDSTQATTQQAQLAAAAEIDEEPVSKAKQSRSEKKARKAMSKLGLRQVTGVTRVTIRKSKNILFVITKPDVYKSPASDTYIVFGEAKIEDLSQQAQLAAAEKFKVQGEAVSNIQENTQTPTVQEESEEEEVDETGVEVKDIELVMSQANVSRAKAVRALKNNSNDIVNAIMELTM

SEQ ID NO: 1031959 - protein, 134 aa, Homo sapiens
PSAPGFLLQQAWVTLSLGLSAAILVPRSLHKMPGEATETVPATEQELPQPQAETGSGTESDSDESVPELEEQDSTQATTQQAQLAAAAEIDEEPVSKAKQSRSEKKARKAMSKLGLRQVTGVTRVTIRSRISGS

SEQ ID NO: 1031960 - protein, 208 aa, Homo sapiens
MSYYAINAHPSSLCIAHPGIPTHYGELICTQVTYVLAGHAAANWMNEPVKYSQIPTQSDMRPERYGTAMSNIWRLRAGYYGTLTSRSSIRKSKNILFVITKPDVYKSPASDTYIVFGEAKIEDLSQQAQLAAAEKFKVQGEAVSNIQENTQTPTVQEESEEEEVDETGVEVKDIELVMSQANVSRAKAVRALKNNSNDIVNAIMELTM

SEQ ID NO: 1031961 - protein, 113 aa, Homo sapiens
MSGEEEREEVKFNNAFWGGGDDGGGDVAAEKFKVQGEAVSNIQENTQTPTVQEESEEEEVDETGVEVKDIELVMSQANVSRAKAVRALKNTSIDMVNADNGIPWYPFEIYPFE

SEQ ID NO: 1031962 - protein, 246 aa, Homo sapiens; identical to SEQ ID NO: 1031955

SEQ ID NO: 1031963 - protein, 136 aa, Homo sapiens
MSKLGLRQVTGVTRVTIRKSKNILFVITKPDVYKSPASDTYIVFGEAKIEDLSQQAQLAAAEKFKVQGEAVSNIQENTQTPTVQEESEEEEVDETGVEVKDIELVMSQANVSRAKAVRALKNNSNDIVNAIMELTM

SEQ ID NO: 1031964 - protein, 293 aa, Homo sapiens
PSAPGFLLQQAWVTLSLGLSAAILVPRSLHKMPGEATETVPATEQELPQPQAETGSGTESDSDESVPELEEQDSTQATTQQAQLAAAAEIDEEPVSKAKQSRSEKKARKAMSKLGLRQVTGVTRVTIRKSKNILFVITKPDVYKSPASDTYIVFGEAKIEDLSQQAQLAAAEKFKVQGEAVSNIQENTQTPTVQEESEEEEVDETGVEVKDIELVMSHSHTLLLDEQKRTPPDAPAHETNSLTDYLLTLSTYCDTYTTPANPLLRNATLFSFWLLIQQRSLHWHPSGFLHNFC

SEQ ID NO: 1031965 - protein, 243 aa, Homo sapiens
MIAQSQRNREHKNNNTRKRKKARSRRESDHPIKKRDTRQTHYNKHDTYQPRERRGHAGAGEKDGEDRRGADERERHKKRKPRKGARGGGRKAGEPNNRTADPEARKDEGEWMSIPINSKVIYDRRDKRGNSEREERQDRKEKKETERTEQNRKEKRLAHANRNRNIKKDKSNGKQGEQQGERRKGRKQTTTGKNRRHSNRYKPEKEQDEGNTKDGRATRENARAGGKERTMQKATDNKERKQQ

SEQ ID NO: 1031966 - protein, 1135 aa, Homo sapiens
MHQMNAKMHFRFVFALLIVSFNHDVLGKNLKYRIYEEQRVGSVIARLSEDVADVLLKLPNPSTVRFRAMQRGNSPLLVVNEDNGEISIGATIDREQLCQKNLNCSIEFDVITLPTEHLQLFHIEVEVLDINDNSPQFSRSLIPIEISESAAVGTRIPLDSAFDPDVGENSLHTYSLSANDFFNIEVRTRTDGAKYAELIVVRELDRELKSSYELQLTASDMGVPQRSGSSILKISISDSNDNSPAFEQQSYIIQLLENSPVGTLLLDLNATDPDEGANGKIVYSFSSHVSPKIMETFKIDSERGHLTLFKQVDYEITKSYEIDVQAQDLGPNSIPAHCKIIIKVVDVNDNKPEININLMSPGKEEISYIFEGDPIDTFVALVRVQDKDSGLNGEIVCKLHGHGHFKLQKTYENNYLILTNATLDREKRSEYSLTVIAEDRGTPSLSTVKHFTVQINDINDNPPHFQRSRYEFVISENNSPGAYITTVTATDPDLGENGQVTYTILESFILGSSITTYVTIDPSNGAIYALRIFDHEEVSQITFVVEARDGGSPKQLVSNTTVVLTIIDENDNVPVVIGPALRNNTAEITIPKGAESGFHVTRIRAIDRDSGVNAELSCAIVAGNEENIFIIDPRSCDIHTNVSMDSVPYTEWELSVIIQDKGNPQLHTKVLLKCMIFEYAESVTSTAMTSVSQASLDVSMIIIISLGAICAVLLVIMVLFATRCNREKKDTRSYNCRVAESTYQHHPKRPSRQIHKGDITLVPTINGTLPIRSHHRSSPSSSPTLERGQMGSRQSHNSHQSLNSLVTISSNHVPENFSLELTHATPAVEQVSQLLSMLHQGQYQPRPSFRGNKYSRSYRYALQDMDKFSLKDSGRGDSEAGDSDYDLGRDSPIDRLLGEGFSDLFLTDGRIPAAMRLCTEECRVLGHSDQCWMPPLPSPSSDYRSNMFIPGEEFPTQPQQQHPHQSLEDDAQPADSGEKKKSFSTFGKDSPNDEDTGDTSTSSLLSEMSSVFQRLLPPSLDTYSECSEVDRSNSLERRKGPLPAKTVGYPQGVAAWAASTHFQNPTTNCGPPLGTHSSVQPSSKWLPAMEEIPENYEEDDFDNVLNHLNDGKHELMDASELVAEINKLLQDVRQS

SEQ ID NO: 1031967 - protein, 1135 aa, Homo sapiens; identical to SEQ ID NO: 1031966

SEQ ID NO: 1031968 - protein, 1135 aa, Homo sapiens; identical to SEQ ID NO: 1031966

SEQ ID NO: 1031969 - protein, 90 aa, Homo sapiens
ERSGDRYDHDDEVERGSRRVVKLDRVILRVRAAAMVTRFLGPRYRELVKNWVPTAYTWGAVGAWGWFGLIDWLLILDWVPYINGKFKKDN

SEQ ID NO: 1031970 - protein, 109 aa, Homo sapiens
RPSEILSPKKKKKKATEANESAWEWSLWGIPVRVTQVMSLPKPWSLLPPAGLVNYHISVKCSNQFKLEVCLLKSDNKVVDNQAGTQGQLKVLGANLWWPYLMHEHHARR

SEQ ID NO: 1031971 - protein, 131 aa, Homo sapiens
NACRASPGLVNYHISVKCSNQFKLEVCLLKSDNKVVDNQAGTQGQLKVLGANLWWPYLMHEHPAYLYSWEDGDCSHQSLGPLPACDLCDQLHLRSRQGGSVCGCDPCEQLLLLVSQLRAPGVDSAAAGRPV

SEQ ID NO: 1031972 - protein, 140 aa, Homo sapiens
MDRSNPVKPALDYFSNRLVNYHISVKCSNQFKLEVCLLKSDNKVVDNQAGTQGQLKVLGANLWWPYLMHEHPAYLYSWEDGDCSHQSLGPLPACDLCDQLHLRSRQGGSVCGCDPCEQLLLLVSQLRAPGVDSAAAGRPV

SEQ ID NO: 1031973 - protein, 188 aa, Homo sapiens
MVIAHTKALDPSQPVTFVTNSTYAADKGALYVDVIRVNSYYSWYRNYGHLELIQLQLAAQFENGVRHHNPIIQSAYGVETLVGFHQSFPGNSDEVFQQNERVNQEEDDIRSRRYNRGDNLQDACEERSLDPRMIIGQVVHNASRPEDFQGNSFKEVKMMDDSSKMKMDQPQWLTPVIPVTLWEAEAGG

SEQ ID NO: 1031974 - protein, 151 aa, Homo sapiens
ETERDSFSKKKKEKATEANESAWEWSLWGIPVRVTQVMSLPKPWSLLPPAGLVNYHISVKCSNQFKLEVCLLKSDNKVVDNQAGTQGQLKVLGANLWWPYLMHEHPAYLYSWEVMVVWDLLKGGLLLPSGSPGFSRSPGQVNGQVWSFELF

SEQ ID NO: 1031975 - protein, 131 aa, Homo sapiens; identical to SEQ ID NO: 1031971

SEQ ID NO: 1031976 - protein, 174 aa, Homo sapiens
ETERDSFSKKKKEKATEANESAWEWSLWGIPVRVTQVMSLPKPWSLLPPAGLVNYHISVKCSNQFKLEVCLLKSDNKVVDNQAGTQGQLKVLGANLWWPYLMHEHPAYLYSWEDGDCSHQSLGPLPACDLCDQLHLRSRQGGSVCGCDPCEQLLLLVSQLRAPGVDSAAAGRPV

SEQ ID NO: 1031977 - protein, 188 aa, Homo sapiens; identical to SEQ ID NO: 1031973

SEQ ID NO: 1031978 - protein, 452 aa, Homo sapiens
MQARALLLAALAALALAREPPAAPCPARCDVSRCPSPRCPGGYVPDLCNCCLVCAASEGEPCGGPLDSPCGESLECVRGLCRCRWSHAVCGTDGHTYANVCALQAASRRALQLSGTPVRQLQKGACPLGLHQLSSPRYKFNFIADVVEKIAPAVVHIELFLRHPLFGRNVPLSSGSGFIMSEAGLIITNAHVVSSNSAAPGRQQLKVQLQNGDSYEATIKDIDKKSDIATIKIHPKKKLPVLLLGHSADLRVGSLWWPSESLRPTEHSDNGIVALPSGGQGAGPPGLRHGLHTRRMPSSNYGNSGGPLVNLDGEVIGINTLKVTAGISFAIPSDRITRFLTEFQDKQIKDCKKRFIGIRMRTITPSLVDELKASNPDFPEVSSGIYVQEVAPNSPSQRGGIQDGDIIVKVNGRPLVDSSELQEAVLTESPLLLEVRRGNDDLLFSIAPEVVM

SEQ ID NO: 1031979 - protein, 357 aa, Homo sapiens
MQARALLLAALAALALAREPPAAPCPARCDVSRCPSPRCPGGYVPDLCNCCLVCAASEGEPCGGPLDSPCGESLECVRGLCRCRWSHAVCGTDGHTYANVCALQAASRRALQLSGTPVRQLQKGACPLGLHQLSSPRYKFNFIADVVEKIAPAVVHIELFLRHPLFGRNVPLSSGSGFIMSEAGLIITNAHVVSSNSAAPGRQQLKVQLQNGDSYEATIKDIDKKSDIATIKIHPKKKLPVLLLGHSADLRRGEFVVAIGSPFALQNTVTTGIVSTAQREGRELGLRDSDMDYIQTDAIINYGNSGGPLVNLDGEVIGINTLKVTAGISFAIPSDRITRFLTEFQDKQIKAPSLAVH

SEQ ID NO: 1031980 - protein, 452 aa, Homo sapiens; identical to SEQ ID NO: 1031978

SEQ ID NO: 1031981 - protein, 453 aa, Homo sapiens
MQARALLLAALAALALAREPPAAPCPARCDVSRCPSPRCPGGYVPDLCNCCLVCAASEGEPCGGPLDSPCGESLECVRGLCRCRWSHAVCGTDGHTYANVCALQAASRRALQLSGTPVRQLQKGACPLGLHQLSSPRYKFNFIADVVEKIAPAVVHIELFLRHPLFGRNVPLSSGSGFIMSEAGLIITNAHVVSSNSAAPGRQQLKVQLQNGDSYEATIKDIDKKSDIATIKIHPKKKLPVLLLGHSADLRRGEFVVAIGSPFALQNTVTTGIVSTAQREGRELGLRDSDMDYIQTDAIINYGNSGGPLVNLDGEVIGINTLKVTAGISFAIPSDRITRFLTEFQDKQIKDWKKRFIGIRMRTITPSLVDELKASNPDFPEVSSGIYVQEVAPNSPSQRGGIQDGDIIVKVNGRPLVDSSELQEAVLTESPLLLEVRRGNDDLLFSIAPEVVM

SEQ ID NO: 1031982 - protein, 280 aa, Homo sapiens
MQARALLLAALAALALAREPPAAPCPARCDVSRCPSPRCPGGYVPDLCNCCLVCAASEGEPCGGPLDSPCGESLECVRGLCRCRWSHAVCGTDGHTYANVCALQAASRRALQLSGTPVRQLQKGACPLGLHQLSSPRYKFNFIADVVEKIAPAVVHIELFLRHPLFGRNVPLSSGSGFIMSEAGLIITNAHVVSSNSAAPGRQQLKVQLQNGDSYEATIKDIDKKSDIATIKIHPKKKLPVLLLGHSADLRRGEFVVAIGSPFASLLASLFLLRQDPPGA

SEQ ID NO: 1031983 - protein, 357 aa, Homo sapiens; identical to SEQ ID NO: 1031979

SEQ ID NO: 1031984 - protein, 452 aa, Homo sapiens; identical to SEQ ID NO: 1031978

SEQ ID NO: 1031985 - protein, 498 aa, Homo sapiens
MSILASNQFQGTQPSSLHPLRSSSHGSQPSVRTPLPNLHPGLVSTPISPQLVNQQLVMAQLLNQQYAVNRLLAQQSLNQQYLNHPPPVSRSMNKPLEQQVSTNTEVSSEIYQWVRDELKRAGISQAVFARVAFNRTQGLLSEILRKEEDPKTASQSLLVNLRAMQNFLQLPEAERDRIYQDERERSLNAASAMGPAPLISTPPSRPPQVKTATIATERNGKPENNTMNINASIYDEIQQEMKRAKVSQALFAKVAATKSQGWLCELLRWKEDPSPENRTLWENLSMIRRFLSLPQPERDAIYEQESNAVHHHGDRPPHIIHVPAEQIQQQQQQQQQQQQQQQAPPPPQPQQQPQTGPRLPPRQPTVASPAESDEENRQKTRPRTKISVEALGILQSFIQDVGLYPDEEAIQTLSAQLDLPKYTIIKFFQNQRYYLKHHGKLKDNSGLEVDVAEYKEEELLKDLEESVQDKNTNTLFSVKLEEELSVEGNTDINTDLKD

SEQ ID NO: 1031986 - protein, 480 aa, Homo sapiens
MSILASNQFQGTQPSSLHPLRSSSHGSQPSVRTPLPNLHPGLVSTPISPQLVNQQLVMAQLLNQQYAVNRLLAQQSLNQQYLNHPPPVSRSMNKPLEQQVSTNTEVSSEIYQWVRDELKRAGISQAVFARVAFNRTQGLLSEILRKEEDPKTASQSLLVNLRAMQNFLQLPEAERDRIYQDERERSLNAASAMGPAPLISTPPSRPPQVKTATIATERNGKPENNTMNINASIYDEIQQEMKRAKVSQALFAKVAATKSQGWLCELLRWKEDPSPAQPERDAIYEQESNAVHHHGDRPPHIIHVPAEQIQQQQQQQQQQQQQQQAPPPPQPQQQPQTGPRLPPRQPTVASPAESDEENRQKTRPRTKISVEALGILQSFIQDVGLYPDEEAIQTLSAQLDLPKYTIIKFFQNQRYYLKHHGKLKDNSGLEVDVAEYKEEELLKDLEESVQDKNTNTLFSVKLEEELSVEGNTDINTDLKD

SEQ ID NO: 1031987 - protein, 217 aa, Homo sapiens
  misc_feature (6)..(8): Xaa can be any naturally occurring amino acid
  misc_feature (10)..(10): Xaa can be any naturally occurring amino acid
NRRPHXXXLXALYDLTISTPTLAESNAVHHHGDRPPHIIHVPAEQIQQQQQQQQQQQQQQQAPPPPQPQQQPQTGPRLPPRQPTVASPAESDEENRQKTRPRTKISVEALGILQSFIQDVGLYPDEEAIQTLSAQLDLPKYTIIKFFQNQRYYLKHHGKLKDNSGLEVDVAEYKEEELLKDLEESVQDKNTNTLFSVKLEEELSVEGNTDINTDLKD

SEQ ID NO: 1031988 - protein, 142 aa, Homo sapiens
MSILASNQFQGTQPSSLHPLRSSSHGSQPSVRTPLPNLHPGLVSTPISPQLVNQQLVMAQLLNQQYAVNRLLAQQSLNQQYLNHPPPVSRSMNKPLEQQVSTNTEVSSEIYQWVRDELKRAGISQAVFARVAFNRTQVSCVS

SEQ ID NO: 1031989 - protein, 498 aa, Homo sapiens; identical to SEQ ID NO: 1031985

SEQ ID NO: 1031990 - protein, 268 aa, Homo sapiens
MSILASNQFQGTQPSSLHPLRSSSHGSQPSVRTPLPNLHPGLVSTPISPQLVNLSMIRSFLSLPQPERDAIYEQESNAVHHHGDRPPHIIHVPAEQIQQQQQQQQQQQQQQQAPPPPQPQQQPQTGPRLPPRQPTVASPAESDEENRQKTRPRTKISVEALGILQSFIQDVGLYPDEEAIQTLSAQLDLPKYTIIKFFQNQRYYLKHHGKLKDNSGLEVDVAEYKEEELLKDLEESVQDKNTNTLFSVKLEEELSVEGNTDINTDLKD

SEQ ID NO: 1031991 - protein, 498 aa, Homo sapiens; identical to SEQ ID NO: 1031985

SEQ ID NO: 1031992 - protein, 253 aa, Homo sapiens
MTTEMGEARHVRTLSSERCPRLLASCAVVLWVCHTLPCFCSHWEAHSWLTSPSQGPTWEPGSLDCPGHRFQGPPLLSSEPRGILLLKNTYGIPICAGQCPKHLDYIREEHRPHPCPHAAYVFWRKVETQVLGFRAPPAGGCAVRSGREGKCTAACEPYQPRRMPLPLSTTLGLLHPLASVSSHLSKNEGAPWGPGPCARGNQAAFQTSGAEADYEGRLELGDTAHSLSGQIRSPGPLTQACHLERGKRERGFS

SEQ ID NO: 1031993 - protein, 161 aa, Homo sapiens
  misc_feature (6)..(6): Xaa can be any naturally occurring amino acid
  misc_feature (23)..(24): Xaa can be any naturally occurring amino acid
  misc_feature (31)..(31): Xaa can be any naturally occurring amino acid
  misc_feature (33)..(34): Xaa can be any naturally occurring amino acid
  misc_feature (45)..(45): Xaa can be any naturally occurring amino acid
  misc_feature (47)..(47): Xaa can be any naturally occurring amino acid
GQSLPXSPGVKRPIENRKLILPXXTRNETEXYXXKIRDQKGGLRXNXIILNVLKRPDLPRINPSFTYYQIQEKTSTCPASRNLTHRQSIFGQLMGSFSNQDKSSLSPKLLEIIAGSMLALFITQPLAREISKSMTVKVSETASPQVTYAGPNTWFQEILLL

SEQ ID NO: 1031994 - protein, 218 aa, Homo sapiens
MVLQLFAHVPYNHNNHHPPPNPPHTPTPQTTTPTTQHPHAHTHSTAQSTQNEQASTTVARQPGAHRSAERTSEDTDDQGEGDATRPQHQRRNSTMHPPTRHTRKERQRKPTEGTRRASNTNERGGGPRENETTRKNNKTRKEKDSSRRRNRHQQTGRNETREAADETPARAEAEEGATHPTDRHRTNDSTQQNALTTTPNTDAPDNAEPQAEATTQRA

SEQ ID NO: 1031995 - protein, 198 aa, Homo sapiens
MLAGVVVSCQESLQTSGASCSCCACSWTATSARRSGRAPRPCTDQCSRTWLPRPYIRLAGVLTHLPAPGPSISAPGKTSKGTGSGQPRAPGFKQEVNRLRELEEAKHQGQRRPHADQPDEARACPCHRPDPSPLCKSLPLPPPRPPLLSARDGPLCLAHPSAAPPSHLLFPKASVSIALVSLGLSPPHPPSSVSLSLM

SEQ ID NO: 1031996 - protein, 226 aa, Homo sapiens
WGWIWAQQFAGTAGQESLMAKLLGSVSPTSCSGGPMEQEQKHTLEKLNLKDRTYSIEVITAVLAQPAPGPHEALISQAIPGLCALATLPGATAKASAELDHKACYLCHSLLMLAGVVVSCQDITPDQWGELQLLCMQLDRHISTQIRESPQAMHRTNAQGPGYPDLTSVWQELLTHLPAPGPVFQPLERHLKGQGQGNPGLLASAGSEQAQGTGGSEASRPEEATC

SEQ ID NO: 1031997 - protein, 131 aa, Homo sapiens
SRGSPNACAAPPIFLQDIKKPDCDDWESGLNAMECALHLEKNVNQSLLELHKLATDKNDPHLCDFMRRSSPRVVGVSCFNSAWTEPGARSPPRPAAHSQPSVTSSPHPRTAPRPPPPLQRRAATAAAAASP

SEQ ID NO: 1031998 - protein, 134 aa, Homo sapiens
EHVITLMNLLTSTWAFSFTISSNPNSSDLENPSDAMECALHLEKNVNQSLLELHKLATDKNDPHLCDFMRRSSPRVVGVSCFNSAWTEPGARSPPRPAAHSQPSVTSSPHPRTAPRPPPPLQRRAATAAAAASP

SEQ ID NO: 1031999 - protein, 134 aa, Homo sapiens; identical to SEQ ID NO: 1031998

SEQ ID NO: 1032000 - protein, 134 aa, Homo sapiens; identical to SEQ ID NO: 1031998

SEQ ID NO: 1032001 - protein, 134 aa, Homo sapiens; identical to SEQ ID NO: 1031998

SEQ ID NO: 1032002 - protein, 72 aa, Homo sapiens
SRGSPNACAAPPIFLQDIKKPDCDDWESGLNAMECALHLEKNVNQSLLELHKLATDKNDPHLCDFIETHLPE

SEQ ID NO: 1032003 - protein, 134 aa, Homo sapiens; identical to SEQ ID NO: 1031998

SEQ ID NO: 1032004 - protein, 102 aa, Homo sapiens
LGAGPPIVLCSPAGVWHARCLVVGDYMMYLPGWSPCWGGPPTAFGAPLIWPPVVDCGGCCSSLESVSPRLLFLRCCVAPPPLCFCVYPHHGIIMAFGVYARV

SEQ ID NO: 1032005 - protein, 72 aa, Homo sapiens; identical to SEQ ID NO: 1032002

SEQ ID NO: 1032006 - protein, 79 aa, Homo sapiens
MRRGNHAEKLMKLQNQRGGRIFSDTEPDCMTGERLMHECHTLEKCDQYYWTAQLALQNAPFVYSLAIPIGGKHQIGHVH

SEQ ID NO: 1032007 - protein, 134 aa, Homo sapiens; identical to SEQ ID NO: 1031998

SEQ ID NO: 1032008 - protein, 156 aa, Homo sapiens
  misc_feature (11)..(11): Xaa can be any naturally occurring amino acid
  misc_feature (13)..(13): Xaa can be any naturally occurring amino acid
  misc_feature (16)..(16): Xaa can be any naturally occurring amino acid
  misc_feature (24)..(25): Xaa can be any naturally occurring amino acid
REHAPDIRTYXAXGQXTPQGCELXXDAYIRPSTSWWIDERIAVCSQAGDRARPPAAHSSLVTLTTSEPKPAAPAPRSHRRRRRLSLVAAMTTASTSQVRQNYHQDSEAAINRQINLELYASYVYLSMSYYFDRDDVALKNFAKYFLHQSHEEREPC

SEQ ID NO: 1032009 - protein, 134 aa, Homo sapiens; identical to SEQ ID NO: 1031998

SEQ ID NO: 1032010 - protein, 134 aa, Homo sapiens; identical to SEQ ID NO: 1031998

SEQ ID NO: 1032011 - protein, 89 aa, Homo sapiens
MNAGYDTKTAARHTDSTQQLRRNESDSQRTELAAAHTTEKYTVGEQPHTSEDGETRQPEDTTEVGNPSNETNTNLTKHKPKTATAERQQ

SEQ ID NO: 1032012 - protein, 134 aa, Homo sapiens; identical to SEQ ID NO: 1031998

SEQ ID NO: 1032013 - protein, 134 aa, Homo sapiens; identical to SEQ ID NO: 1031998

SEQ ID NO: 1032014 - protein, 72 aa, Homo sapiens; identical to SEQ ID NO: 1032002

SEQ ID NO: 1032015 - protein, 72 aa, Homo sapiens; identical to SEQ ID NO: 1032002

SEQ ID NO: 1032016 - protein, 128 aa, Homo sapiens
MRRGNHAEKLMKLQNQRGGQPAFSHLPSRRAEGAGSGTETAEPLAAREEGCVLSRHRICPPLDGSSATMCRPAQEVTLGASRRWSGIQDRGSFSGEAYLSCVAADGSKTLFSHQCLLACFLSYLNSHL

SEQ ID NO: 1032017 - protein, 68 aa, Homo sapiens
  misc_feature (16)..(16): Xaa can be any naturally occurring amino acid
CPGGGIYFRYGTPLTXGFQEEPITFGPAKTELGKRPNLAWRNISLTSTPWETVIMKAKPRANFPIAVG

SEQ ID NO: 1032018 - protein, 230 aa, Homo sapiens
GTCYHTHESANLNVGIFLHDIHNPNWSDLENPWDAMECALHLEKNVNQSLLELHKLATDKNDPHLCDFMRRSSPRVVGVSCFNSAWTEPGARSPPRPAAHSQPSVTSSPHPRTAPRPPRTDLIQAPGQPPDGGRRRLLLILHAHDSTAVLPSARLRTQKTEPRQVIVQDVSADSDSAQYLQAGRHLTAPPYDFPWSSGRIPNVMHPSTDVALKNFAKYFLHQSHEEREPC

SEQ ID NO: 1032019 - protein, 134 aa, Homo sapiens; identical to SEQ ID NO: 1031998

SEQ ID NO: 1032020 - protein, 134 aa, Homo sapiens; identical to SEQ ID NO: 1031998

SEQ ID NO: 1032021 - protein, 552 aa, Homo sapiens
TFYTIRWHLLPSEEDPALQELESNFLIQQKLVEAAKKLANEPDLCKTVKKKRKQDYTDAMKKLQEIENAINEYRIRCGKKPSQKATVLPEDIIPSESSSLSDTTTYDDPSDAFTFPGQRSSSVPHSPRILPPKSLGIERIHFRKSSINEQFVDTRQSREMLSTHSSPYKTLERRPQGGRSMPTTPVLTRNAYSSSHLEPESSSQHCRQRSGSLESQSHLLSEMDSDKPFFSLSKSQRSSSTEILDDGSSYTSQSSTEYYCVTPVTGPYYTTQTLDTRTRGRRRSKKQNVSTSNSGSMPNLAQKDSLRNGVYSKSQEPPSSSYYIAGYTPYAECDFYYSGGYVYENDTEGQYSVNPSYRSSAHYGYERQRDYSRSFHEDEVDRVPHNPYATLRLPRKAAAKSEHITKNIHKALVAEHLRGWYQRASGQKDQGHSPQTSFDSDRGSQRCLGFAGLQVPCSPSSRASLYSSVSSTNASGNWRTQLTIGLSDYETPAHSSYTSCYGNVYNPLPSPSRQYTEISQLDGTDGNQLEDNLESSEQRLFWHEDSKPGTLV

SEQ ID NO: 1032022 - protein, 552 aa, Homo sapiens; identical to SEQ ID NO: 1032021

SEQ ID NO: 1032023 - protein, 552 aa, Homo sapiens; identical to SEQ ID NO: 1032021

SEQ ID NO: 1032024 - protein, 552 aa, Homo sapiens; identical to SEQ ID NO: 1032021

SEQ ID NO: 1032025 - protein, 435 aa, Homo sapiens
MSQDGASQFQEVIRQELELSVKKELEKILTTASSHEFEHTKKDLDGFRKLFHRFLQEKGPSVDWGKIQRPPEDSIQPYEKIKARGLPDNISSVLNKLVVVKLNGGLGTSMGCKGPKSLIGVRNENTFLDLTVQQIEHLNKTYNTDVPLVLMNSFNTDEDTKKILQKYNHCRVKIYTFNQSRYPRINKESLLPVAKDVSYSGENTEAWYPPGHGDIYASFYNSGLLDTFIGEGKEYIFVSNIDNLGATVDLYILNHLMNPPNGKRCEFVMEVTNKTRADVKGGTLTQYEGKLRLVEIAQVPKAHVDEFKSVSKFKIFNTNNLWISLAAVKRLQEQNAIDMEIIVNAKTLDGGLNVIQLETAVGAAIKSFENSLGINVPRSRFLPVKTTSDLLLVMSNLYSLNAGSLTMSEKREFPTGALVKLGSSFTKVPRLSKKI

SEQ ID NO: 1032026 - protein, 476 aa, Homo sapiens
MSRFVQDLSKAMSQDGASQFQEVIRQELELSVKKELEKILTTASSHEFEHTKKDLDGFRKLFHRFLQEKGPSVDWGKIQRPPEDSIQPYEKIKARGLPDNISSVLNKLVVVKLNGGLGTSMGCKGPKSLIGVRNENTFLDLTVQQIEHLNKTYNTDVPLVLMNSFNTDEDTKKILQKYNHCRVKIYTFNQSRYPRINKESLLPVAKDVSYSGENTEAWYPPGHGDIYASFYNSGLLDTFIGEGKEYIFVSNIDNLGATVDLYILNHLMNPPNGKRCEFVMEVTNKTRADVKGGTLTQYEGKLRLVEIAQVPKAHVDEFKSVSKFKIFNTNNLWISLAAVKRLQEQNAIDMEIIVNAKTLDGGLNVIQLETAVGAAIKSFENSLGINVPRSRFLPVKTTSDLLLVMSNLYSLNAGSLTMSEKREFPTGALVKLGSSLRRFHDYLRRFDSLPDMLELGSPHSSGRCELGHNGALKEGY

SEQ ID NO: 1032027 - protein, 435 aa, Homo sapiens; identical to SEQ ID NO: 1032025

SEQ ID NO: 1032028 - protein, 417 aa, Homo sapiens
MSQDGASQFQEVIRQELELSVKKELEKILTTASSHEFEHTKKDLDGFRKLFHRFLQEKGPSVDWGKIQRPPEDSIQPYEKIKARGLPDNISSVLNKLVVVKLNGGLGTSMGCKGPKSLIGVRNENTFLDLTVQQIEHLNKTYNTDVPLVLMNSFNTDEDTKKILQKYNHCRVKIYTFNQSRYPRINKESLLPVAKDVSYSGDNSGLLDTFIGEGKEYIFVSNIDNLGATVDLYILNHLMNPPNGKRCEFVMEVTNKTRADVKGGTLTQYEGKLRLVEIAQVPKAHVDEFKSVSKFKIFNTNNLWISLAAVKRLQEQNAIDMEIIVNAKTLDGGLNVIQLETAVGAAIKSFENSLGINVPRSRFLPVKTTSDLLLVMSNLYSLNAGSLTMSEKREFPTGALVKLGSSFTKVPRLSKKI

SEQ ID NO: 1032029 - protein, 561 aa, Homo sapiens
MSQDGASQFQEVIRQELELSVKKELEKILTTASSHEFEHTKKDLDGFRKLFHRFLQEKGPSVDWGKIQRPPEDSIQPYEKIKARGLPDNISSVLNKLVVVKLNGGLGTSMGCKGPKSLIGVRNENTFLDLTVQQIEHLNKTYNTDVPLVLMNSFNTDEDTKKILQKYNHCRVKIYTFNQSRYPRINKESLLPVAKDVSYSGENTEAWYPPGHGDIYASFYNSGLLDTFIGEGKEYIFVSNIDNLGATVDLYILNHLMNPPNGKRCEFVMEVTNKTRADVKGGTLTQYEGKLRLVEIAQVPKAHVDEFKSVSKFKIFNTNNLWISLAAVKRLQEQNAIDMEIIVNAKTLDGGLNVIQLETAVGAAIKSFENSLGINVPRSRFLPVKTTSDLLLVMSNLYSLNAGSLTMSEKREFPTGALVKLGSSLRRFHDYLRRFDSLPDMLELGSPHSSGRCELGHNGALKEGYNIAILVANDIHLEQEGDEDGSGSSHLDTGLKIWDLNRESLQEPSGSKRGIICRPRVKKSRGIAKQGHLENKTREHGGINHLATAKNGLAGVHQPHG

SEQ ID NO: 1032030 - protein, 417 aa, Homo sapiens
MSQDGASQFQEVIRQELELSVKKELEKILTTASSHEFEHTKKDLDGFRKLFHRFLQEKGPSVDWGKIQRPPEDSIQPYEKIKARGLPDNISSVLNKLVVVKLNGGLGTSMGCKGPKSLIGVRNENTFLDLTVQQIEHLNKTYNTDVPLVLMNSFNTDEDTKSRYPRINKESLLPVAKDVSYSGENTEAWYPPGHGDIYASFYNSGLLDTFIGEGKEYIFVSNIDNLGATVDLYILNHLMNPPNGKRCEFVMEVTNKTRADVKGGTLTQYEGKLRLVEIAQVPKAHVDEFKSVSKFKIFNTNNLWISLAAVKRLQEQNAIDMEIIVNAKTLDGGLNVIQLETAVGAAIKSFENSLGINVPRSRFLPVKTTSDLLLVMSNLYSLNAGSLTMSEKREFPTGALVKLGSSFTKVPRLSKKI

SEQ ID NO: 1032031 - protein, 473 aa, Homo sapiens
LFCCWVTFCLLVTFLLLFLAPGIVPGPPVILNEDLSKAMSQDGASQFQEVIRQELELSVKKELEKILTTASSHEFEHTKKDLDGFRKLFHRFLQEKGPSVDWGKIQRPPEDSIQPYEKIKARGLPDNISSVLNKLVVVKLNGGLGTSMGCKGPKSLIGVRNENTFLDLTVQQIEHLNKTYNTDVPLVLMNSFNTDEDTKKILQKYNHCRVKIYTFNQSRYPRINKESLLPVAKDVSYSGENTEAWYPPGHGDIYASFYNSGLLDTFIGEGKEYIFVSNIDNLGATVDLYILNHLMNPPNGKRCEFVMEVTNKTRADVKGGTLTQYEGKLRLVEIAQVPKAHVDEFKSVSKFKIFNTNNLWISLAAVKRLQEQNAIDMEIIVNAKTLDGGLNVIQLETAVGAAIKSFENSLGINVPRSRFLPVKTTSDLLLVMSNLYSLNAGSLTMSEKREFPTGALVKLGSSFTKVPRLSKKI

SEQ ID NO: 1032032 - protein, 435 aa, Homo sapiens; identical to SEQ ID NO: 1032025

SEQ ID NO: 1032033 - protein, 428 aa, Homo sapiens
MSRFVQDLSKAMSQDGASQFQEVIRQELELSVKKELEKILTTASSHEFEHTKKDLDGFRKLFHRFLQEKGPSVDWGKIQRPPEDSIQPYEKIKARGLPDNISSVLNKLVVVKLNGGLGTSMGCKGPKSLIGVRNENTFLDLTVQQIEHLNKTYNTDVPLVLMNSFNTDEDTKSRYPRINKESLLPVAKDVSYSGENTEAWYPPGHGDIYASFYNSGLLDTFIGEGKEYIFVSNIDNLGATVDLYILNHLMNPPNGKRCEFVMEVTNKTRADVKGGTLTQYEGKLRLVEIAQVPKAHVDEFKSVSKFKIFNTNNLWISLAAVKRLQEQNAIDMEIIVNAKTLDGGLNVIQLETAVGAAIKSFENSLGINVPRSRFLPVKTTSDLLLVMSNLYSLNAGSLTMSEKREFPTGALVKLGSSFTKVPRLSKKI

SEQ ID NO: 1032034 - protein, 503 aa, Homo sapiens
MSRFVQDLSKAMSQDGASQFQEVIRQELELSVKKELEKILTTASSHEFEHTGFCHIAEAGLKTPELKRSAGLSLPKCWDYRHAPTTPSLYELLGCEKVLLPPCPNGHTKKDLDGFRKLFHRFLQEKGPSVDWGKIQRPPEDSIQPYEKIKARGLPDNISSVLNKLVVVKLNGGLGTSMGCKGPKSLIGVRNENTFLDLTVQQIEHLNKTYNTDVPLVLMNSFNTDEDTKKILQKYNHCRVKIYTFNQSRYPRINKESLLPVAKDVSYSGENTEAWYPPGHGDIYASFYNSGLLDTFIGEGKEYIFVSNIDNLGATVDLYILNHLMNPPNGKRCEFVMEVTNKTRADVKGGTLTQYEGKLRLVEIAQVPKAHVDEFKSVSKFKIFNTNNLWISLAAVKRLQEQNAIDMEIIVNAKTLDGGLNVIQLETAVGAAIKSFENSLGINVPRSRFLPVKTTSDLLLVMSNLYSLNAGSLTMSEKREFPTGALVKLGSSFTKVPRLSKKI

SEQ ID NO: 1032035 - protein, 428 aa, Homo sapiens
MSRFVQDLSKAMSQDGASQFQEVIRQELELSVKKELEKILTTASSHEFEHTKKDLDGFRKLFHRFLQEKGPSVDWGKIQRPPEDSIQPYVVVVKLNGGLGTSMGCKGPKSLIGVRNENTFLDLTVQQIEHLNKTYNTDVPLVLMNSFNTDEDTKKILQKYNHCRVKIYTFNQSRYPRINKESLLPVAKDVSYSGENTEAWYPPGHGDIYASFYNSGLLDTFIGEGKEYIFVSNIDNLGATVDLYILNHLMNPPNGKRCEFVMEVTNKTRADVKGGTLTQYEGKLRLVEIAQVPKAHVDEFKSVSKFKIFNTNNLWISLAAVKRLQEQNAIDMEIIVNAKTLDGGLNVIQLETAVGAAIKSFENSLGINVPRSRFLPVKTTSDLLLVMSNLYSLNAGSLTMSEKREFPTGALVKLGSSFTKVPRLSKKI

SEQ ID NO: 1032036 - protein, 561 aa, Homo sapiens
MSQDGASQFQEVIRQELELSVKKELEKILTKDHHLNVEHTKKDLDGFRKLFHRFLQEKGPSVDWGKIQRPPEDSIQPYEKIKARGLPDNISSVLNKLVVVKLNGGLGTSMGCKGPKSLIGVRNENTFLDLTVQQIEHLNKTYNTDVPLVLMNSFNTDEDTKKILQKYNHCRVKIYTFNQSRYPRINKESLLPVAKDVSYSGENTEAWYPPGHGDIYASFYNSGLLDTFIGEGKEYIFVSNIDNLGATVDLYILNHLMNPPNGKRCEFVMEVTNKTRADVKGGTLTQYEGKLRLVEIAQVPKAHVDEFKSVSKFKIFNTNNLWISLAAVKRLQEQNAIDMEIIVNAKTLDGGLNVIQLETAVGAAIKSFENSLGINVPRSRFLPVKTTSDLLLVMSNLYSLNAGSLTMSEKREFPTGALVKLGSSLRRFHDYLRRFDSLPDMLELGSPHSSGRCELGHNGALKEGYNIAILVANDIHLEQEGDEDGSGSSHLDTGLKIWDLNRESLQEPSGSKRGIICRPRVKKSRGIAKQGHLENKTREHGGINHLATAKNGLAGVHQPHG

SEQ ID NO: 1032037 - protein, 326 aa, Homo sapiens
MGCKGPKSLIGVRNENTFLDLTVQQIEHLNKTYNTDVPLVLMNSFNTDEDTKKILQKYNHCRVKIYTFNQSRYPRINKESLLPVAKDVSYSGENTEAWYPPGHGDIYASFYNSGLLDTFIGEGKEYIFVSNIDNLGATVDLYILNHLMNPPNGKRCEFVMEVTNKTRADVKGGTLTQYEGKLRLVEIAQVPKAHVDEFKSVSKFKIFNTNNLWISLAAVKRLQEQNAIDMEIIVNAKTLDGGLNVIQLETAVGAAIKSFENSLGINVPRSRFLPVKTTSDLLLVMSNLYSLNAGSLTMSEKREFPTGALVKLGSSFTKVPRLSKKI

SEQ ID NO: 1032038 - protein, 246 aa, Homo sapiens
  misc_feature (226)..(226): Xaa can be any naturally occurring amino acid
  misc_feature (230)..(230): Xaa can be any naturally occurring amino acid
  misc_feature (232)..(232): Xaa can be any naturally occurring amino acid
LFCCWVTFCLLVTFLLLFLAPGIVPGPPVILNEDLSKAMSQDGASQFQEVIRQELELSVKKELEKILTTASSHEFEHTKKDLDGFRKLFHRFLQEKGPSVDWGKIQRPPEDSIQPYEKIKARGLPDNISSVLNKLVVVKLNGGLGTSMGCKGPKSLIGVRNENTFLDLTVQQIEHLNKTYNTDVPLVLMNSFNTDEDTKKILQKYNHCRVKIYTFNQKASSLKNSXPALXNXRFQRSKKLFWGNKF

SEQ ID NO: 1032039 - protein, 371 aa, Homo sapiens
MSQDGASQFQEVIRQELELSVKKELEKILTTASSHEFEHTKKDLDGFRKLFHRFLQEKGPSVDWGKIQRPPEDSIQPYEKIKARGLPDNISSVLNKLVVVKLNGGLGTSMGCKGPKSLIGVRNENTFLDLTVQQIEHLNKTYNTDVPLVLMNSFNTDEDTKKILQKYNHCRVKIYTFNQSRYPRINKESLLPVAKDVSYSGENTEAWYPPGHGDIYASFYNSGLLDTFIGEGKEYIFVSNIDNLGATVDLYILNHLMNPPNGKRCEFVMEVTNKTRADVKGGTLTQYEGKLRLVEIAQVPKAHVDEFKSVSKFKIFNTNNLWISLAAVKRLQEQNAIDMEIIVNAKTLDGGLNVIQLETAWYVWLAIHRGL

SEQ ID NO: 1032040 - protein, 296 aa, Homo sapiens
MSQDGASQFQEVIRQELELSVKKELEKILTTASSHEFEHTKKDLDGFRKLFHRFLQEKGPSVDWGKIQRPPEDSIQPYEKIKARGLPDNISSVLNKLVVVKLNGGLGTSMGCKGPKSLIGVRNENTFLDLTVQQIEHLNKTYNTDVPLVLMNSFNTDEDTKKILQKYNHCRVKIYTFNQSRYPRINKESLLPVAKDVSYSGENTEAWYPPGHGDIYASFYNSGLLDTFIGEGKEYIFVSNIDNLGATVDLYILNHLMNPPNGKRCEFVMEVTNKTRADVKVNTERKQFRASCFHIS

SEQ ID NO: 1032041 - protein, 428 aa, Homo sapiens
MSRFVQDLSKAMSQDGASQFQEVIRQELELSVKKELEKILTTASSHEFEHTKKDLDGFRKLFHRFLQEKGPSVDWGKIQRPPEDSIQPYEKIKARGLPDNISSVLNKLVVVKLNGGLGTSMGCKGPKSLIGVRNENTFLDLTVQQIEHLNKTYNTDVPLVLMNSFNTDEDTKKILQKYNHCRVKIYTFNQSRYPRINKESLLPVAKDVSYSGDNSGLLDTFIGEGKEYIFVSNIDNLGATVDLYILNHLMNPPNGKRCEFVMEVTNKTRADVKGGTLTQYEGKLRLVEIAQVPKAHVDEFKSVSKFKIFNTNNLWISLAAVKRLQEQNAIDMEIIVNAKTLDGGLNVIQLETAVGAAIKSFENSLGINVPRSRFLPVKTTSDLLLVMSNLYSLNAGSLTMSEKREFPTGALVKLGSSFTKVPRLSKKI

SEQ ID NO: 1032042 - protein, 465 aa, Homo sapiens
MSQDGASQFQEVIRQELELSVKKELEKILTTASSHEFEHTKKDLDGFRKLFHRFLQEKGPSVDWGKIQRPPEDSIQPYEKIKARGLPDNISSVLNKLVVVKLNGGLGTSMGCKGPKSLIGVRNENTFLDLTVQQIEHLNKTYNTDVPLVLMNSFNTDEDTKKILQKYNHCRVKIYTFNQSRYPRINKESLLPVAKDVSYSGENTEAWYPPGHGDIYASFYNSGLLDTFIGEGKEYIFVSNIDNLGATVDLYILNHLMNPPNGKRCEFVMEVTNKTRADVKGGTLTQYEGKLRLVEIAQVPKAHVDEFKSVSKFKIFNTNNLWISLAAVKRLQEQNAIDMEIIVNAKTLDGGLNVIQLETAVGAAIKSFENSLGINVPRSRFLPVKTTSDLLLVMSNLYSLNAGSLTMSEKREFPTGALVKLGSSLRRFHDYLRRFDSLPDMLELGSPHSSGRCELGHNGALKEGY

SEQ ID NO: 1032043 - protein, 561 aa, Homo sapiens; identical to SEQ ID NO: 1032029

SEQ ID NO: 1032044 - protein, 435 aa, Homo sapiens; identical to SEQ ID NO: 1032025

SEQ ID NO: 1032045 - protein, 452 aa, Homo sapiens
MGCKGPKSLIGVRNENTFLDLTVQQIEHLNKTYNTDVPLVLMNSFNTDEDTKKILQKYNHCRVKIYTFNQSRYPRINKESLLPVAKDVSYSGENTEAWYPPGHGDIYASFYNSGLLDTFIGEGKEYIFVSNIDNLGATVDLYILNHLMNPPNGKRCEFVMEVTNKTRADVKGGTLTQYEGKLRLVEIAQVPKAHVDEFKSVSKFKIFNTNNLWISLAAVKRLQEQNAIDMEIIVNAKTLDGGLNVIQLETAVGAAIKSFENSLGINVPRSRFLPVKTTSDLLLVMSNLYSLNAGSLTMSEKREFPTGALVKLGSSLRRFHDYLRRFDSLPDMLELGSPHSSGRCELGHNGALKEGYNIAILVANDIHLEQEGDEDGSGSSHLDTGLKIWDLNRESLQEPSGSKRGIICRPRVKKSRGIAKQGHLENKTREHGGINHLATAKNGLAGVHQPHG

SEQ ID NO: 1032046 - protein, 326 aa, Homo sapiens; identical to SEQ ID NO: 1032037

SEQ ID NO: 1032047 - protein, 428 aa, Homo sapiens
MSRFVQDLSKAMSQDGASQFQEVIRQELELSVKKELEKILTTASSHEFEHTKKDLDGFRKLFHRFLQEKGPSVDWGKIQRPPEDSIQPYEKIKARGLPDNISSVLNKLVVVKLNGGLGTSMGCKGPQIEHLNKTYNTDVPLVLMNSFNTDEDTKKILQKYNHCRVKIYTFNQSRYPRINKESLLPVAKDVSYSGENTEAWYPPGHGDIYASFYNSGLLDTFIGEGKEYIFVSNIDNLGATVDLYILNHLMNPPNGKRCEFVMEVTNKTRADVKGGTLTQYEGKLRLVEIAQVPKAHVDEFKSVSKFKIFNTNNLWISLAAVKRLQEQNAIDMEIIVNAKTLDGGLNVIQLETAVGAAIKSFENSLGINVPRSRFLPVKTTSDLLLVMSNLYSLNAGSLTMSEKREFPTGALVKLGSSFTKVPRLSKKI

SEQ ID NO: 1032048 - protein, 179 aa, Homo sapiens
MNPPNGKRCEFVMEVTNKTRADVKGGTLTQYEGKLRLVEIAQVPKAHVDEFKSVSKFKIFNTNNLWISLAAVKRLQEQNAIDMEIIVNAKTLDGGLNVIQLETAVGAAIKSFENSLGINVPRSRFLPVKTTSDLLLVMSNLYSLNAGSLTMSEKREFPTGALVKLGSSFTKVPRLSKKI

SEQ ID NO: 1032049 - protein, 163 aa, Homo sapiens
MSRFVQDLSKAMSQDGASQFQEVIRQELELSVKKELEKILTTASSHEFEHTKKDLDGFRKLFHRFLQEKGPSVDWGKIQRPPEDSIQPYEKIKARGLPDNISSVLNKLVVVKLNGGLGTSMGCKGPKSLIGVRNENTFLDLTVQQIEHLNKTYNTDVLWLMTL

SEQ ID NO: 1032050 - protein, 173 aa, Homo sapiens
  misc_feature (60)..(60): Xaa can be any naturally occurring amino acid
  misc_feature (67)..(67): Xaa can be any naturally occurring amino acid
  misc_feature (71)..(71): Xaa can be any naturally occurring amino acid
  misc_feature (74)..(74): Xaa can be any naturally occurring amino acid
  misc_feature (76)..(76): Xaa can be any naturally occurring amino acid
  misc_feature (81)..(81): Xaa can be any naturally occurring amino acid
  misc_feature (84)..(84): Xaa can be any naturally occurring amino acid
  misc_feature (95)..(97): Xaa can be any naturally occurring amino acid
  misc_feature (99)..(99): Xaa can be any naturally occurring amino acid
  misc_feature (102)..(103): Xaa can be any naturally occurring amino acid
  misc_feature (106)..(106): Xaa can be any naturally occurring amino acid
  misc_feature (108)..(109): Xaa can be any naturally occurring amino acid
  misc_feature (117)..(117): Xaa can be any naturally occurring amino acid
  misc_feature (119)..(120): Xaa can be any naturally occurring amino acid
  misc_feature (123)..(123): Xaa can be any naturally occurring amino acid
  misc_feature (125)..(125): Xaa can be any naturally occurring amino acid
  misc_feature (132)..(133): Xaa can be any naturally occurring amino acid
  misc_feature (135)..(135): Xaa can be any naturally occurring amino acid
  misc_feature (138)..(138): Xaa can be any naturally occurring amino acid
  misc_feature (173)..(173): Xaa can be any naturally occurring amino acid
MAVMAPRTLVLLLSGALALTQTWAGSHSMRYFFTSVSRPGRGEPRFIAVGCVGGARFVRXGGGAAGXGGGXRAXGXGRGGXGGXGGGAGGGGARXXXGXGGXXGAXRXXGRGGAGSXAXXGGXGXGVGCGGXXAXRGXPGAPAAAGVASPWGGPALLGRGGRWRLEVARRGWX

SEQ ID NO: 1032051 - protein, 152 aa, Homo sapiens
MAVMAPRTLLLLLWGAVALTETWAGSHSMRYFYTAMSRPGRGEPRFIAVGYVDDTQFVRFDSDAASPRDGAAGAMDRAGGAGVLGPGDTDHARPTHRLTERTCGSLAAPLLQPERGRVSHPARGCMAATWGRTGASSAGMTSTPTTARITSP

SEQ ID NO: 1032052 - protein, 152 aa, Homo sapiens; identical to SEQ ID NO: 1032051

SEQ ID NO: 1032053 - protein, 152 aa, Homo sapiens; identical to SEQ ID NO: 1032051

SEQ ID NO: 1032054 - protein, 152 aa, Homo sapiens; identical to SEQ ID NO: 1032051

SEQ ID NO: 1032055 - protein, 152 aa, Homo sapiens; identical to SEQ ID NO: 1032051

SEQ ID NO: 1032056 - protein, 152 aa, Homo sapiens; identical to SEQ ID NO: 1032051

SEQ ID NO: 1032057 - protein, 152 aa, Homo sapiens; identical to SEQ ID NO: 1032051

SEQ ID NO: 1032058 - protein, 152 aa, Homo sapiens; identical to SEQ ID NO: 1032051

SEQ ID NO: 1032059 - protein, 152 aa, Homo sapiens; identical to SEQ ID NO: 1032051

SEQ ID NO: 1032060 - protein, 247 aa, Homo sapiens
MYGCDVGPDGRLLRGYDQYAYDGKDYIALNEDLSSWTAADTAAQITQRKWEAARVAEQLRAYLEGTVRGVAPQIPGEREGDAAARGPPKDTCDPQPTLISDHEVTLRCWALGFYPAEITLTWQRDGEDQTQDTELVETRPAGDGTFQKWAAVVVPSGEEQRYTCHVQHEGLPEPLTLRWEPSSQPTIPIVGIVAGLAVLAVLAVLGAVVAVVMCRRKSSGGKGGSCSQAASSNSAQGSDESLIACKA

SEQ ID NO: 1032061 - protein, 152 aa, Homo sapiens; identical to SEQ ID NO: 1032051

SEQ ID NO: 1032062 - protein, 159 aa, Homo sapiens
MYGCDVGPDGRLLRGYDQYAYDGKDYIALNEDLSSWTAADTAAQITQRKWEAARVAEQLRAYLEGTVRGVAPQIPGEREGDAAARGPPKDTCDPQPTSSQPTIPIVGIVAGLAVLAVVVIGAVVATVMCRRKSSGGKGGSCSQAASSNSAQGSDVSLTA

SEQ ID NO: 1032063 - protein, 250 aa, Homo sapiens
MYGCDVGPDGRLLRGYDQYAYDGKDYIALNEDLSSWTAADTAAQITQRKWEAARVAEQLRAYLEGTVRGVAPQIPGEREGDAAAHGRPQNAYDSPPLTHHPVSDHEATLRCWALGFYPAEITLTWQRDGEDQTQDTELVETRPAGDGTFQKWAAVVVPSGEEQRYTCHVQHEGLPEPLTLRWEPSSQPTIPIVGIVAGLAVLAVLAVLGAVVAVVMCRRKSSGGKGGSCSQAASSNSAQGSDESLIACKA

SEQ ID NO: 1032064 - protein, 158 aa, Homo sapiens
MYGCDVGPDGRLLRGYDQYAYDGKDYIALNEDLSSWTAADTAAQITQRKWEAARVAEQLRAYLEGTVRGVAPQIPGEREGDAAARGPPKTHVTQHLTHHPVSDHEATLRCWALGFYPAEITLTWQRDGEDQTQDTELVETRPAGDRTFQWASLLAWLS

SEQ ID NO: 1032065 - protein, 275 aa, Homo sapiens
MYGCDVGPDGRLLRGYDQYAYDGKDYIALNEDLSSWTAADTAAQITQRKWEAARVAEQLRAYLEGTVRGVAPQIPGEREGDAAAHGRPQNAYDSPPLTHHPVSDHEATLRCWALGFYPAEITLTWQRDGEDQTQDTELVETRPAGDGTFQKWAAVVVPSGQEQRYTCHVQHEGLPKPLTLRWEPSSQPTIPIVGIVAGLAVLSLWSCDHWSCGRCCDVDGGSMLFDFLIWYGSVLSVLQAVTVPRALICLSQLVKCETAALCGTERQELFLPFPL

SEQ ID NO: 1032066 - protein, 202 aa, Homo sapiens
MYGCDVGPDGRLLRGYDQYAYDGKDYIALNEDLSSWTAADTAAQITQRKWEAARVAEQLRAYLEGTVRGVAPQIPGEREGDAAARGPPKTHVTQHLTHHPVSDHEATLRCWALGFYPAEITLTWQRDGEDQTQDTELVETDPGDKLQKWPCGGSGRAGSLPVRLGLPASPGGPSARPGLVPAPPDPALFNLGGYFGPAFRTC

SEQ ID NO: 1032067 - protein, 152 aa, Homo sapiens; identical to SEQ ID NO: 1032051

SEQ ID NO: 1032068 - protein, 152 aa, Homo sapiens; identical to SEQ ID NO: 1032051

SEQ ID NO: 1032069 - protein, 152 aa, Homo sapiens; identical to SEQ ID NO: 1032051

SEQ ID NO: 1032070 - protein, 152 aa, Homo sapiens; identical to SEQ ID NO: 1032051

SEQ ID NO: 1032071 - protein, 152 aa, Homo sapiens; identical to SEQ ID NO: 1032051

SEQ ID NO: 1032072 - protein, 152 aa, Homo sapiens; identical to SEQ ID NO: 1032051

SEQ ID NO: 1032073 - protein, 152 aa, Homo sapiens; identical to SEQ ID NO: 1032051

SEQ ID NO: 1032074 - protein, 152 aa, Homo sapiens; identical to SEQ ID NO: 1032051

SEQ ID NO: 1032075 - protein, 152 aa, Homo sapiens; identical to SEQ ID NO: 1032051

SEQ ID NO: 1032076 - protein, 249 aa, Homo sapiens
MYGCDVGPDGRLLRGYDQYAYDGKDYIALNEDLSSWTAADTAAQITQRKWEAARVAEQLRAYLEGTVRGVAPQIPGEREGDAAARGPPKTHVTQHLTHHPVSDHEATLRCWALGFYPAEITLTWQRDGEDQTQDTELVETRPAGDGTFQKWAAVVVPSGEEQRYTCHVQHEGLPEPLTLRWEPSSQPTIPIVGIVAGLAVLAVLAVLGAVVAVVMCRRKSSGGKGGSCSQAASSNSAQGSDESLIACKA

SEQ ID NO: 1032077 - protein, 245 aa, Homo sapiens
MYGCDVGPDGRLLRGYDQYAYDGKDYIALNEDLSSWTAADTAAQITQRKWEAARVAEQLRAYLEGTVRGVAPQIPGEREGDAAARGPPKTHVTQHPISDHEVTLRCWALGFYPAEITLTWQRDGEDQTQDTELVETRPAGDRTFQKWAAVVVPSGEEQRYTCHVQHEGLPEPLTLRWEPSSQPTIPIVGIVAGLAVLAVLAVLGAVVAVVMCRRKSSGGKGGSCSQAASSNSAQGSDESLIACKA

SEQ ID NO: 1032078 - protein, 113 aa, Homo sapiens
SCWSSLRGFLPEPLLSLVNHTGQRSDMQKVTLGLLVFLAGFPVLDANDLEDKNSPFYYDWHSLQVGGLICAGVLCAMGIIIVMSAKCKCKFGQKSGHHPGETPPLITPGSAQS

SEQ ID NO: 1032079 - protein, 193 aa, Homo sapiens
ALVPYKVLPEGPEAVGGRLCFRSPARGFRCQAPGCVLHAPAGRSLRASVLLQPHASSCMWRLAPAAARRVRAFALNCSWRGAYTRFPCERVLLGASCRDYLLPDVHDSVLYRLCLQPLPLRAGPAAAAPETPEPAECVEFTAEPAGMQDIVVAMTAVGGSICVMLVVICLLVAYITENLMRPALARPGLRRHP

SEQ ID NO: 1032080 - protein, 69 aa, Homo sapiens
DRPEEGGGVKCKINVLGNPPPACGPTCCRPGPRAEVAFCDDRLVTLDTRRVMALPSPPGAPGTDHLDLT

SEQ ID NO: 1032081 - protein, 115 aa, Homo sapiens
MAGPCGSGRPCPSKSHGHSGSPRTSILCRIVPDRPSPLLGHCALQAWGAALQACPAPPHPTGLRLASCLSISGPLQEPTPSAVQGGSVALRLAGLSMHLASVPLETPSPSSAAEA

SEQ ID NO: 1032082 - protein, 421 aa, Homo sapiens
HASTNDSFEIRPAPKPVMETIPLGDLQARALASLRANSRNSFMVIPKSKASGAPPPEGRQSVELPKGDLGPASPSQELGSQPVPGGDGAPALGKSPLEVEAQWAVEEGACPRTATALADRAIRWQRPSSPPPFLPAASEEAEPAEGLRVPGLAKNSREYVRPGLPVTFIDEVDSEEAPQAAKLPYLPHPARPLHPARPGCVAELQPRGSNTFTVVPKRKPGLCRTSTSVRPTGSLGHEEAEEEEASCLLGPTLKKRYPTVHEIEVIGGYLACRSPAQQGWLLKKEDEDLFNDKSLQTTFEYPSESSLEQEEEVDQQEEEEEEEEEEEEEEEGSGSEEKPFALFLPRATFVSSVRPESSRLPEGSSGLSSYTPKHSVAFSKWQEQALEQAPREAEPPPVEAMLTPASQNDLSDFRSEPALYF

SEQ ID NO: 1032083 - protein, 379 aa, Homo sapiens
MKLSLLRASGAPPPEGRQSVELPKGDLGPASPSQELGSQPVPGGDGAPALGKSPLEVEAQWAVEEGACPRTATALADRAIRWQRPSSPPPFLPAASEEAEPAEGLRVPGLAKNSREYVRPGLPVTFIDEVDSEEAPQAAKLPYLPHPARPLHPARPGCVAELQPRGSNTFTVVPKRKPGLCRTSTSVRPTGSLGHEEAEEEEASCLLGPTLKKRYPTVHEIEVIGGYLACRSPAQQGWLLKKEDEDLFNDKSLQTTFEYPSESSLEQEEEVDQQEEEEEEEEEEEEEEEGSGSEEKPFALFLPRATFVSSVRPESSRLPEGSSGLSSYTPKHSVAFSKWQEQALEQAPREAEPPPVEAMLTPASQNDLSDFRSEPALYF

SEQ ID NO: 1032084 - protein, 379 aa, Homo sapiens; identical to SEQ ID NO: 1032083

SEQ ID NO: 1032085 - protein, 483 aa, Homo sapiens
MGQKSSSGIRVCLTGQLGVSGSCSQMSPATPILSPSPFPLPSLCSASQALCWAGQSRCAQRGSGPPMTSSTRSARSGRGSGRSTRMGAKGPTSQGSGTACTTSSSSSSTQACAWATRPRPSASAAAGTSLKQRASAKAVCRASTLRRTSATFSWAPAGRPRTLDSRASTVPCSSWVRLRDSTSVSSSAWLRRRLSGGRWPHSPHSSCTFPGRAGAVGVTPHCMWSISSSVSCSWARCPGHGVCSASVSPQSARRPGGGSVLTGSRGAQSSPAVSSDPPPNPLQGLQPQPPVPRALPPSWAGSDATSSSDFSSTTSTAWLTERFSSTLQRRPLRARSTTPVTLLATTSLAEVTTVSEELLEKGKLLFQLVQAPAGEAVHSGQLGLQVLEQRLGVVQGTGGQAAHAVLSQAAGGAQQRVPVLGCTVNIADRGARGPDQGQSHHTLHHVLLVLLPHTGSGDLSRLFFRHRAANRVTWARAASDTSC

SEQ ID NO: 1032086 - protein, 686 aa, Homo sapiens
RGCSGARAAMAAGGGGSCDPLAPAGVPCAFSPHSQAYFALASTDGHLRVWETANNRLHQEYVPSAHLSGTCTCLAWAPARLQAKESPQRKKRKSEAVGMSNQTDLLALGTAVGSILLYSTVKGELHSKLISGGHDNRVNCIQWHQDSGCLYSCSDDKHIVEWNVQTCKVKCKWKGDNSSVSSLCISPDGKMLLSAGRTIKLWVLETKEVYRHFTGHATPVSSLMFTTIRPPNESQPFDGITGLYFLSGAVHDRLLNVWQVRSENKEKSAVMSFTVTDEPVYIDLTLSENKEEPVKLAVVCRDGQVHLFEHILNGYCKKPLTSNCTIQIATPGKGKKSTPKPIPILAAGFCSDKMSLLLVYGSWFQPTIERVALNSREPHMCLVRDISNCWAPKVETAITKVRTPVMNSEAKVLVPGIPGHHAAIKPAPPQTEQVESKRKSGGNEVSIEERLGAMDIDTHKKGKEDLQTNSFPVLLTQGLESNDFEMLNKVLQTRNVNLIKKTVLRMPLHTIIPLLQELTKRLQGHPNSAVLMVQWLKCVLTVHASYLSTLPDLVPQLGTLYQLMESRVKTFQKLSHLHGKLILLITQVTASEKTKGATSPGQKAKLVYEEESSEEESDDEIADKDSEDNWDEDEEESESEKDEDVEEEDEDAEGKDEENGEDRDTASEKELNGDSDLDPENESEEE

SEQ ID NO: 1032087 - protein, 616 aa, Homo sapiens
NSPCIMEVPEYQGLIFLERKKRKSEAVGMSNQTDLLALGTAVGSILLYSTVKGELHSKLISGGHDNRVNCIQWHQDSGCLYSCSDDKHIVEWNVQTCKVKCKWKGDNSSVSSLCISPDGKMLLSAGRTIKLWVLETKEVYRHFTGHATPVSSLMFTTIRPPNESQPFDGITGLYFLSGAVHDRLLNVWQVRSENKEKSAVMSFTVTDEPVYIDLTLSENKEEPVKLAVVCRDGQVHLFEHILNGYCKKPLTSNCTIQIATPGKGKKSTPKPIPILAAGFCSDKMSLLLVYGSWFQPTIERVALNSREPHMCLVRDISNCWAPKVETAITKVRTPVMNSEAKVLVPGIPGHHAAIKPAPPQTEQVESKRKSGGNEVSIEERLGAMDIDTHKKGKEDLQTNSFPVLLTQGLESNDFEMLNKVLQTRNVNLIKKTVLRMPLHTIIPLLQELTKRLQGHPNSAVLMVQWLKCVLTVHASYLSTLPDLVPQLGTLYQLMESRVKTFQKLSHLHGKLILLITQVTASEKTKGATSPGQKAKLVYEEESSEEESDDEIADKDSEDNWDEDEEESESEKDEDVEEEDEDAEGKDEENGEDRDTASEKELNGDSDLDPENESEEE

SEQ ID NO: 1032088 - protein, 686 aa, Homo sapiens; identical to SEQ ID NO: 1032086

SEQ ID NO: 1032089 - protein, 656 aa, Homo sapiens
RGCSGARAAMAAGGGGSCDPLAPAGVPCAFSPHSQAYFALASTDGHLRVWETANNRLHQEYVPSAHLSGTCTCLAWAPARLQAKESPQRKKRKSEAVGMSNQTDLLALGTAVGSILLYSTVKGELHSKLISGGHDNRVNCIQWHQDSGCLYSCSDDKHIVEWNVQTCKVKCKWKGDNSSVSSLCISPDGKMLLSAGRTIKLWVLETKEVYRHFTGHATPVSSLMFTTIRPPNESQPFDGITGLYFLSGAVHDRLLNVWQVRSENKEKSAVMSFTVTDEPVYIDLTLSENKEEPVKLAVVCRDGQVHLFEHILNGYCKKPLTSNCTIQIATPGKGKKSTPKPIPILAAGFCSDKMSLLLVYGSWFQPTIERVALNSREPHMCLVRDISNCWAPKVETAITKVRTPVMNSEAKVLVPGIPGHHAAIKPAPPQTEQVESKRKSGGNEVSIEERLGAMDIDTHKKGKEDLQTNSFPVLLTQGLESNDFEMLNKVLQTRNVNLIKKTVLRMPLHTIIPLLQELTKRLQGHPNSAVLMVQWLKCVLTVHASYLSTLPDLVPQLGTLYQLMESRVKTFQKLSHLHGKLILLITQVTASEKTKGATSPGQKAKLVYEEESSEEESDDEIADKDSEDNWDEDEEESESEKDEDVEEERRKYGEME

SEQ ID NO: 1032090 - protein, 491 aa, Homo sapiens
RGCSGARAAMAAGGGGSCDPLAPAGVPCAFSPHSQAYFALASTDGHLRVWETANNRLHQEYVPSAHLSGTCTCLAWAPARLQAKESPQRKKRKSEAVGMSNQTDLLALGTAVGSILLYSTVKGELHSKLISGGHDNRVNCIQWHQDSGCLYSCSDDKHIVEWNVQTCKVKCKWKGDNSSVSSLCISPDGKMLLSAGRTIKLWVLETKEVYRHFTGHATPVSSLMFTTIRPPNESQPFDGITGLYFLSGAVHDRLLNVWQVRSENKEKSAVMSFTVTDEPVYIDLTLSENKEEPVKLAVVCRDGQVHLFEHILNGYCKKPLTSNCTIQIATPGKGKKSTPKPIPILAAGFCSDKMSLLLVYGSWFQPTIERVALNSREPHMCLVRDISNCWAPKVETAITKVRTPVMNSEAKVLVPGIPGHHAAIKPAPPQTEQVESKRKSGGNEVSIEERLGAMDIDTHKKGKEDLQTNSFPVLLTQGLESNDFEMLNVSI

SEQ ID NO: 1032091 - protein, 686 aa, Homo sapiens; identical to SEQ ID NO: 1032086

SEQ ID NO: 1032092 - protein, 524 aa, Homo sapiens
MLFFSSQYSKWKGDNSSVSSLCISPDGKMLLSAGRTIKLWVLETKEVYRHFTGHATPVSSLMFTTIRPPNESQPFDGITGLYFLSGAVHDRLLNVWQVRSENKEKSAVMSFTVTDEPVYIDLTLSENKEEPVKLAVVCRDGQVHLFEHILNGYCKKPLTSNCTIQIATPGKGKKSTPKPIPILAAGFCSDKMSLLLVYGSWFQPTIERVALNSREPHMCLVRDISNCWAPKVETAITKVRTPVMNSEAKVLVPGIPGHHAAIKPAPPQTEQVESKRKSGGNEVSIEERLGAMDIDTHKKGKEDLQTNSFPVLLTQGLESNDFEMLNKVLQTRNVNLIKKTVLRMPLHTIIPLLQELTKRLQGHPNSAVLMVQWLKCVLTVHASYLSTLPDLVPQLGTLYQLMESRVKTFQKLSHLHGKLILLITQVTASEKTKGATSPGQKAKLVYEEESSEEESDDEIADKDSEDNWDEDEEESESEKDEDVEEEDEDAEGKDEENGEDRDTASEKELNGDSDLDPENESEEE

SEQ ID NO: 1032093 - protein, 530 aa, Homo sapiens
RGCSGARAAMAAGGGGSCDPLAPAGVPCAFSPHSQAYFALASTDGHLRVWETANNRLHQEYVPSAHLSGTCTCLAWAPARLQAKESPQRKKRKSEAVGMSNQTDLLALGTAVGSILLYSTVKGELHSKLISGGHDNRVNCIQWHQDSGCLYSCSDDKHIVEWNVQTCKVKCKWKGDNSSVSSLCISPDGKMLLSAGRTIKLWVLETKEVYRHFTGHATPVSSLMFTTIRPPNESQPFDGITGLYFLSGAVHDRLLNVWQVRSENKEKSAVMSFTVTDEPVYIDLTLSENKEEPVKLAVVCRDGQVHLFEHILNGYCKKPLTSNCTIQIATPGKGKKSTPKPIPILAAGFCSDKMSLLLVYGSWFQPTIERVALNSREPHMCLVRDISNCWAPKVETAITKVRTPVMNSEAKVLVPGIPGHHAAIKPAPPQTEQVESKRKSGGNEVSIEERLGAMDIDTHKKGKEDLQTNSFPVLLTQGLESNDFEMLNKVLQTRNVNLIKKTVLRMPLHTIIPLLQEVTDCFFHFSILMP

SEQ ID NO: 1032094 - protein, 129 aa, Homo sapiens
ISSEPPASASQSAGITGVSHARTAIPSNISEASCPEKEGWVERTVPAAVGLGQETGTHLRGLWRVYVHTAAGPPPPATCSSPTSPPGHPADIKSASRNVPTHEGFLGAEPGAPATSGGGLLVTSDLLSS

SEQ ID NO: 1032095 - protein, 143 aa, Homo sapiens
MRFNPASCVGAFLFLPVATEVARVRLLRRLRRRRRRECAYVASYLLACPRGQPPPPAPKDIKKILDSVGIEADDDRLNKVISELNGKNIEDVIAQGIGKLASVPAGGAVAVSAAPRLLRAPAAWGSAPACSRREKKDEKKEES

SEQ ID NO: 1032096 - protein, 133 aa, Homo sapiens
GLQEFGTSTEVARVRLLRRLRRRRRRECAYVASYLLACPRGQPPPPAPKDIKKILDSVGIEADDDRLNKVISELNGKNIEDVIAQGIGKLASVPAGGAVAVSAAPRLLRAPAAWGSAPACSRREKKDEKKEES

SEQ ID NO: 1032097 - protein, 139 aa, Homo sapiens
AHASADSALGATEVARVRLLRRTPPLRRRRRRECAYVASYLLACPRGQPPPPAPKDIKKILDSVGIEADDDRLNKVISELNGKNIEDVIAQGIGKLASVPAGGAVAVSAAPRLLRAPAAWGSAPACSRREKKDEKKEES

SEQ ID NO: 1032098 - protein, 135 aa, Homo sapiens
MLTARCGPGVESATEVARVRLLRRRRRRECAYVASYLLACPRGQPPPPAPKDIKKILDSVGIEADDDRLNKVISELNGKNIEDVIAQGIGKLASVPAGGAVAVSAAPRLLRAPAAWGSAPACSRREKKDEKKEES

SEQ ID NO: 1032099 - protein, 135 aa, Homo sapiens; identical to SEQ ID NO: 1032098

SEQ ID NO: 1032100 - protein, 215 aa, Homo sapiens
  misc_feature (30)..(30): Xaa can be any naturally occurring amino acid
RLRRTEVFCHLLWLFYEPPSSFCEQFLCPXNAHLCLQFGEFFLVHDCFFHSLFGSENYTGGPRRGTRVGAQGVSRWTTVRLWRTHAGTQATEVARVRLLRRLRRRRRRECAYVASYLLACPRGQPPPPAPKDIKKILDSVGIEADDDRLNKVISELNGKNIEDVIAQGIGKLASVPAGGAVAVSAAPRLLRAPAAWGSAPACSRREKKDEKKEES

SEQ ID NO: 1032101 - protein, 90 aa, Homo sapiens
PFLFLPVATEVARVRLLRRLRRRRRRVISELNGKNIEDVIAQGIGKLASVPAGGAVAVSAAPRLLRAPAAWGSAPACSRREKKDEKKEES

SEQ ID NO: 1032102 - protein, 194 aa, Homo sapiens
  misc_feature (30)..(30): Xaa can be any naturally occurring amino acid
RLRRTEVFCHLLWLFYEPPSSFCEQFLCPXNAHLCLQFGEFFLVHDCFFHSLFGSENYTGGPRRGTRVGAQGVSRWTTVRLWRTHAGTQATEVARVRLLRRLRRRRRRECAYVASYLLACPRGQPPPPAPKDIKKILDSVGIEADDDRLNKVISELNGTVAVSAAPRLLRAPAAWGSAPACSRREKKDEKKEES

SEQ ID NO: 1032103 - protein, 114 aa, Homo sapiens
  misc_feature (1)..(1): Xaa can be any naturally occurring amino acid
  misc_feature (3)..(3): Xaa can be any naturally occurring amino acid
  misc_feature (5)..(5): Xaa can be any naturally occurring amino acid
  misc_feature (7)..(7): Xaa can be any naturally occurring amino acid
  misc_feature (13)..(13): Xaa can be any naturally occurring amino acid
XLXLXGXGHEVNXARGLYPYPQQVSSPSAKDIKKILDSVGIEADDDRLNKVISELNGKNIEDVIAQGIGKLASVPAGGAVAVSAAPRLLRAPAAWGSAPACSRREKKDEKKEES

SEQ ID NO: 1032104 - protein, 143 aa, Homo sapiens; identical to SEQ ID NO: 1032095

SEQ ID NO: 1032105 - protein, 143 aa, Homo sapiens; identical to SEQ ID NO: 1032095

SEQ ID NO: 1032106 - protein, 133 aa, Homo sapiens; identical to SEQ ID NO: 1032096

SEQ ID NO: 1032107 - protein, 135 aa, Homo sapiens; identical to SEQ ID NO: 1032098

SEQ ID NO: 1032108 - protein, 215 aa, Homo sapiens; identical to SEQ ID NO: 1032100
  misc_feature (30)..(30): Xaa can be any naturally occurring amino acid

SEQ ID NO: 1032109 - protein, 139 aa, Homo sapiens; identical to SEQ ID NO: 1032097

SEQ ID NO: 1032110 - protein, 132 aa, Homo sapiens
AHASADSALGATEVARVRLLRRTPPECAYVASYLLACPRGQPPPPAPKDIKKILDSVGIEADDDRLNKVISELNGKNIEDVIAQGIGKLASVPAGGAVAVSAAPRLLRAPAAWGSAPACSRREKKDEKKEES

SEQ ID NO: 1032111 - protein, 143 aa, Homo sapiens; identical to SEQ ID NO: 1032095

SEQ ID NO: 1032112 - protein, 105 aa, Homo sapiens
MIILREEAPPLSFRRAITAPIFLLDSQGGGAPYYMGGRLLLYNSAETDRGDALVFYNTKLALRDCADTNRLLDKRLERTLLCGERRHTTSRSLGGGGSRDTNMCA

SEQ ID NO: 1032113 - protein, 143 aa, Homo sapiens; identical to SEQ ID NO: 1032095

SEQ ID NO: 1032114 - protein, 117 aa, Homo sapiens
MCIQQVGGDVAHRGGVCGGAAEKSHACDLGGDREEKKILDSVGIEADDDRLNKVISELNGKNIEDVIAQGIGKLASVPAGGAVAVSAAPRLLRAPAAWGSAPACSRREKKDEKKEES

SEQ ID NO: 1032115 - protein, 166 aa, Homo sapiens
MCKKALFAGEQEFNQKGQIPCHHLTLSDSFLNMIYLPPSAATRCRTSEHGMKMWARMDGYSPTSRYTGKLANTLGNSSPSAKDIKKILDSVGIEADDDRLNKVISELNGKNIEDVIAQGIGKLASVPAGGAVAVSAAPRLLRAPAAWGSAPACSRREKKDEKKEES

SEQ ID NO: 1032116 - protein, 143 aa, Homo sapiens; identical to SEQ ID NO: 1032095

SEQ ID NO: 1032117 - protein, 105 aa, Homo sapiens; identical to SEQ ID NO: 1032112

SEQ ID NO: 1032118 - protein, 105 aa, Homo sapiens; identical to SEQ ID NO: 1032112

SEQ ID NO: 1032119 - protein, 184 aa, Homo sapiens
MGEEPHYIIYGHRGRRGPRAAFIQQPPLCRKSGNNRARPHAWGANSLAGSEEGHPPYLLCAGGAAGEHYMWRTHNTLTPLYARKYIFIKRAILLEEGGHHLYNNTFLYRAALLRLAGACPIQPKQRAPHIYVPCGPRCCDEEQMFVCRLPNAASELYVDLFCGYNDHFFFLYHSRGGARVCKSA

SEQ ID NO: 1032120 - protein, 125 aa, Homo sapiens
LKREFKRRVRLLRRRRRRECAYVASYLLACPRGQPPPPAPKDIKKILDSVGIEADDDRLNKVISELNGKNIEDVIAQGIGKLASVPAGGAVAVSAAPRLLRAPAAWGSAPACSRREKKDEKKEES

SEQ ID NO: 1032121 - protein, 135 aa, Homo sapiens
  misc_feature (10)..(10): Xaa can be any naturally occurring amino acid
LRGQRNSANXSVATEVARVRLLRRRRRRECAYVASYLLACPRGQPPPPAPKDIKKILDSVGIEADDDRLNKVISELNGKNIEDVIAQGIGKLASVPAGGAVAVSAAPRLLRAPAAWGSAPACSRREKKDEKKEES

SEQ ID NO: 1032122 - protein, 215 aa, Homo sapiens; identical to SEQ ID NO: 1032100
  misc_feature (30)..(30): Xaa can be any naturally occurring amino acid

SEQ ID NO: 1032123 - protein, 97 aa, Homo sapiens
CPIQAILLPDPATCWRVRGEARFSLVGDFLDREVISELNGKNIEDVIAQGIGKLASVPAGGAVAVSAAPRLLRAPAAWGSAPACSRREKKDEKKEES

SEQ ID NO: 1032124 - protein, 132 aa, Homo sapiens; identical to SEQ ID NO: 1032110

SEQ ID NO: 1032125 - protein, 135 aa, Homo sapiens
MCIQQVGGDVAHRGGVCGGAAEKSHACDLGGDREEKKILDSVGIEADDDRLNKVISELNGKNIEDVIAQGIGKLASVPAGGGEGVWGGPGWPAPVAGSGPGAVHHKEHEVKGECGQAHDLSAVSRMLVEEEVPCL

SEQ ID NO: 1032126 - protein, 34 aa, Homo sapiens
MRNHPTENYRPGEINHAVWGNNEYARLKWQGVNI

SEQ ID NO: 1032127 - protein, 79 aa, Homo sapiens
MRSLPRAPLREETPGDTPGSGDHANKYPPCGKRADCRPCFTPLIKEAPVSFNKEKVQPPCGAEHRCDQDTNLSGDAIGR

SEQ ID NO: 1032128 - protein, 135 aa, Homo sapiens; identical to SEQ ID NO: 1032121
  misc_feature (10)..(10): Xaa can be any naturally occurring amino acid

SEQ ID NO: 1032129 - protein, 152 aa, Homo sapiens
AALYSTGQVVLHRQVVLHRQVVLHRQVVLHGNGCTLRRLRRRRRRDCAYVASYLLACPRGQPPPPAPKDIKKILDSVGIEADDDRLNKVISELNGKNIEDVIAQGIGKLASVPAGGAVAVSAAPRLLRAPAAWGSAPACSRREKKDEKKEES

SEQ ID NO: 1032130 - protein, 154 aa, Homo sapiens
MRGGRRGIFGTEAYGPSHARPQPGGPGMGRQEAAGVTPPSRPLRPPQECAYVASYLLACPRGQPPPPAPKDIKKILDSVGIEADDDRLNKVISELNGKNIEDVIAQGIGKLASVPAGGAVAVSAAPRLLRAPAAWGSAPACSRREKKDEKKEES

SEQ ID NO: 1032131 - protein, 106 aa, Homo sapiens
MGAAKSLADTLVRRRGRGSPGPGNQRPSGRKVPGRDREEWQNQVGRNYDPQKGQGASLRAPPGYKVQLPRPKGLWVLCPGGTHARSCDRGKAGNPQWTRGRKPQES

SEQ ID NO: 1032132 - protein, 185 aa, Homo sapiens
MGEEPHYIIYGHRGRRGPRAAFIQQPPLCRKSGNNRARPHAWGANSLAGSEEGHPPYLLCAGGAAGEHYMWRTHNTLTPLYARKYIFIKRAILLEEGGHHLYNNTFLYRAALLRLAGACPIQPKQRAPHIYVPCGPRCCDEEQMFVCRLPNAASELYVDLFCGVQRPLFFFISLARRRPGVQIST

SEQ ID NO: 1032133 - protein, 108 aa, Homo sapiens
MIKLLLPWRKGFVRIGKNRVLVYLSSPADLCGRFLCCGLLSDAFLAASVRYFYYPDPSTPQIPPFPSLCAVFHPPPRLPRFQFPAHDVFFTLFAPFRTPVSIAFRMFL

SEQ ID NO: 1032134 - protein, 135 aa, Homo sapiens; identical to SEQ ID NO: 1032098

SEQ ID NO: 1032135 - protein, 131 aa, Homo sapiens
MRFNPASCVGAFLFLPVATEVARVRLLRRLRRRRRRECAYVASYLLACPRGQPPPPAPKDIKKILDSVISELNGKNIEDVIAQGIGKLASVPAGGAVAVSAAPRLLQAPAAWGSAPACSRREKKDEKKEES

SEQ ID NO: 1032136 - protein, 111 aa, Homo sapiens
MRRRRSLEESDDDMGRRSSPSGKDVKKILDRVGYREQEDDDRTQQRSSDELSGKNIERQSLTRGIGKLAQVYLLVGLYPCSADPRIWKPLTAGSSPCLQAEANTDDTDGRA

SEQ ID NO: 1032137 - protein, 197 aa, Homo sapiens
AGIKPHCVDAIFSGILSAAEEWTATSLSTGIEICAIEVNKVPIISSKSPTALPIFLGEVYEFGKSMSSRYALMLLFIKKYSWSLIQSLKTNARTPAVSSRKKIIPRNTETNLRRKVFSRSAPMHPANPKMNITPPTTRKSQTGSKPPRSVMEEMLDRTPFSFHAHSPIPRNVIPKNQNMTLKPNMKYLMQQLTSGPL

SEQ ID NO: 1032138 - protein, 197 aa, Homo sapiens; identical to SEQ ID NO: 1032137

SEQ ID NO: 1032139 - protein, 197 aa, Homo sapiens; identical to SEQ ID NO: 1032137

SEQ ID NO: 1032140 - protein, 216 aa, Homo sapiens
AGIKPHCVDAIFSGILSAAEEWTATSLSTGIEICAIEVNKVPIISSKSPTALPIFLGEVYEFGKSMSSRYALMLLFIKKYSWSLIQSLKTNARTPAVSSRKKIIPRNTENTYLIPSVRRLFQASFYCLSNLRRKVFSRSAPMHPANPKMNITPPTTRKSQTGSKPPRSVMEEMLDRTPFSFHAHSPIPRNVIPKNQNMTLKPNMKYLMQQLTSGPL

SEQ ID NO: 1032141 - protein, 125 aa, Homo sapiens
MEGKVLALNLRVESVILTNLRRKVFSRSAPMHPANPKMNITPPTTRKSQTGSKPPRSVMEEMLDRTPFSFHAHSPIPRNVIPKKGSAFQLKRRACRKRYLRAITGPYTTASASYTKPEMVLTDRI

SEQ ID NO: 1032142 - protein, 320 aa, Homo sapiens
  misc_feature (291)..(291): Xaa can be any naturally occurring amino acid
MAKGRVAERSQLGAHHTTPVGDGAAGTRGLAAPGSRDHQKEKSWVEAGSARMSLLILVSIFLSAAFVMFLVYKNFPQLSEEERVNMKVPRDMDDAKALGKVLSKYKDTFYVQVLVAYFATYIFLQTFAIPGSIFLSILSGFLYPFPLALFLVCLCSGLGASFCYMLSYLVGRPVVYKYLTEKAVKWSQQVERHREHLINYIIFLRITPFLPNWFINITSPVIKKQQTQKKKQTNKTKNCVGGPRPPKKVFTAPLSLGRGGPSRKWDMGKTRSQGKPGQTQGREFSNKKTPXGGTGGLEHSQGVGASRLHRSHIVHRAGGE

SEQ ID NO: 1032143 - protein, 127 aa, Homo sapiens
MAKGRVAERSQLGAHHTTPVGDGAAGTRGLAAPGSRDHQKEKSWVEAGSARMSLLILVSIFLSAAFVMFLVYKNFPQLSEEERVNMKVPRDMDDAKALGKVLSKYKDTFYVQVLVAYFATYILYPFN

SEQ ID NO: 1032144 - protein, 291 aa, Homo sapiens
MAKGRVAERSQLGAHHTTPVGDGAAGTRGLAAPGSRDHQKEKSWVEAGSARMSLLILVSIFLSAAFVMFLVYKNFPQLSEEERVNMKVPRDMDDAKALGKVLSKYKDTFYVQVLVAYFATYIFLQTFAIPGSIFLSILSGFLYPFPLALFLVCLCSGLGASFCYMLSYLVGRPVVYKYLTEKAVKWSQQVERHREHLINYIIFLRITPFLPNWFINITSPVINVPLKVFFIGTFLGVAPPSFVAIKAGTTLYQLTTAGEAVSWNSIFILMILAVLSILPAIFQKKLKQKFE

SEQ ID NO: 1032145 - protein, 291 aa, Homo sapiens; identical to SEQ ID NO: 1032144

SEQ ID NO: 1032146 - protein, 127 aa, Homo sapiens; identical to SEQ ID NO: 1032143

SEQ ID NO: 1032147 - protein, 198 aa, Homo sapiens
MAKGRVAERSQLGAHHTTPVGDGAAGTRGLAAPGSRDHQKEKSWVEAGSARMSLLILVSIFLSAAFVMFLVYKNFPQLSEEERVNMKVPRDMDDAKALGKVLSKYKDTFYVQVLVAYFATYIFLQTFAIPGSIFLSILSGFLYPFPLALFLVCLCSGLGASFCYMLSYLVGRPVVYKYLTEKAVKWSQQCRTSFFCSH

SEQ ID NO: 1032148 - protein, 291 aa, Homo sapiens; identical to SEQ ID NO: 1032144

SEQ ID NO: 1032149 - protein, 291 aa, Homo sapiens; identical to SEQ ID NO: 1032144

SEQ ID NO: 1032150 - protein, 202 aa, Homo sapiens
MSGKLRRSGEAYSGYVSSLLLSNFIDSAKKMLPNNYARGHYTIGKEIIDLVLDRIRKLADQMHRSSEASWFSTALVGELVLGSPPLLMERLSVDYGKKSKLEFSIYPAPQVSTAVVEPYNSILTTHTTLEHSDCAFMVDNEAIYDICRRNLDIERQLYTLARYWQNVSPITVPEIDGALNVTWDSDHCAYPVILLACPFLWK

SEQ ID NO: 1032151 - protein, 192 aa, Homo sapiens
MMRDIISNTTRRARRMPQTTNTAGEEQNQTRRSDTLSWNDDHHPLCVAGRQTRRHTTPTTKYPAARRNNKPHGELEDATTPTRYLCGATENSDKRRREKKKIDGRLDEINHAQRQPEQRHENAHDHSPRPPTPTPRNTETRRSRQTPQHHQNRTPPTRQQQSTPATRTSTPTQNDRQTPPSTERPAPQAGDN

SEQ ID NO: 1032152 - protein, 205 aa, Homo sapiens
MNVRTGILPPASSTLSSSSQARKMLPITMPEGTTAIGKEIIDLVLDRIRKLADQMHRSSVASWFSTALVGELVLGSPPLLMERLSVDYGKKSKLEFSIYPAPQVSTAVVEPYNSILTTHTTLEHSDCAFMVDNEAIYDICRRNLDIERPTYTNLNRLISQIVSSITASLRFDGALNVDLTEFQTNLVPYSPHPLPSGHICPCHLC

SEQ ID NO: 1032153 - protein, 205 aa, Homo sapiens; identical to SEQ ID NO: 1032152

SEQ ID NO: 1032154 - protein, 205 aa, Homo sapiens; identical to SEQ ID NO: 1032152

SEQ ID NO: 1032155 - protein, 205 aa, Homo sapiens; identical to SEQ ID NO: 1032152

SEQ ID NO: 1032156 - protein, 205 aa, Homo sapiens; identical to SEQ ID NO: 1032152

SEQ ID NO: 1032157 - protein, 334 aa, Homo sapiens
MNVRTGILPPASSTLSSSSQARKMLPITMPEGTTAIGKEIIDLVLDRIRKLADQMHRSSEASWFSTALVGELVLGSPPLLMERLSVDYGKKSKLEFSIYPAPQVSTAVVEPYNSILTTHTTLEHSDCAFMVDNEAIYDICRRNLDIERPTYTNLNRLISQCMCVLTIYVRSAEDLSGAHECLTLDKILHRLNSARMASYSPLTISTFSLLELDYYELTLVISAEKAYHEQLSVAEITNACFEPANQMVKCDPRHGKYMACCLLYRGDVVPKDVNAAIATIKTKRTNQAQHPVCGLVPHWLQGWHQLPASHCGAWWRPGQGTESCVHAEQHHSHC

SEQ ID NO: 1032158 - protein, 205 aa, Homo sapiens; identical to SEQ ID NO: 1032152

SEQ ID NO: 1032159 - protein, 205 aa, Homo sapiens; identical to SEQ ID NO: 1032152

SEQ ID NO: 1032160 - protein, 205 aa, Homo sapiens
MNVRTGILPPASSTLSSSSQARKMLPITMPEGTTAIGKEIIDLVLDRIRKLADQMHRSSVASWFSTALVGELVLGSPPLLMERLSVDYGKKSKLEFSIYPAPQVSTAVVEPYNSILTTHTTLEHSDCAFMVDNEAIYDICRRNLDIERPTYTNLNRLIGQIVSSITASLRFDGALNVDLTEFQTNLVPYSPHPLPSGHICPCHLC

SEQ ID NO: 1032161 - protein, 205 aa, Homo sapiens; identical to SEQ ID NO: 1032160

SEQ ID NO: 1032162 - protein, 188 aa, Homo sapiens
MNVRTGILPPASSTLSSSSQARIIDLVLDRIRKLADQMHRSSVASWFSTALVGELVLGSPPLLMERLSVDYGKKSKLEFSIYPAPQVSTAVVEPYNSILTTHTTLEHSDCAFMVDNEAIYDICRRNLDIERPTYTNLNRLISQIVSSITASLRFDGALNVDLTEFQTNLVPYSPHPLPSGHICPCHLC

SEQ ID NO: 1032163 - protein, 147 aa, Homo sapiens
MVNTWLAACCTVVTWFPKMSMLPLPPSRPSVQTKRSIQFVDWCPTGFKVGINYQPPTVVPGGDLAKVQRAVCMLSNTTAIAEAWARLDHKFDLMYAKRAFVHWYVGEGMEEGEFSEAREDMAALEKDYEEVGVDSVEGEGEEEGEEY

SEQ ID NO: 1032164 - protein, 208 aa, Homo sapiens
MNVRTGILPPASSTLSSSSQARKMLPITMPDYARGHYTIGKEIIDLVLDRIRKLADQMHRSSVASWFSTALVGELVLGSPPLLMERLSVDYGKKSKLEFSIYPAPQVSTAVVEPYNSILTTHTTLEHSDCAFMVDNEAIYDICRRNLDIERPTYTNLNRLISQIVSSITASLRFDGALNVDLTEFQTNLVPYSPHPLPSGHICPCHLC

SEQ ID NO: 1032165 - protein, 182 aa, Homo sapiens
MNVRTGILPPASSTLSSSSQARKMLPITMPEGTTAIGKEWFSTALVGELVLGSPPLLMERLSVDYGKKSKLEFSIYPAPQVSTAVVEPYNSILTTHTTLEHSDCAFMVDNEAIYDICRRNLDIERPTYTNLNRLISQIVSSITASLRFDGALNVDLTEFQTNLVPYSPHPLPSGHICPCHLC

SEQ ID NO: 1032166 - protein, 147 aa, Homo sapiens; identical to SEQ ID NO: 1032163

SEQ ID NO: 1032167 - protein, 195 aa, Homo sapiens
MNVRTGILPPASSTLSSSSQARKMLPITMPEGTTAIGKEIIDLVLDRIRKLADQMHRSSVASWFSTALVGELVLGSPPLLMERLSVDYGKKSKLEFSIYPAPQVSTAVVEPYNSILTTHTTLEHSDCAFMVDNEAIYDICRRNLDIERQLYNLTRYWQNVSPITVPEIDGALNVTWDSDHCAYPVILLACPFLWK

SEQ ID NO: 1032168 - protein, 138 aa, Homo sapiens
IDLLENCSSFDVYVFPKSILHSTTSPASNQFGVVPPLPPSLQPPTTLPCVPCETLPKVQRAVCMLSNTTAIAEAWARLDHKFDLMYAKRAFVHWYVGEGMEEGEFSEAREDMAALEKDYEEVGVDSVEGEGEEEGEEY

SEQ ID NO: 1032169 - protein, 205 aa, Homo sapiens
MNVRTGILPPASSTLSSSSQARKMLPITMPEGTTAIGKEIIDLVLDRIRKLADQMHRSSEASWFSTALVGELVLGSPPLLMERLSVDYGKKSKLEFSIYPAPQVSTAVVEPYNSILTTHTTLEHSDCAFMVDNEAIYDICRRNLDIERPTYTNLNRLISQIVSSITASLRFDGALNVDLTEFQTNLVPYSPHPLPSGHICPCHLC

SEQ ID NO: 1032170 - protein, 205 aa, Homo sapiens; identical to SEQ ID NO: 1032152

SEQ ID NO: 1032171 - protein, 205 aa, Homo sapiens; identical to SEQ ID NO: 1032160

SEQ ID NO: 1032172 - protein, 205 aa, Homo sapiens; identical to SEQ ID NO: 1032152

SEQ ID NO: 1032173 - protein, 274 aa, Homo sapiens
  misc_feature (241)..(241): Xaa can be any naturally occurring amino acid
MNVRTGILPPASSTLSSSSQARKMLPITMPEGTTAIGKEIIDLVLDRIRKLADQMHRSSVASWFSTALVGELVLGSPPLLMERLSVDYGKKSKLEFSIYPAPQVSTAVVEPYNSILTTHTTLEHSDCAFMVDNEAIYDICRRNLDIERPTYTNLNRLISQIVSSITASLRFDGALNVDRSPRNFHGPEPGCRRNPRIPSIALWPTIVRPCSLVIADEYALPTEIKALTCEAMRIDEKWRMXCGRQLEHQHRLTIVDALRPMGKITIGVCLALSV

SEQ ID NO: 1032174 - protein, 205 aa, Homo sapiens; identical to SEQ ID NO: 1032152

SEQ ID NO: 1032175 - protein, 205 aa, Homo sapiens; identical to SEQ ID NO: 1032160

SEQ ID NO: 1032176 - protein, 205 aa, Homo sapiens; identical to SEQ ID NO: 1032152

SEQ ID NO: 1032177 - protein, 205 aa, Homo sapiens; identical to SEQ ID NO: 1032160

SEQ ID NO: 1032178 - protein, 290 aa, Homo sapiens
MPAGSSTAWNTASSPMARCQCDKTIGGGDDSFNTALPSTPSPSADDRAPGERTLPPGLMFCYTLSIAHQSLRLQTLSDTVCLAVSTAQASFQPHEMQSHSTGVQTARCCHTNLCPEGTTAIGKEIIDLVLDRIRKLADQMHRSSEASWFSTALVGELVLGSPPLLMERLSVDYGKKSKLEFSIYPAPQVSTAVVEPYNSILTTHTTLEHSDCAFMVDNEAIYDICRRNLDIERPTYTNLNRLISQIVSSITASLRFDGALNVDLTEFQTNLVPYSPHPLPSGHICPCHLC

SEQ ID NO: 1032179 - protein, 288 aa, Homo sapiens
MPAGSSTAWNTASSPMARCQCDKTIGGGDDSFNTPSTPFFSETGAGKHVPRGSVVVYDVCESPIEVIVTEGCVQHGDIAELWQARIPRRCRQARSRRAEGRGLAEARVSVVSLKGTTAIGKEIIDLVLDRIRKLADQMHRSSEASWFSTALVGELVLGSPPLLMERLSVDYGKKSKLEFSIYPAPQVSTAVVEPYNSILTTHTTLEHSDCAFMVDNEAIYDICRRNLDIERPTYTNLNRLIGQIVSSITASLRFDGALNVDLTEFQTNLVPYSPHPLPSGHICPCHLC

SEQ ID NO: 1032180 - protein, 147 aa, Homo sapiens
MNVRTGILPPASSTLSSSSQARKMLPITMPEGTTAIGKEIIDLVLDRIRKLADQMHRSSVASWFSTALVGELVLGSPPLLMERLSVDYGKKSKLEFSIYPAPQVSTAVVEPYNSILTTHTTLEHSDCAPTGTQLLGVVNEEKLMALL

SEQ ID NO: 1032181 - protein, 126 aa, Homo sapiens
RRRAFSLHEAKSHWYSVSGWGQGGFLFSQHLRLLRPEKLVVDQKPGVLVHPLASPPARPPRALGHRGLSPLSAYVQAEEIGPESNSGGSAVTQPNLRLWQWQGWKLVQWGCRPQVPTLPSPTEYVT

SEQ ID NO: 1032182 - protein, 77 aa, Homo sapiens
  misc_feature (22)..(22): Xaa can be any naturally occurring amino acid
GDDERQCGMVVKRVDLEPDGWXESWLRYSPTVTLGKEAGSVGLSTTGTNPALPYRVCDVAQPMTASQCFDQSQGQKF

SEQ ID NO: 1032183 - protein, 104 aa, Homo sapiens
RRRAFSLHEAKSHWYSVSGWGQGGFLFSQHLRLLRPEKLVVDQKPGVLVHPLASPPARPPRALGHRGLSPLSAYVQAEEIGPESNSGGSAVTQPNLRLWQWQGW

SEQ ID NO: 1032184 - protein, 575 aa, Homo sapiens
MATYIHVSKTGAEGAVLDEAKNINKSLSALGNVISALAEGTKTHVPYRDSKMTRILQDSLGGNCRTTIVICCSPSVFNEAETKSTLMFGQRAKTIKNTVSVNLELTAEEWKKKYEKEKEKNKTLKNVIQHLEMELNRWRNGEAVPEDEQISAKDQKNLEPCDNTPIIDNIAPVVAGISTEEKEKYDEEISSLYRQLDDKDDEINQQSQLAEKLKQQMLDQDELLASTRRDYEKIQEELTRLQIENEAAKDEVKEVLQALEELAVNYDQKSQEVEDKTRANEQLTDELAQKTTTLTTTQRELSQLQELSNHQKKRATEILNLLLKDLGEIGGIIGTNDVKTLADVNGVIEEEFTMARLYISKMKSEVKSLVNRSKQLESAQMDSNRKMNASERELAACQLLISQHEAKIKSLTDYMQNMEQKRRQLEESQDSLSEELAKLRAQEKMHEVSFQDKEKEHLTRLQDAEEMKKALEQQMESHREAHQKQLSRLRDEIEEKQKIIDEIRDLNQKLQLEQEKLSSDYDKLKIEDQEREMKLEKLLLLNDKREQAREDLKGLEETVSRELQTLHNLRKLFVQ

SEQ ID NO: 1032185 - protein, 579 aa, Homo sapiens
MWNVAVLPLQVSKTGAEGAVLDEAKNINKSLSALGNVISALAEGTKTHVPYRDSKMTRILQDSLGGNCRTTIVICCSPSVFNEAETKSTLMFGQRAKTIKNTVSVNLELTAEEWKKKYEKEKEKNKTLKNVIQHLEMELNRWRNGEAVPEDEQISAKDQKNLEPCDNTPIIDNIAPVVAGISTEEKEKYDEEISSLYRQLDDKDDEINQQSQLAEKLKQQMLDQDELLASTRRDYEKIQEELTRLQIENEAAKDEVKEVLQALEELAVNYDQKSQEVEDKTRANEQLTDELAQKTTTLTTTQRELSQLQELSNHQKKRATEILNLLLKDLGEIGGIIGTNDVKTLADVNGVIEEEFTMARLYISKMKSEVKSLVNRSKQLESAQMDSNRKMNASERELAACQLLISQHEAKIKSLTDYMQNMEQKRRQLEESQDSLSEELAKLRAQEKMHEVSFQDKEKEHLTRLQDAEEMKKALEQQMESHREAHQKQLSRLRDEIEEKQKIIDEIRDLNQKLQLEQEKLSSDYDKLKIEDQEREMKLEKLLLLNDKREQAREDLKGLEETVSRELQTLHNLRKLFVQ

SEQ ID NO: 1032186 - protein, 391 aa, Homo sapiens
MAGDLQFSTDSWCVTLSELGHARLLAEKLKQQMLDQDELLASTRRDYEKIQEELTRLQIENEAAKDEVKEVLQALEELAVNYDQKSQEVEDKTRANEQLTDELAQKTTTLTTTQRELSQLQELSNHQKKRATEILNLLLKDLGEIGGIIGTNDVKTLADVNGVIEEEFTMARLYISKMKSEVKSLVNRSKQLESAQMDSNRKMNASERELAACQLLISQHEAKIKSLTDYMQNMEQKRRQLEESQDSLSEELAKLRAQEKMHEVSFQDKEKEHLTRLQDAEEMKKALEQQMESHREAHQKQLSRLRDEIEEKQKIIDEIRDLNQKLQLEQEKLSSDYDKLKIEDQEREMKLEKLLLLNDKREQAREDLKGLEETVSRELQTLHNLRKLFVQ

SEQ ID NO: 1032187 - protein, 807 aa, Homo sapiens
MADPAECSIKVMCRFRPLNEAEILRGDKFIPKFKGDETVVIGQGKPYVFDRVLPPNTTQEQVYNACAKQIVKDVLEGYNGTIFAYGQTSSGKTHTMEGKLHDPQLMGIIPRIAHDIFDHIYSMDENLEFHIKVSYFEIYLDKIRDLLDVSKTNLAVHEDKNRVPYVKGCTERFVSSPEEVMDVIDEGKANRHVAVTNMNEHSSRSHSIFLINIKQENVETEKKLSGKLYLVDLAGSEKVSKTGAEGAVLDEAKNINKSLSALGNVISALAEGTKTHVPYRDSKMTRILQDSLGGNCRTTIVICCSPSVFNEAETKSTLMFGQRAKTIKNTVSVNLELTAEEWKKKYEKEKEKNKTLKNVIQHLEMELNRWRNGEAVPEDEQISAKDQKNLEPCDNTPIIDNIAPVVAGISTEEKEKYDEEISSLYRQLDDKDDEINQQSQLAEKLKQQMLDQDELLASTRRDYEKIQEELTRLQIENEAAKDEVKEVLQALEELAVNYDQKSQEVEDKTRANEQLTDELAQKTTTLTTTQRELSQLQELSNHQKKRATEILNLLLKDLGEIGGIIGTNDVKTLADVNGVIEEEFTMARLYISKMKSEVKSLVNRSKQLESAQMDSNRKMNASERELAACQLLISQHEAKIKSLTDYMQNMEQKRRQLEESQDSLSEELAKLRAQEKMHEVSFQDKEKEHLTRLQDAEEMKKALEQQMESHREAHQKQLSRLRDEIEEKQKIIDEIRDLNQKLQLEQEKLSSDYDKLKIEDQEREMKLEKLLLLNDKREQAREDLKGLEETVSRELQTLHNLRKLFVQ

SEQ ID NO: 1032188 - protein, 595 aa, Homo sapiens
MATYIHVSKTGAEGAVLDEAKNINKSLSALGNVISALAEGTKTHVPYRDSKMTRILQDSLGGNCRTTIVICCSPSVFNEAETKSTLMFGQRVRNQGLGAKPWIPYLRPHSQAKTIKNTVSVNLELTAEEWKKKYEKEKEKNKTLKNVIQHLEMELNRWRNGEAVPEDEQISAKDQKNLEPCDNTPIIDNIAPVVAGISTEEKEKYDEEISSLYRQLDDKDDEINQQSQLAEKLKQQMLDQDELLASTRRDYEKIQEELTRLQIENEAAKDEVKEVLQALEELAVNYDQKSQEVEDKTRANEQLTDELAQKTTTLTTTQRELSQLQELSNHQKKRATEILNLLLKDLGEIGGIIGTNDVKTLADVNGVIEEEFTMARLYISKMKSEVKSLVNRSKQLESAQMDSNRKMNASERELAACQLLISQHEAKIKSLTDYMQNMEQKRRQLEESQDSLSEELAKLRAQEKMHEVSFQDKEKEHLTRLQDAEEMKKALEQQMESHREAHQKQLSRLRDEIEEKQKIIDEIRDLNQKLQLEQEKLSSDYDKLKIEDQEREMKLEKLLLLNDKREQAREDLKGLEETVSRELQTLHNLRKLFVQ

SEQ ID NO: 1032189 - protein, 1085 aa, Homo sapiens
MDTPENVLQMLEAHMQSYKGNDPLGEWERYIQWVEENFPENKEYLITLLEHLMKEFLDKKKYHNDPRFISYCLKFAEYNSDLHQFFEFLYNHGIGTLSSPLYIAWAGHLEAQGELQHASAVLQRGIQNQAEPREFLQQQYRLFQTRLTETHLPAQARTSEPLHNVQVLNQMITSKSNPGNNMACISKNQGSELSGVISSACDKESNMERRVITISKSEYSVHSSLASKVDVEQVVMYCKEKLIRGESEFSFEELRAQKYNQRRKHEQWVNEDRHYMKRKEANAFEEQLLKQKMDELHKKLHQVVETSHEDLPASQERSEVNPARMGPSVGSQQELRAPCLPVTYQQTPVNMEKNPREAPPVVPPLANAISAALVSPATSQSIAPPVPLKAQTVTDSMFAVASKDAGCVNKSTHEFKPQSGAEIKEGCETHKVANTSSFHTTPNTSLGMVQATPSKVQPSPTVHTKEALGFIMNMFQAPTLPDISDDKDEWQSLDQNEDAFEAQFQKNVRSSGAWGVNKIISSLSSAFHVFEDGNKENYGLPQPKNKPTGARTFGERSVSRLPSKPKEEVPHAEEFLDDSTVWGIRCNKTLAPSPKSPGDFTSAAQLASTPFHKLPVESVHILEDKENVVAKQCTQATLDSCEENMVVPSRDGKFSPIQEKSPKQALSSHMYSASLLRLSQPAAGGVLTCEAELGVEACRLTDTDAAIAEDPPDAIAGLQAEWMQMSSLGTVDAPNFIVGNPWDDKLIFKLLSGLSKPVSSYPNTFEWQCKLPAIKPKTEFQLGSKLVYVHHLLGEGAFAQVYEATQGDLNDAKNKQKFVLKVQKPANPWEFYIGTQLMERLKPSMQHMFMKFYSAHLFQNGSVLVGELYSYGTLLNAINLYKNTPEKVMPQGLVISFAMRMLYMIEQVHDCEIIHGDIKPDNFILGNGFLEQDDEDDLSAGLALIDLGQSIDMKLFPKGTIFTAKCETSGFQCVEMLSNKPWNYQIDYFGVAATVYCMLFGTYMKVKNEGGECKPEGLFRRLPHLDMWNEFFHVMLNIPDCHHLPSLDLLRQKLKKVFQQHYTNKIRALRNRLIVLLLECKRSRK

SEQ ID NO: 1032190 - protein, 416 aa, Homo sapiens
AQEVKAGVSYYLATATQTGQQQDPVSKEQTKNYYNFTSVVFPPKSNNSKVTTRNVSNKPNLRAILQHTCLVLFGTVKVIKNKEHLRNVTVQKWLSGHDDYNIKYPRTQAKTSESSKLVYVHHLLGEGAFAQVYEATQGDLNDAKNKQKFVLKVQKPANPWEFYIGTQLMERLKPSMQHMFMKFYSAHLFQNGSVLVGELYSYGTLLNAINLYKNTPEKVMPQGLVISFAMRMLYMIEQVHDCEIIHGDIKPDNFILGNGFLEQDDEDDLSAGLALIDLGQSIDMKLFPKGTIFTAKCETSGFQCVEMLSNKPWNYQIDYFGVAATVYCMLFGTYMKVKNEGGECKPEGLFRRLPHLDMWNEFFHVMLNIPDCHHLPSLDLLRQKLKKVFQQHYTNKIRALRNRLIVLLLECKRSRK

SEQ ID NO: 1032191 - protein, 499 aa, Homo sapiens
MSNRRRLLVCGSGLAAAGQRPLAMDTPENVLQMLEAHMQSYKGNDPLGEWERYIQWVEENFPENKEYLITLLEHLMKEFLDKKKYHNDPRFISYCLKFAEYNSDLHQFFEFLYNHGIGTLSSPLYIAWAGHLEAQGELQHASAVLQRGIQNQAEPREFLQQQYRLFQTRLTETHLPAQARTSEPLHNVQVLNQMITSKSNPGNNMACISKNQGSELSGVISSACDKESNMERRVITISKSEYSVHSSLASKVDVEQVVMYCKEKLIRGESEFSFEELRAQKYNQRRKHEQWVNEDRHYMKRKEANAFEEQLLKQKMDELHKKLHQVVETSHEDLPASQERSEVNPARMGPSVGSQQELRAPCLPVTYQQTPVNMEKNPREAPPVVPPLANAISAALVSPATSQSIAPPVPLKAQTVTDSMFAVASKDAGCVNKSTHEFKPQSGAEIKEGCETHKVANTSSFHTTPNTSLGMVQATPSKVQPSPTVHTKEALGKVFYLSV

SEQ ID NO: 1032192 - protein, 345 aa, Homo sapiens
GYSNRRRLLVCGSGLAAAGQRPLAMDTPENVLQMLEAHMQSYKGNDPLGEWERYIQWVEENFPENKEYLITLLEHLMKEFLDKKKYHNDPRFISYCLKFAEYNSDLHQFFEFLYNHGIGTLSSPLYIAWAGHLEAQGELQHASAVLQRGIQNQAEPREFLQQQYRLFQTRLTETHLPAQARTSEPLHNVQVLNQMITSKSNPGNNMACISKNQGSELSGVISSACDKESNMERRVITISKSEYSVHSSLASKVDVEQVVMYCKEKLIRGESEFSFEELRAQKYNQRRKHEQWVNEDRHYMKRKEANAFEEQLLKQKMDELHKKLHQVVETSHEDLPASQERSENA

SEQ ID NO: 1032193 - protein, 761 aa, Homo sapiens
MGPSVGSQQELRAPCLPVTYQQTPVNMEKNPREAPPVVPPLANAISAALVSPATSQSIAPPVPLKAQTVTDSMFAVASKDAGCVNKSTHEFKPQSGAEIKEGCETHKVANTSSFHTTPNTSLGMVQATPSKVQPSPTVHTKEALGFIMNMFQAPTLPDISDDKDEWQSLDQNEDAFEAQFQKNVRSSGAWGVNKIISSLSSAFHVFEDGNKENYGLPQPKNKPTGARTFGERSVSRLPSKPKEEVPHAEEFLDDSTVWGIRCNKTLAPSPKSPGDFTSAAQLASTPFHKLPVESVHILEDKENVVAKQCTQATLDSCEENMVVPSRDGKFSPIQEKSPKQALSSHMYSASLLRLSQPAAGGVLTCEAELGVEACRLTDTDAAIAEDPPDAIAGLQAEWMQMSSLGTVDAPNFIVGNPWDDKLIFKLLSGLSKPVSSYPNTFEWQCKLPAIKPKTEFQLGSKLVYVHHLLGEGAFAQVYEATQGDLNDAKNKQKFVLKVQKPANPWEFYIGTQLMERLKPSMQHMFMKFYSAHLFQNGSVLVGELYSYGTLLNAINLYKNTPEKVMPQGLVISFAMRMLYMIEQVHDCEIIHGDIKPDNFILGNGFLEQDDEDDLSAGLALIDLGQSIDMKLFPKGTIFTAKCETSGFQCVEMLSNKPWNYQIDYFGVAATVYCMLFGTYMKVKNEGGECKPEGLFRRLPHLDMWNEFFHVMLNIPDCHHLPSLDLLRQKLKKVFQQHYTNKIRALRNRLIVLLLECKRSRK

SEQ ID NO: 1032194 - protein, 894 aa, Homo sapiens
GYSNRRRLLVCGSGLAAAGQRPLAMDTPENVLQMLEAHMQSYKGNDPLGEWERYIQWVEENFPENKEYLITLLEHLMKEFLDKKKYHNDPRFISYCLKFAEYNSDLHQFFEFLYNHGIGTLSSPLYIAWAGHLEAQGELQHASAVLQRGIQNQAEPREFLQQQYRLFQTRLTETHLPAQARTSEPLHNVQVLNQMITSKSNPGNNMACISKNQGSELSGVISSACDKESNMERRVITISKSEYSVHSSLASKVDVEQVVMYCKEKLIRGESEFSFEELRAQKYNQRRKHEQWVNEDRHYMKRKEANAFEEQLLKQKMDELHKKLHQVVETSHEDLPASQERSEVNPARMGPSVGSQQELRAPCLPVTYQQTPVNMEKNPREAPPVVPPLANAISAALVSPATSQSIAPPVPLKAQTVTDSMFAVASKDAGCVNKSTHEFKPQSGAEIKEGCETHKVANTSSFHTTPNTSLGMVQATPSKVQPSPTVHTKEALGFIMNMFQAPTLPDISDDKDEWQSLDQNEDAFEAQFQKNVRSSGAWGVNKIISSLSSAFHVFEDGNKENYGLPQPKNKPTGARTFGERSVSRLPSKPKEEVPHAEEFLDDSTVWGIRCNKTLAPSPKSPGDFTSAAQLASTPFHKLPVESVHILEDKENVVAKQCTQATLDSCEENMVVPSRDGKFSPIQEKSPKQALSSHMYSASLLRLSQPAAGGVLTCEAELGVEACRLTDTDAAIAEDPPDAIAGLQAEWMQMSSLGTVDAPNFIVGNPWDDKLIFKLLSGLSKPVSSYPNTFEWQCKLPAIKPKTEFQLGKNYLDEYNFKFLFLYEKLMVTCVCVCVCDSPMCPPTPIGSCICNTKLIIVLSHDCRIVLCCRDYNSYNLIEGNCPISIHTLTSAFYF

SEQ ID NO: 1032195 - protein, 1085 aa, Homo sapiens; identical to SEQ ID NO: 1032189

SEQ ID NO: 1032196 - protein, 1085 aa, Homo sapiens; identical to SEQ ID NO: 1032189

SEQ ID NO: 1032197 - protein, 94 aa, Homo sapiens
SASGRLAGLRQPRKRLPSSFLLLPSLPFFLPSVLVFLPSLPPCLFPSLLLFLPSVCPCFPPCLFPSLLLFLPSFRLSLCSSLPFLPASFLVLRI

SEQ ID NO: 1032198 - protein, 247 aa, Homo sapiens
ARAARGQRPRPASAPLAVPRPRRGCLGPPSRAAMVGRLSLQDVPELVDAKKKGDGVLDSPDSGLPPSPSPSHWGLAAGGGGGERAAAPGTLEPDAAAATPAAPSPASLPLAPGCALRLCPLSFGEGVEFDPLPPKEVRYTSLVKYDSERHFIDDVQLPLGLAVASCSQTVTCVPNGTWRNYKAEVRFEPRHRPTRFLSTTIVYPKYPKAVYTTTLDYNCRKTLRRFLSSVELEAAELPGSDDLSDEC

SEQ ID NO: 1032199 - protein, 219 aa, Homo sapiens
ARAARGQRPRPASAPLAVPRPRRGCLGPPSRAAMVGRLSLQDVPELVDAKKKGDGVLDSPDSGLPPSPSPSHWGLAAGGGGGERAAAPGTLEPDAAAATPAAPSPASLPLAPGCALRLCPLSFGEGVEFDPLPPKEVRYTSLVKYDSERHFIDDVQLPLGLAVASCSQTVTCVPNGTWRNYKAEVRFEPRHRPTRFLSTTIVYPKYPKAVYSDDLSDEC

SEQ ID NO: 1032200 - protein, 766 aa, Homo sapiens
RVAPGAESILLLLPRRCRGRSTGSFLSVSGVQSQAVGVEKRRQRSWARRGREPQGCSDFWRADPEASDREVPRAAAFRVVGVAPPRMPAPIRLRELIRTIRTARTQAEEREMIQKECAAIRSSFREEDNTYRCRNVAKLLYMHMLGYPAHFGQLECLKLIASQKFTDKRIGYLGAMLLLDERQDVHLLMTNCIKNDLNHSTQFVQGLALCTLGCMGSSEMCRDLAGEVEKLLKTSNSYLRKKAALCAVHVIRKVPELMEMFLPATKNLLNEKNHGVLHTSVVLLTEMCERSPDMLAHFRKLVPQLVRILKNLIMSGYSPEHDVSGISDPFLQVRIGRLLRILGRNDDDSSEAMNDILAQVATNTETDKNVGNAILNETVLTIMDIKSESGLRVLAINILGRFLLNNDKNIRYVALTSLLKTVQTDHNAVQRHRSTIVDCLKDYGIGSAKRRAMELSFALVNGNNIRGMMKELLYFLDSCEPEFKADCASGIFLAAEKYAPSKRWHIDTIMRVLTTAGSYVRDDAVPNLIQLITNSVEMHAYTVQRLYKAILGDYSQQPLVQVAAWCIGEYGDLLVSGQCEEEEPIQVTEDEVLDILESVLISNMSTSVTRGYALTAIMKLSTRFTCTVNRIKKVVSIYGSSIDVELQQRAVEYNALFKKYDHMRSALLERMPVMEKVTTNGPTEIVQTNGETEPAPLETKPPPSGPQPTSQANDLLDLLGGNDITPVIPTAPTSKPSSAGGELLDLLGDINLTGEAVWSYLIPGKR

SEQ ID NO: 1032201 - protein, 109 aa, Homo sapiens
MPAPIRLRELIRTIRTARTQAEEREMIQKECAAIRSSFREEDNTYRCRNVAKLLYMHMLGYPAHFGQLECLKLIASQKFTDKRIGYLGAMLLLDERQDVHLLMTNCIKK

SEQ ID NO: 1032202 - protein, 705 aa, Homo sapiens
MPAPIRLRELIRTIRTARTQAEEREMIQKECAAIRSSFREEDNTYRCRNVAKLLYMHMLGYPAHFGQLECLKLIASQKFTDKRIGYLGAMLLLDERQDVHLLMTNCIKNDLNHSTQFVQGLALCTLGCMGSSEMCRDLAGEVEKLLKTSNSYLRKKAALCAVHVIRKVPELMEMFLPATKNLLNEKNHGVLHTSVVLLTEMCERSPDMLAHFRKLVPQLVRILKNLIMSGYSPEHDVSGISDPFLQVRIGRLLRILGRNDDDSSEAMNDILAQVATNTETDKNVGNAILNETVLTIMDIKSESGLRVLAINILGRFLLNNDKNIRYVALTSLLKTVQTDHNAVQRHRSTIVDCLKDYGIRRQQKRRAMELSFALVNGNNIRGMMKELLYFLDSCEPEFKADCASGIFLAAEKYAPSKRWHIDTIMRVLTTAGSYVRDDAVPNLIQLITNSVEMHAYTVQRLYKAILGDYSQQPLVQVAAWCIGEYGDLLVSGQCEEEEPIQVTEDEVLDILESVLISNMSTSVTRGYALTAIMKLSTRFTCTVNRIKKVVSIYGSSIDVELQQRAVEYNALFKKYDHMRSALLERMPVMEKVTTNGPTEIVQTNGETEPAPLETKPPPSGPQPTSQANDLLDLLGGNDITPVIPTAPTSKPSSAGGELLDLLGDINLTGEAVWSYLIPGKRKRPQGKTKLNPDFPARESFEDGRG

SEQ ID NO: 1032203 - protein, 281 aa, Homo sapiens
MPAPIRLRELIRTIRTARTQAEEREMIQKECAAIRSSFREEDNTYRCRNVAKLLYMHMLGYPAHFGQLECLKLIASQKFTDKRIGYLGAMLLLDERQDVHLLMTNCIKNDLNHSTQFVQGLALCTLGCMGSSEMCRDLAGEVEKLLKTSNSYLRKKAALCAVHVIRKVPELMEMFLPATKNLLNEKNHGVLHTSVVLLTEMCERSPDMLAHFRKLVPQLVRILKNLIMSGYSPEHDVSGISDPFLQVRIGRLLRILGRNDDDSSEAMNDILAQVATNTETR

SEQ ID NO: 1032204 - protein, 552 aa, Homo sapiens
MGSSEMCRDLAGEVEKLLKTSNSYLRKKAALCAVHVIRKVPELMEMFLPATKNLLNEKNHGVLHTSVVLLTEMCERSPDMLAHFRKLVPQLVRILKNLIMSGYSPEHDVSGISDPFLQVRIGRLLRILGRNDDDSSEAMNDILAQVATNTETDKNVGNAILNETVLTIMDIKSESGLRVLAINILGRFLLNNDKNIRYVALTSLLKTVQTDHNAVQRHRSTIVDCLKDYGIGSAKRRAMELSFALVNGNNIRGMMKELLYFLDSCEPEFKADCASGIFLAAEKYAPSKRWHIDTIMRVLTTAGSYVRDDAVPNLIQLITNSVEMHAYTVQRLYKAILGDYSQQPLVQVAAWCIGEYGDLLVSGQCEEEEPIQVTEDEVLDILESVLISNMSTSVTRGYALTAIMKLSTRFTCTVNRIKKVVSIYGSSIDVELQQRAVEYNALFKKYDHMRSALLERMPVMEKVTTNGPTEIVQTNGETEPAPLETKPPPSGPQPTSQANDLLDLLGGNDITPVIPTAPTSKPSSAGGELLDLLGDINLTGEAVWSYLIPGKR

SEQ ID NO: 1032205 - protein, 121 aa, Homo sapiens
YRSLPLFVEFAHKWNKNWTAGTASNKLWYASLALVTLIMYSIATGGLVLMAVFYTQKDSCMENKILLGVNGGLCLLISLVAISPWVQKSTATLGALTIRGHKLLCHLPHLLSSVQQTCRSR

SEQ ID NO: 1032206 - protein, 295 aa, Homo sapiens
YRSLPLFVEFAHKWNKNWTAGTASNKLWYASLALVTLIMYSIATGGLVLMAVFYTQKDSCMENKILLGVNGGLCLLISLVAISPWVQKSTATLGALTIRGHKLLCHLPHLLSSVQQTCRSSSQMNMGKMLQSVCLTLVKTCTEMKTGDYTGDSLLILCILYSCLTSTTRSSSDALQGRYAAPELEIARCCFCFSPGGEDTEEQQPGKEGPRVIYDEKKGTVYIYSYFHFVFFLASLYVMMTVTNWFNYESANIESFFSGSWSIFWVKMASCWICVLLYLCTLVAPLCCPTREFSV

SEQ ID NO: 1032207 - protein, 109 aa, Homo sapiens
LTVLMSTYFDAKERPWDLIGPQMGFLGLACLGCGHPASTQPCHAMGCSTNPGPRPSHCPQLMVTVLAGSRVDRYALSTAAAQAQYAVRCPLLTTVCQLGLADSVVVTSR

SEQ ID NO: 1032208 - protein, 105 aa, Homo sapiens
MGRDVLDGNMVLEVPYLHPAAPPPTTLECKIASLLTLTLFPGPTPRQVQDSPWCSLRVQTSEALAIQSLQHLNTAQTVRGIRSGVGREGLHLPQIDSMFGPPGCP

SEQ ID NO: 1032209 - protein, 450 aa, Homo sapiens
MLVTAYLAFVGLLASCLGLELSRCRAKPPGRACSNPSFLRFQLDFYQVYFLALAADWLQAPYLYKLYQHYYFLEGQIAILYVCGLASTVLFGLVASSLVDWLGRKNSCVLFSLTYSLCCLTKLSQDYFVLLVGRALGGLSTALLFSAFEAWYIHEHVERHDFPAEWIPATFARAAFWNHVLAVVAGVAAEAVASWIGLGPVAPFVAAIPLLALAGALALRNWGENYDRQRAFSRTCAGGLRCLLSDRRVLLLGTIQALFESVIFIFVFLWTPVLDPHGAPLGIIFSSFMAASLLGSSLYRIATSKRYHLQPMHLLSLAVLIVVFSLFMLTFSTSPGQESPVESFIAFLLIELACGLYFPSMSFLRRKVIPETEQAGVLNWFRVPLHSLACLGLLVLHDSDRKTGTRNMFSICSAVMVMALLAVVGLFTVVRHDAELRVPSPTEEPYAPEL

SEQ ID NO: 1032210 - protein, 450 aa, Homo sapiens; identical to SEQ ID NO: 1032209

SEQ ID NO: 1032211 - protein, 225 aa, Homo sapiens
MTGSVPSQGPVLEACAALLSDRRVLLLGTIQALFESVIFIFVFLWTPVLDPHGAPLGIIFSSFMAASLLGSSLYRIATSKRYHLQPMHLLSLAVLIVVFSLFMLTFSTSPGQESPVESFIAFLLIELACGLYFPSMSFLRRKVIPETEQAGVLNWFRVPLHSLACLGLLVLHDSDRKTGTRNMFSICSAVMVMALLAVVGLFTVVRHDAELRVPSPTEEPYAPEL

SEQ ID NO: 1032212 - protein, 301 aa, Homo sapiens
MRLPKPHSWCLDHTGFSCMEVTAVGEEANQGDLLGFGQAVLFLRKLPPLALPDCGASFPSTARKKRKLAFETGGRTMTGSVPSQGPVLEACAALLSDRRVLLLGTIQALFESVIFIFVFLWTPVLDPHGAPLGIIFSSFMAASLLGSSLYRIATSKRYHLQPMHLLSLAVLIVVFSLFMLTFSTSPGQESPVESFIAFLLIELACGLYFPSMSFLRRKVIPETEQAGVLNWFRVPLHSLACLGLLVLHDSDRKTGTRNMFSICSAVMVMALLAVVGLFTVVRHDAELRVPSPTEEPYAPEL

SEQ ID NO: 1032213 - protein, 450 aa, Homo sapiens; identical to SEQ ID NO: 1032209

SEQ ID NO: 1032214 - protein, 176 aa, Homo sapiens
MTGFLLPPASRGTRRSCSRSRKRQTRRRRNPSSFVASCPTLLPFACVPGASPTTLAFPPVVLTGPSTDGIPFALSLQRVPFVLPSPQVASFPLDPLPRADPRHPPPPSPHICCPPLPLHFPSPCPPISISPPTLSPPPTSLPSHPPSLIPSSSPSPYLLLLSLSSLPLIPPPLSHP

SEQ ID NO: 1032215 - protein, 30 aa, Homo sapiens
MLSERARNQSSTWDNSPKGSYFNNPMAPDY

SEQ ID NO: 1032216 - protein, 120 aa, Homo sapiens
MTRGNQRELARQKNMKKQSDSVKGKRRDDGLSAAARKQRDSEIMQQKQNPLALRLCAWSQSHHARVSSCSAHRSQHRWHSLCPESAAGPFCASFPSGSLSPPGPLPGVRGLPLPLGHSRG

SEQ ID NO: 1032217 - protein, 149 aa, Homo sapiens
MEPDGTYRAELSMEYSDFCTVNVHNMLYPKEDKENRILLYRDRNCDYQPGGRTQAAYYVNKITHTKWHETAPRYIGDVYQEPHVAGTRGPTVAQKCGHKGGMCTSKSTTDARGRGRHDAITYVCTGPTLARHCGRVTSSIPECITTASW

SEQ ID NO: 1032218 - protein, 280 aa, Homo sapiens
EYWQVHESNSKTKLQAQTSRDAIQNPNDIQLQEKAWNAVCPLVVRLKRFYEFSIRLEKALQSLLESLTCPPYTPTQHLEREQALAKEFAEILHFTLRFDELKMRNPAIQNDFSYYRRTISRNRINNMHLDIENEVNNEMANRMSLFYAEATPMLKTLSNATMHFVSENKTLPIENTTDCLSTMTSVCKVMLETPEYRSRFTSEETLMFCMRVMVGVIILYDHVHPVGAFCKTSKIDMKGCIKVLKEQAPDSVEGLLNALRFTTKHLNDESTSKQIRAMLQ

SEQ ID NO: 1032219 - protein, 280 aa, Homo sapiens; identical to SEQ ID NO: 1032218

SEQ ID NO: 1032220 - protein, 280 aa, Homo sapiens; identical to SEQ ID NO: 1032218

SEQ ID NO: 1032221 - protein, 178 aa, Homo sapiens
RTRGDLRFRQNTLKSKHSLPSAYRTVRRSRSRSRSPRRRAHSPERRREERSVPTAYRVSRSPGASRKRTRSRSPHEKKKKRRSRSRTKSKARSQSVSPSKQAAPRPAAPAAHSAHSASVSPVESRGSSQERSRGVSQEKEAQISSAIVSSVQSKITQEALVCRFWEAASIALTLAMRS

SEQ ID NO: 1032222 - protein, 178 aa, Homo sapiens
RTRGDLRFRQNTLKSKHSLPSAYRTVRRSRSRSRSPRRRAHSPERRREERSVPTAYRVSRSPGASRKRTRSRSPHEKKKKRRSRSRTKSKARSQSVSPSKQAAPRPAAPAAHSAHSASVSPVESRGSSQERSRGVSQEKEAQISSAIVSSVQSKITQDLMAKVRAMLAASKNLQTSAS

SEQ ID NO: 1032223 - protein, 178 aa, Homo sapiens; identical to SEQ ID NO: 1032222

SEQ ID NO: 1032224 - protein, 130 aa, Homo sapiens
RWFAGFWQAARIALSFGHEILSDFALHEKKKKRRSRSRTKSKARSQSVSPSKQAAPRPAAPAAHSAHSASVSPVESRGSSQERSRGVSQEKEAQISSAIVSSVQSKITQDLMAKVRAMLAASKNLQTSAS

SEQ ID NO: 1032225 - protein, 141 aa, Homo sapiens
VFKWTVRMRQLPLFPAGTMEGVEEKKKEVPAVPETLKKKRRNFAELKIKRLRKKFAQKMLRKARRKLIYEKAKHYHKEYRQMYRTEIRMARMARKAGNFYVPAEPKLAFVIRIRGINGVSPKVPKGVAASSPSSNLQWNLV

SEQ ID NO: 1032226 - protein, 248 aa, Homo sapiens; identical to SEQ ID NO: 738779

SEQ ID NO: 1032227 - protein, 140 aa, Homo sapiens
INAECPLRPGPLFPAGTMEGVEEKKKEVPAVPETLKKKRRNFAELKIKRLRKKFAQKMLRKARRKLIYEKAKHYHKEYRQMYRTEIRMARMARKAGNFYVPAEPKLAFVIRIRGINGVSPKVPKGVAASSPSSNLQWNLV

SEQ ID NO: 1032228 - protein, 142 aa, Homo sapiens
CSEDPSYERIPPETLKKKRRNFAELKKKEVPAVPETLKKKRRNFAELKIKRLRKKFAQKMLRKARRKLIYEKAKHYHKEYRQMYRTEIRMARMARKAGNFYVPAEPKLAFVIRIRGINGVSPKVPKGVAASSPSSNLQWNLV

SEQ ID NO: 1032229 - protein, 44 aa, Homo sapiens
MGETTHRREKYRARRDDKETKRREKEGNTNANKSDQQDDCDEET

SEQ ID NO: 1032230 - protein, 159 aa, Homo sapiens
TRKVNEAEVAVVLISGVSYCALDRCGRVSSGVMRCSPGGPPCGFFRGVRIHGLTIRRGRPGLGEFTAYMPGPSRQRLPTKRARSSSEFGHELGTCRTQIGVCHQNQRYQWSEPKGSERCCSFFAFVKSSMEPCVKLNKASINMLRIVEPIYCHGGTPKS

SEQ ID NO: 1032231 - protein, 70 aa, Homo sapiens
IFLVIVLCFFIDKLPPCLSKHLLGKLLSQALDLQLCEIPSLFLKGFWHSRNLLLLLFYTLHGSSRKKEGK

SEQ ID NO: 1032232 - protein, 131 aa, Homo sapiens
THASADAWVDPRVRKKKEVPAVPETLKKKRRNFAELKIKRLRKKFAQKMLRKARRKLIYEKAKHYHKEYRQMYRTEIRMARMARKAGNFYVPAEPKLAFVIRIRGINGVSPKVPKGVAASSPSSNLQWNLV

SEQ ID NO: 1032233 - protein, 121 aa, Homo sapiens
CSEDPSYERIPPETLKKKRRNFAELEKIKRLRKKFAQKMLRKARRKLIYEKAKHYHKEYRQMYRTEIRMARMARKAGNFYVPAEPKLAFVIRIRGINGVSPKVPKGVAASSPSSNLQWNLV

SEQ ID NO: 1032234 - protein, 248 aa, Homo sapiens [sequence omitted]

SEQ ID NO: 1032235 - protein, 248 aa, Homo sapiens [sequence omitted]

SEQ ID NO: 1032236 - protein, 248 aa, Homo sapiens [sequence omitted]

SEQ ID NO: 1032237 - protein, 248 aa, Homo sapiens [sequence omitted]

SEQ ID NO: 1032238 - protein, 248 aa, Homo sapiens [sequence omitted]

SEQ ID NO: 1032239 - protein, 248 aa, Homo sapiens; identical to SEQ ID NO: 738779

SEQ ID NO: 1032240 - protein, 248 aa, Homo sapiens; identical to SEQ ID NO: 738779

SEQ ID NO: 1032241 - protein, 248 aa, Homo sapiens; identical to SEQ ID NO: 738779

SEQ ID NO: 1032242 - protein, 248 aa, Homo sapiens; identical to SEQ ID NO: 738779

SEQ ID NO: 1032243 - protein, 248 aa, Homo sapiens; identical to SEQ ID NO: 738779

SEQ ID NO: 1032244 - protein, 248 aa, Homo sapiens; identical to SEQ ID NO: 738779

SEQ ID NO: 1032245 - protein, 248 aa, Homo sapiens; identical to SEQ ID NO: 738779

SEQ ID NO: 1032246 - protein, 141 aa, Homo sapiens; identical to SEQ ID NO: 1032225

SEQ ID NO: 1032247 - protein, 141 aa, Homo sapiens; identical to SEQ ID NO: 1032225

SEQ ID NO: 1032248 - protein, 141 aa, Homo sapiens; identical to SEQ ID NO: 1032225

SEQ ID NO: 1032249 - protein, 141 aa, Homo sapiens; identical to SEQ ID NO: 1032225

SEQ ID NO: 1032250 - protein, 141 aa, Homo sapiens
GGGGKTIRLGSEARVAGTMEGVEEKKKEVPAVPETLKKKRRNFAELKIKRLRKKFAQKMLRKARRKLIYEKAKHYHKEYRQMYRTEIRMARMARKAGNFYVPAEPKLAFVIRIRGINGVSPKVPKGVAASSPSSNLQWNLV

SEQ ID NO: 1032251 - protein, 100 aa, Homo sapiens
VFKWTVRMRQLPLFPAGTMEGVEEKKKEVPAVPETLKKKRRNFAELKIKRLRKKFAQKMLRKARRKLIYEKAKHYHKEYRQMYRTEIRMARMARKAGNFY

SEQ ID NO: 1032252 - protein, 141 aa, Homo sapiens; identical to SEQ ID NO: 1032225

SEQ ID NO: 1032253 - protein, 141 aa, Homo sapiens; identical to SEQ ID NO: 1032225

SEQ ID NO: 1032254 - protein, 44 aa, Homo sapiens; identical to SEQ ID NO: 1032229

SEQ ID NO: 1032255 - protein, 124 aa, Homo sapiens
  misc_feature (47)..(47): Xaa can be any naturally occurring amino acid
MYSLACVSNKEGETQHALRTKVIDRRVIRHLRSKSFTVEAILMNASXIGLRIEALLREWVKPVYVHEGYPRSCKVSHNETQSHQGVDYGRTHPQINKKRIALTDNALIARSLWVKYGHHLHGRI

SEQ ID NO: 1032256 - protein, 123 aa, Homo sapiens
MEGVEEKKKEVPAVPETLKKKRRNFAELKIKRLRKKFAQKMLRKARRKLIYEKAKHYHKEYRQMYRTEIRMARMARKAGNFYVPAEPKLAFVIRIRGINGVSPKVPKGVAASSPSSNLQWNLV

SEQ ID NO: 1032257 - protein, 127 aa, Homo sapiens
SIRLGSEAGVEKKEVPAVPETLKKKRRNFAELKIKRLRKKFAQKMLRKARRKLIYEKAKHYHKEYRQMYRTEIRMARMARKAGNFYVPAEPKLAFVIRIRGINGVSPKVPKGVAASSPSSNLQWNLV

SEQ ID NO: 1032258 - protein, 127 aa, Homo sapiens; identical to SEQ ID NO: 1032257

SEQ ID NO: 1032259 - protein, 44 aa, Homo sapiens; identical to SEQ ID NO: 1032229

SEQ ID NO: 1032260 - protein, 132 aa, Homo sapiens
MGALFPAGTMEGVEEKKKEVPAVPETLKKKRRNFAELKIKRLRKKFAQKMLRKARRKLIYEKAKHYHKEYRQMYRTEIRMARMARKAGNFYVPAEPKLAFVIRIRGINGVSPKVPKGVAASSPSSNLQWNLV

SEQ ID NO: 1032261 - protein, 147 aa, Homo sapiens
VEARLGTLWGWNGANPVSAAGDEDPELPREKKKEVPAVPETLKKKRRNFAELKIKRLRKKFAQKMLRKARRKLIYEKAKHYHKEYRQMYRTEIRMARMARKAGNFYVPAEPKLAFVIRIRGINGVSPKVPKGVAASSPSSNLQWNLV

SEQ ID NO: 1032262 - protein, 141 aa, Homo sapiens; identical to SEQ ID NO: 1032225

SEQ ID NO: 1032263 - protein, 141 aa, Homo sapiens; identical to SEQ ID NO: 1032225

SEQ ID NO: 1032264 - protein, 141 aa, Homo sapiens; identical to SEQ ID NO: 1032225

SEQ ID NO: 1032265 - protein, 141 aa, Homo sapiens; identical to SEQ ID NO: 1032225

SEQ ID NO: 1032266 - protein, 141 aa, Homo sapiens; identical to SEQ ID NO: 1032225

SEQ ID NO: 1032267 - protein, 141 aa, Homo sapiens; identical to SEQ ID NO: 1032225

SEQ ID NO: 1032268 - protein, 141 aa, Homo sapiens; identical to SEQ ID NO: 1032225

SEQ ID NO: 1032269 - protein, 133 aa, Homo sapiens
VFKWTVRMRQLPLFPAGTMEGVEEKKKEVPAVPETLKKKRRNFAELKIKRLRKKFAQKMLRKARRKLIYEKAKHYHKEYRQMYRTEIRMARMARKAGNFYVPAEPKLAFVIRIRGIIELAQSRRFQLSPRQSS

SEQ ID NO: 1032270 - protein, 248 aa, Homo sapiens; identical to SEQ ID NO: 738779

SEQ ID NO: 1032271 - protein, 248 aa, Homo sapiens; identical to SEQ ID NO: 738779

SEQ ID NO: 1032272 - protein, 248 aa, Homo sapiens; identical to SEQ ID NO: 738779

SEQ ID NO: 1032273 - protein, 248 aa, Homo sapiens; identical to SEQ ID NO: 738779

SEQ ID NO: 1032274 - protein, 248 aa, Homo sapiens [sequence omitted]

SEQ ID NO: 1032275 - protein, 248 aa, Homo sapiens; identical to SEQ ID NO: 738779

SEQ ID NO: 1032276 - protein, 248 aa, Homo sapiens; identical to SEQ ID NO: 738779

SEQ ID NO: 1032277 - protein, 248 aa, Homo sapiens; identical to SEQ ID NO: 738779

SEQ ID NO: 1032278 - protein, 248 aa, Homo sapiens [sequence omitted]

SEQ ID NO: 1032279 - protein, 248 aa, Homo sapiens; identical to SEQ ID NO: 738779

SEQ ID NO: 1032280 - protein, 248 aa, Homo sapiens [sequence omitted]

SEQ ID NO: 1032281 - protein, 394 aa, Homo sapiens
MRKALSSLRQKIRKYNRDFESHITSYKQNPEQSADEDAEKNEEDSEGSSDEDEDEDGVSAATFLKKKSEAPSGESRKFLKKMDDEDEDSEDSEDDEDWDTGSTSSDSDSEEEEGKQTALASRFLKKAPTTDEDKKAAEKKREDKAKKKHDRKSKRLDEEEEDNEGGEWETGPGRSCRWLRRSQEMFAKGTEITHACCNQETEMRSYRHEARRELIVLPRLSCCQLLVQIAAENNLGEGVIVKIKFNIIASLYDYNPNLATYMKPEMWGKCLDCINELMDILFANPNIFVGENILEESENLHNADQPLRVRGCILTLVERMDEEFTKIMQNTDPHSQEYVEHLKDEAQVCAIIERVQRYLEEKGTYRGGLPIYLLRIWTATTSFDYQGHQRQVTR

SEQ ID NO: 1032282 - protein, 121 aa, Homo sapiens
LPLPPSGNWAVNEGLSIFVILVWLGLNVFLFVWYYRVYDIPPKFFYTRKLLGSALALARAPAACLNFNCMLILLPVCRNLLSFLRGSSALSPGASLKSQGIDVLRASLRAALSQSWMAVGG

SEQ ID NO: 1032283 - protein, 99 aa, Homo sapiens
  misc_feature (3)..(3): Xaa can be any naturally occurring amino acid
  misc_feature (97)..(97): Xaa can be any naturally occurring amino acid
GIXMVMLIGPAKYNLLHDPPHFQIYFYWLCRDTHAFEWFADLLQLLESQMQERNNAGFLSYNIYLTGWDESQVRTRLQGSGPSHSVQGLRTSPWLLXCL

SEQ ID NO: 1032284 - protein, 364 aa, Homo sapiens
PSMELNELYVGLDLHFSPRRIVRGQTAESLAVHNITVCEQKISEWGKIKECPIPQFAGNPPMTWKWIVGPMFLYLCERLVRFWRSQQKVVITKVVTHPFKTIELQMKKKGFKMEVGQYIFVKCPKVSKLEWHPFTLTSAPEEDFFSIHIRIVGDWTEGLFNACGCDKQEFQDAWKLPKIAVDGPFGTASEDVFSYEVVMLVGAGIGVTPFASILKSVWYKYCNNATNLKLKKIYFYWLCRDTHAFEWFADLLQLLESQMQERNNAGFLSYNIYLTGWDESQANHFAVHHDEEKDVITGLKQKTLYGRPNWDNEFKTIASQHPNTRIGVFLCGPEALAETLSKQSISNSESGPRGVHFIFNKENF

SEQ ID NO: 1032285 - protein, 570 aa, Homo sapiens
MGNWAVNEGLSIFVILVWLGLNVFLFVWYYRVYDIPPKFFYTRKLLGSALALARAPAACLNFNCMLILLPVCRNLLSFLRGSSACCSTRVRRQLDRNLTFHKMVAWMIALHSAIHTIAHLFNVEWCVNARVNNSDPYSVALSELGDRQNESYLNFARKRIKNPEGGLYLAVTLLAGITGVVITLCLILIITSSTKTIRRSYFEVFWYTHHLFVIFFIGLAIHGAERIVRGQTAESLAVHNITVCEQKISEWGKIKECPIPQFAGNPPMTWKWIVGPMFLYLCERLVRFWRSQQKVVITKVVTHPFKTIELQMKKKGFKMEVGQYIFVKCPKVSKLEWHPFTLTSAPEEDFFSIHIRIVGDWTEGLFNACGCDKQEFQDAWKLPKIAVDGPFGTASEDVFSYEVVMLVGAGIGVTPFASILKSVWYKYCNNATNLKLKKIYFYWLCRDTHAFEWFADLLQLLESQMQERNNAGFLSYNIYLTGWDESQANHFAVHHDEEKDVITGLKQKTLYGRPNWDNEFKTIASQHPNTRIGVFLCGPEALAETLSKQSISNSESGPRGVHFIFNKENF

SEQ ID NO: 1032286 - protein, 133 aa, Homo sapiens
LPLPPSGNWAVNEGLSIFVILVWLGLNVFLFVWYYRVYDIPPKFFYTRKLLGSALALARAPAACLNFNCMLILLPVCRNLLSFLRGSSACCSTRVRRQLDRNLTFHKMVAWMIALHSGKFIKENLEPGSSLYS

SEQ ID NO: 1032287 - protein, 280 aa, Homo sapiens
MGNWAVNEGLSIFVILVWLGLNVFLFVWYYRVYDIPPKFFYTRKLLGSALALARAPAACLNFNCMLILLPVCRNLLSFLRGSSACCSTRVRRQLDRNLTFHKMVAWMIALHSAIHTIAHLFNVEWCVNARVNNSDPYSVALSELGDRQNESYLNFARKRIKNPEGGLYLAVTLLAGITGVVITLCLILIITSSTKTIRRSYFEGLGAPNPWERLKGREQGGPQSGRRAKGGPKNGANTRGADPTRGPPTLRNAPPYSQEAAPQKRPTATEQGQCTVPPHG

SEQ ID NO: 1032288 - protein, 354 aa, Homo sapiens
MNGLLSNSRRIVRGQTAESLAVHNITVCEQKISEWGKIKECPIPQFAGNPPMTWKWIVGPMFLYLCERLVRFWRSQQKVVITKVVTHPFKTIELQMKKKGFKMEVGQYIFVKCPKVSKLEWHPFTLTSAPEEDFFSIHIRIVGDWTEGLFNACGCDKQEFQDAWKLPKIAVDGPFGTASEDVFSYEVVMLVGAGIGVTPFASILKSVWYKYCNNATNLKLKKIYFYWLCRDTHAFEWFADLLQLLESQMQERNNAGFLSYNIYLTGWDESQANHFAVHHDEEKDVITGLKQKTLYGRPNWDNEFKTIASQHPNTRIGVFLCGPEALAETLSKQSISNSESGPRGVHFIFNKENF

SEQ ID NO: 1032289 - protein, 371 aa, Homo sapiens
KYMQNLLIKQFNFLLLNDLDLHFSPRRIVRGQTAESLAVHNITVCEQKISEWGKIKECPIPQFAGNPPMTWKWIVGPMFLYLCERLVRFWRSQQKVVITKVVTHPFKTIELQMKKKGFKMEVGQYIFVKCPKVSKLEWHPFTLTSAPEEDFFSIHIRIVGDWTEGLFNACGCDKQEFQDAWKLPKIAVDGPFGTASEDVFSYEVVMLVGAGIGVTPFASILKSVWYKYCNNATNLKLKKIYFYWLCRDTHAFEWFADLLQLLESQMQERNNAGFLSYNIYLTGWDESQANHFAVHHDEEKDVITGLKQKTLYGRPNWDNEFKTIASQHPNTRIGVFLCGPEALAETLSKQSISNSESGPRGVHFIFNKENF

SEQ ID NO: 1032290 - protein, 570 aa, Homo sapiens; identical to SEQ ID NO: 1032285

SEQ ID NO: 1032291 - protein, 506 aa, Homo sapiens
MLILLPVCRNLLSFLRGSSACCSTRVRRQLDRNLTFHKMVAWMIALHSAIHTIAHLFNVEWCVNARVNNSDPYSVALSELGDRQNESYLNFARKRIKNPEGGLYLAVTLLAGITGVVITLCLILIITSSTKTIRRSYFEVFWYTHHLFVIFFIGLAIHGAERIVRGQTAESLAVHNITVCEQKISEWGKIKECPIPQFAGNPPMTWKWIVGPMFLYLCERLVRFWRSQQKVVITKVVTHPFKTIELQMKKKGFKMEVGQYIFVKCPKVSKLEWHPFTLTSAPEEDFFSIHIRIVGDWTEGLFNACGCDKQEFQDAWKLPKIAVDGPFGTASEDVFSYEVVMLVGAGIGVTPFASILKSVWYKYCNNATNLKLKKIYFYWLCRDTHAFEWFADLLQLLESQMQERNNAGFLSYNIYLTGWDESQANHFAVHHDEEKDVITGLKQKTLYGRPNWDNEFKTIASQHPNTRIGVFLCGPEALAETLSKQSISNSESGPRGVHFIFNKENF

SEQ ID NO: 1032292 - protein, 617 aa, Homo sapiens
LPLPPSGNWAVNEGLSIFVILVWLGLNVFLFVWYYRVYDIPPKFFYTRKLLGSALALARAPAACLNFNCMLILLPVCRNLLSFLRGSSALSPGASLKSQGIDVLRASLRAALSQSWMAVGGVNTQSFLTRLCCSTRVRRQLDRNLTFHKMVAWMIALHSAIHTIAHLFNVEWCVNARVNNSDPYSVALSELGDRQNESYLNFARKRIKNPEGGLYLAVTLLAGITGVVITLCLILIITSSTKTIRRSYFEVFWYTHHLFVIFFIGLAIHGAERIVRGQTAESLAVHNITVCEQKISEWGKIKECPIPQFAGNPPMTWKWIVGPMFLYLCERLVRFWRSQQKVVITKVVTHPFKTIELQMKKKGFKMEVGQYIFVKCPKVSKLEWHPFTLTSAPEEDFFSIHIRIVGDWTEGLFNACGCDKQEFQDAWKLPKIAVDGPFGTASEDVFSYEVVMLVGAGIGVTPFASILKSVWYKYCNNATNLKLKKIYFYWLCRDTHAFEWFADLLQLLESQMQERNNAGFLSYNIYLTGWDESQANHFAVHHDEEKDVITGLKQKTLYGRPNWDNEFKTIASQHPNTRIGVFLCGPEALAETLSKQSISNSESGPRGVHFIFNKENF

SEQ ID NO: 1032293 - protein, 570 aa, Homo sapiens; identical to SEQ ID NO: 1032285

SEQ ID NO: 1032294 - protein, 143 aa, Homo sapiens
  misc_feature (7)..(7): Xaa can be any naturally occurring amino acid
HPIQAIXGVKKQSPRRYLLRWGGGGSRSSPGRRGGRARGGGRDQNGLSKGGGGGYNSYGGYGGGGGGGYNAYGGGGGGSSYGGSNYGNGFGGFGSYSQHQSSYGPMKSGGGGGGGGSSWGGRSNSGPYRGGYGGGGGYGGSSF

SEQ ID NO: 1032295 - protein, 152 aa, Homo sapiens
MSSFLQPGHADCLFGPIVRPAQIVSHPVHGHTLHIVDAVLQDGLPLSAINLLAANEVAGGVGKVDEAGLSVEVQGSGVHEVFNGDHVLIRDLAPISMPRMMPGRPLPYTRNSSCSGFLHDFPSLPRLKPERQRQVLRLVAVGQQADVNRITR

SEQ ID NO: 1032296 - protein, 187 aa, Homo sapiens
MAEGWGLITVVQAIVVSVTLPALLDAAAVGTGKLAWLALGWRHVGWVRQASDAVCVQHLVLSTGALAAPRGGQAQAAAAAIVHPAFVGANLLLLGIIHSDLKDGGPLTAQKGHSGGCASYTPFPAVDTATPILSPEEVVAMVTQAKGVVQLRTFIHNLPVCAIEQYRLDAVVEGIHPVEAPSRDVQA

SEQ ID NO: 1032297 - protein, 187 aa, Homo sapiens; identical to SEQ ID NO: 1032296

SEQ ID NO: 1032298 - protein, 1012 aa, Homo sapiens
MDALDASKLLDEELYSRQLYVLGSPAMQRIQGARVLVSGLQGLGAEVAKNLVLMGVGSLTLHDPHPTCWSDLAAQFLLSEQDLERSRAEASQELLAQLNRAVQVVVHTGDITEDLLLDFQVVVLTAAKLEEQLKVGTLCHKHGVCFLAADTRGLVGQLFCDFGEDFTVQDPTEAEPLTAAIQHISQGSPGILTLRKGANTHYFRDGDLVTFSGIEGMVELNDCDPRSIHVREDGSLEIGDTTTFSRYLRGGAITEVKRPKTVRHKSLDTALLQPHVVAQSSQEVHHAHCLHQAFCALHKFQHLHGRPPQPWDPVDAETVVGLARDLEPLKRTEEEPLEEPLDEALVRTVALSSAGVLSPMVAMLGAVAAQEVLKAISRKFMPLDQWLYFDALDCLPEDGELLPSPEDCALRGSRYDGQIAVFGAGFQEKLRRQHYLLVGAGAIGCELLKVFALVGLGAGNSGGLTVVDMDHIERSNLSRQFLFRSQDVGRPKAEVAAAAARGLNPDLQVIPLTYPLDPTTEHIYGDNFFSRVDGVAAALDSFQARRYVAARCTHYLKPLLEAGTSGTWGSATVFMPHVTEAYRAPASAAASEDAPYPVCTVRYFPSTAEHTLQWARHEFEELFRLSAETINHHQQAHTSLADMDEPQTLTLLKPVLGVLRVRPQNWQDCVAWALGHWKLCFHYGIKQLLRHFPPNKVLEDGTPFWSGPKQCPQPLEFDTNQDTHLLYVLAAANLYAQMHGLPGSQDWTALRELLKLLPQPDPQQMAPIFASNLELASASAEFGPEQQKELNKALEVWSVGPPLKPLMFEKDDDSNFHVDFVVAAASLRCQNYGIPPVNRAQSKRIVGQIIPAIATTTAAVAGLLGLELYKVVSGPRPRSAFRHSYLHLAENYLIRYMPFAPAIQTFHHLKWTSWDRLKVPAGQPERTLESLLAHLQEQHGLRVRILLHGSALLYAAGWSPEKQAQHLPLRVTELVQQLTGQAPAPGQRVLVLELSCEGDDEDTAFPPLHYEL

SEQ ID NO: 1032299 - protein, 1041 aa, Homo sapiens
MDALDASKLLDEELYSRQLYVLGSPAMQRIQGARVLVSGLQGLGAEVAKNLVLMGVGSLTLHDPHPTCWSDLAAQFLLSEQDLERSRAEASQELLAQLNRAVQVVVHTGDITEDLLLDFQVVVLTAAKLEEQLKVGTLCHKHGVCFLAADTRGLVGQLFCDFGEDFTVQDPTEAEPLTAAIQHISQGSPGILTLRKGANTHYFRDGDLVTFSGIEGMVELNDCDPRSIHVREDGSLEIGDTTTFSRYLRGGAITEVKRPKTVRHKSLDTALLQPHVVAQSSQEVHHAHCLHQAFCALHKFQHLHGRPPQPWDPVDAETVVGLARDLEPLKRTEEEPLEEPLDEALVRTVALSSAGVLSPMVAMLGAVAAQEVLKAISRKFMPLDQWLYFDALDCLPEDGELLPSPEDCALRGSRYDGQIAVFGAGFQEKLRRQHYLLVGAGAIGCELLKVFALVGLGAGNSGGLTVVDMDHIERSNLSRQFLFRSQDVGVSADPSPHSCIPDLLPYSFPPNIFLPSSQRPKAEVAAAAARGLNPDLQVIPLTYPLDPTTEHIYGDNFFSRVDGVAAALDSFQARRYVAARCTHYLKPLLEAGTSGTWGSATVFMPHVTEAYRAPASAAASEDAPYPVCTVRYFPSTAEHTLQWARHEFEELFRLSAETINHHQQAHTSLADMDEPQTLTLLKPVLGVLRVRPQNWQDCVAWALGHWKLCFHYGIKQLLRHFPPNKVLEDGTPFWSGPKQCPQPLEFDTNQDTHLLYVLAAANLYAQMHGLPGSQDWTALRELLKLLPQPDPQQMAPIFASNLELASASAEFGPEQQKELNKALEVWSVGPPLKPLMFEKDDDSNFHVDFVVAAASLRCQNYGIPPVNRAQSKRIVGQIIPAIATTTAAVAGLLGLELYKVVSGPRPRSAFRHSYLHLAENYLIRYMPFAPAIQTFHHLKWTSWDRLKVPAGQPERTLESLLAHLQEQHGLRVRILLHGSALLYAAGWSPEKQAQHLPLRVTELVQQLTGQAPAPGQRVLVLELSCEGDDEDTAFPPLHYEL

SEQ ID NO: 1032300 - protein, 949 aa, Homo sapiens
MDALDASKLLDEELYSRQLYVLGSPAMQRIQGARVLVSGLQGLGAEVAKNLVLMGVGSLTLHDPHPTCWSDLAAQFLLSEQDLERSRAEASQELLAQLNRAVQVVVHTGDITEDLLLDFQVVVLTAAKLEEQLKVGTLCHKHGVCFLAADTRGLVGQLFCDFGEDFTVQDPTEAEPLTAAIQHISQGSPGILTLRKGANTHYFRDGDLVTFSGIEGMVELNDCDPRSIHVREDGSLEIGDTTTFSRYLRGGAITEVKRPKTVRHKSLDTALLQPHVVAQSSQEVHHAHCLHQAFCALHKFQHLHGRPPQPWDPVDAETVVGLARDLEPLKRTEEEPLEEPLDEALVRTVALSSAGVLSPMVAMLGAVAAQEVLKAISRKFMPLDQWLYFDALDCLPEDGELLPSPEDCALRGSRYDGQIAVFGAGFQEKLRRQHYLLVGAGAIGCELLKVFALVGLGAGNSGGLTVVDMDHIERSNLSRQFLFRSQDVGRPKAEVAAAAARGLNPDLQVIPLTYPLRPTEPLPQLQLLRMPPTLSVPCGTSLAQPSTPCSGPGMEFEELFRLSAETINHHQQAHTSLADMDEPQTLTLLKPVLGVLRVRPQNWQDCVAWALGHWKLCFHYGIKQLLRHFPPNKVLEDGTPFWSGPKQCPQPLEFDTNQDTHLLYVLAAANLYAQMHGLPGSQDWTALRELLKLLPQPDPQQMAPIFASNLELASASAEFGPEQQKELNKALEVWSVGPPLKPLMFEKDDDSNFHVDFVVAAASLRCQNYGIPPVNRAQSKRIVGQIIPAIATTTAAVAGLLGLELYKVVSGPRPRSAFRHSYLHLAENYLIRYMPFAPAIQTFHHLKWTSWDRLKVPAGQPERTLESLLAHLQEQHGLRVRILLHGSALLYAAGWSPEKQAQHLPLRVTELVQQLTGQAPAPGQRVLVLELSCEGDDEDTAFPPLHYEL

SEQ ID NO: 1032301 - protein, 883 aa, Homo sapiens
MEVPGTHPGDSCYTPTPQICAGSCTQISEASWTAVWYLGILWWCCAGWQQGQAFPPRLLLPLLWNRVDGGWLEGFESGVELRLGLLMPTESYQQVDAETVVGLARDLEPLKRTEEEPLEEPLDEALVRTVALSSAGVLSPMVAMLGAVAAQEVLKVGRGIGVGGTGKMWRSVCVSEGTQLLESSPGAFTNLGEASSQDLRGGQEVAGVPSLKCCPQAISRKFMPLDQWLYFDALDCLPEDGELLPSPEDCALRGSRYDGQIAVFGAGFQEKLRRQHYLLVGAGAIGCELLKVFALVGLGAGNSGGLTVVDMDHIERSNLSRQFLFRSQDVGVSADPSPHSCIPDLLPYSFPPNIFLPSSQRPKAEVAAAAARGLNPDLQVIPLTYPLDPTTEHIYGDNFFSRVDGVAAALDSFQARRYVAARCTHYLKPLLEAGTSGTWGSATVFMPHVTEAYRAPASAAASEDAPYPVCTVRYFPSTAEHTLQWARHEFEELFRLSAETINHHQQAHTSLADMDEPQTLTLLKPVLGVLRVRPQNWQDCVAWALGHWKLCFHYGIKQLLRHFPPNKVLEDGTPFWSGPKQCPQPLEFDTNQDTHLLYVLAAANLYAQMHGLPGSQDWTALRELLKLLPQPDPQQMAPIFASNLELASASAEFGPEQQKELNKALEVWSVGPPLKPLMFEKDDDSNFHVDFVVAAASLRCQNYGIPPVNRAQSKRIVGQIIPAIATTTAAVAGLLGLELYKVVSGPRPRSAFRHSYLHLAENYLIRYMPFAPAIQTFHHLKWTSWDRLKVPAGQPERTLESLLAHLQEQHGLRVRILLHGSALLYAAGWSPEKQAQHLPLRVTELVQQLTGQAPAPGQRVLVLELSCEGDDEDTAFPPLHYEL

SEQ ID NO: 1032302 - protein, 275 aa, Homo sapiens [sequence omitted]

SEQ ID NO: 1032303 - protein, 1122 aa, Homo sapiens
MDALDASKLLDEELYSRQLYVLGSPAMQRIQGARVLVSGLQGLGAEVAKNLVLMGVGSLTLHDPHPTCWSDLAAQFLLSEQDLERSRAEASQELLAQLNRAVQVVVHTGDITEDLLLDFQVVVLTAAKLEEQLKVGTLCHKHGVCFLAADTRGLVGQLFCDFGEDFTVQDPTEAEPLTAAIQHISQGSPGILTLRKGANTHYFRDGDLVTFSGIEGMVELNDCDPRSIHVREDGSLEIGDTTTFSRYLRGGAITEVKRPKTVRHKSLDTALLQPHVVAQSSQEVHHAHCLHQAFCALHKFQHLHGRPPQPWDPVDAETVVGLARDLEPLKRTEEEPLEEPLDEALVRTVALSSAGVLSPMVAMLGAVAAQEVLKAISRKFMPLDQWLYFDALDCLPEDGELLPSPEDCALRGSRYDGQIAVFGAGFQEKLRRQHYLLVGAGAIGCELLKVFALVGLGAGNSGGLTVVDMDHIERSNLSRQFLFRSQDVGRPKAEVAAAAARGLNPDLQVIPLTYPLDPTTEHIYGDNFFSRVDGVAAALDSFQARRYVAARCTHYLKPLLEAGTSGTWGSATVFMPHVTEAYRAPASAAASEDAPYPVCTVRYFPSTAEHTLQWARHEFEELFRLSAETINHHQQAHTSLADMDEPQTLTLLKPVLGVLRVRPQNWQDCVAWALGHWKLCFHYGIKQLLRHFPPNKVLEDGTPFWSGPKQCPQPLEFDTNQDTHLLYVLAAANLYAQMHGLPGSQDWTALRELLKLLPQPDPQQMAPIFASNLELASASAEFGPEQQKELNKALEVWSVGPPLKPLMFEKDDDSNFHVDFVVAAASLRCQNYGIPPVNRAQSKRIVGQIIPAIATTTAAVAGLLGLELYKVVSGPRPRSAFRHSYLHLAENYLIRYMPFAPAIQTFHHLKWTSWDRLKVPAGQPERTLESLLAHLQEQHGLRVRILLHGSALLYAAGWSPEKQAQHLPLRVTELVQQLTGQAPAPGQRVLVLELSCEGVPSPWSLTPTKTHTSSTYWQLPTCMPRCMGCLAHRTGLHSGSCCSCCHSLTPEVAKNLVLMGVGSLTLHDPHPTCWSDLAAQFLLSEQDLERSRAEASQELLAQLNRAVQVVVHTGDITEDLLL

SEQ ID NO: 1032304 - protein, 1102 aa, Homo sapiens
MDALDASKLLDEELYSRQLYVLGSPAMQRIQGARVLVSGLQGLGAEVAKNLVLMGVGSLTLHDPHPTCWSDLAAQFLLSEQDLERSRAEASQELLAQLNRAVQVVVHTGDITEDLLLDFQVVVLTAAKLEEQLKVGTLCHKHGVCFLAADTRGLVGQLFCDFGEDFTVQDPTEAEPLTAAIQHISQGSPGILTLRKGANTHYFRDGDLVTFSGIEGMVELNDCDPRSIHVREDGSLEIGDTTTFSRYLRGGAITEVKRPKTVRHKSLDTALLQPHVVAQSSQEVHHAHCLHQAFCALHKFQHLHGRPPQPWDPVDAETVVGLARDLEPLKRTEEEPLEEPLDEALVRTVALSSAGVLSPMVAMLGAVAAQEVLKVGRGIGVGGTGKMWRSVCVSEGTQLLESSPGAFTNLGEASSQDLRGGQEVAGVPSLKCCPQAISRKFMPLDQWLYFDALDCLPEDGELLPSPEDCALRGSRYDGQIAVFGAGFQEKLRRQHYLLVGAGAIGCELLKVFALVGLGAGNSGGLTVVDMDHIERSNLSRQFLFRSQDVGVSADPSPHSCIPDLLPYSFPPNIFLPSSQRPKAEVAAAAARGLNPDLQVIPLTYPLDPTTEHIYGDNFFSRVDGVAAALDSFQARRYVAARCTHYLKPLLEAGTSGTWGSATVFMPHVTEAYRAPASAAASEDAPYPVCTVRYFPSTAEHTLQWARHEFEELFRLSAETINHHQQAHTSLADMDEPQTLTLLKPVLGVLRVRPQNWQDCVAWALGHWKLCFHYGIKQLLRHFPPNKVLEDGTPFWSGPKQCPQPLEFDTNQDTHLLYVLAAANLYAQMHGLPGSQDWTALRELLKLLPQPDPQQMAPIFASNLELASASAEFGPEQQKELNKALEVWSVGPPLKPLMFEKDDDSNFHVDFVVAAASLRCQNYGIPPVNRAQSKRIVGQIIPAIATTTAAVAGLLGLELYKVVSGPRPRSAFRHSYLHLAENYLIRYMPFAPAIQTFHHLKWTSWDRLKVPAGQPERTLESLLAHLQEQHGLRVRILLHGSALLYAAGWSPEKQAQHLPLRVTELVQQLTGQAPAPGQRVLVLELSCEGDDEDTAFPPLHYEL

SEQ ID NO: 1032305 - protein, 987 aa, Homo sapiens
MDALDASKLLDEELYSRQLYVLGSPAMQRIQGARVLVSGLQGLGAEVAKNLVLMGVGSLTLHDPHPTCWSDLAAQFLLSEQDLERSRAEASQELLAQLNRAVQVVVHTGDITEDLLLDFQVVVLTAAKLEEQLKVGTLCHKHGVCFLAADTRGLVGQLFCDFGEDFTVQDPTEAEPLTAAIQHISQGSPGILTLRKGANTHYFRDGDLVTFSGIEGMVELNDCDPRSIHVREDGSLEIGDTTTFSRYLRGGAITEVKRPKTVRHKSLDTALLQPHVVAQSSQEVHHAHCLHQAFCALHKFQHLHGRPPQPWDPVDAETVVGLARDLEPLKRTEEEPLEEPLDEALVRTVALSSAGVLSPMVAMLGAVAAQEVLKAISRKFMPLDQWLYFDALDCLPEDGELLPSPEDCALRGSRYDGQIAVFGAGFQEKLRRQHYLLVGAGAIGCELLKVFALVGLGAGNSGGLTVVDMDHIERSNLSRQFLFRSQDVGRPKAEVAAAAARGLNPDLQVIPLTYPLDPTTEHIYGDNFFSRVDGVAAALDSFQARRYVAARCTHYLKPLLEAGTSGTWGSATVFMPHVTEAYRAPASAAASEDAPYPVCTVRYFPSTAEHTLQWARHEFEELFRLSAETINHHQQAHTSLADMDEPQTLTLLKPVLGVLRVRPQNWQDCVAWALGHWKLCFHYGIKQLLRHFPPNKDTHLLYVLAAANLYAQMHGLPGSQDWTALRELLKLLPQPDPQQMAPIFASNLELASASAEFGPEQQKELNKALEVWSVGPPLKPLMFEKDDDSNFHVDFVVAAASLRCQNYGIPPVNRAQSKRIVGQIIPAIATTTAAVAGLLGLELYKVVSGPRPRSAFRHSYLHLAENYLIRYMPFAPAIQTFHHLKWTSWDRLKVPAGQPERTLESLLAHLQEQHGLRVRILLHGSALLYAAGWSPEKQAQHLPLRVTELVQQLTGQAPAPGQRVLVLELSCEGDDEDTAFPPLHYEL

SEQ ID NO: 1032306 - protein, 302 aa, Homo sapiens [sequence omitted]

SEQ ID NO: 1032307 - protein, 214 aa, Homo sapiens
ALSEAAGALLWVSSGSTTPSSPTLTTGPCDGSSVSLCGPHSPISCAGPGLDGEGAETLGPDPTSPPPPTPWLLFPASPALPLGKAAGNWDGGWGEEEVSDSSSTSSQFHHLKWTSWDRLKVPAGQPERTLESLLAHLQEQHGLRVRILLHGSALLYAAGWSPEKQAQHLPLRVTELVQQLTGQAPAPGQRVLVLELSCEGDDEDTAFPPLHYEL

SEQ ID NO: 1032308 - protein, 739 aa, Homo sapiens
MASILLRSCRGRAPARLPPPPRYTVPRGSPGDPAHLSCASTLGLRNCLNVPFGCCTPIHPVYTSSRGDHLGCWALRPECLRIVSRAPWTSTSVGFVAVGPQCLPVRGWHSSRPVRDDSVVEKSLKSLKDKNKKLEEGGPVYSPPAEVVVKKSLGQRVLDELKHYYHGFRLLWIDTKIAARMLWRILNGHSLTRRERRQFLRICADLFRLVPFLVFVVVPFMEFLLPVAVKLFPNMLPSTFETQSLKEERLKKELRVKLELAKFLQDTIEEMALKNKAAKGSATKDFSVFFQKIRETGERPSNEEIMRFSKLFEDELTLDNLTRPQLVALCKLLELQSIGTNNFLRFQLTMRLRSIKADDKLIAEEGVDSLNVKELQAACRARGMRALGVTEDRLRGQLKQWLDLHLHQEIPTSLLILSRAMYLPDTLSPADQLKSTLQTLPEIVAKEAQVKVAEVEGEQVDNKAKLEATLQEEAAIQQEHREKELQKRSEVAKDFEPERVVAAPQRPGTEPQPEMPDTVLQSETLKDTAPVLEGLKEEEITKEEIDILSDACSKLQEQKKSLTKEKEELELLKEDVQDYSEDLQEIKKELSKTGEEKYVEESKASKRLTKRVQQMIGQIDGLISQLEMDQQAGKLAPANGMPTGENVISVAELINAMKQVKHIPESKLTSLAAALDENKDGKVNIDDLVKVIELVDKEDVHISTSQVAEIVATLEKEEKVEEKEKAKEKAEKEVAEVKS

SEQ ID NO: 1032309 - protein, 297 aa, Homo sapiens
DAWVDPRRASYPTRCGPRRPGPTLSATLQEEAAIQQEHREKELQKRSEVAKDFEPERVVAAPQRPGTEPQPEMPDTVLQSETLKDTAPVLEGLKEEEITKEEIDILSDACSKLQEQKKSLTKEKEELELLKEDVQDYSEDLQEIKKELSKTGEEKYVEESKASKRLTKRVQQMIGQIDGLISQLEMDQQAGKLAPANGMPTGENVISVAELINAMKQVKHIPESKLTSLAAALDENKDGKVNIDDLVKVIELVDKEDVHISTSQVAEIVATLEKEEKVEEKEKAKEKAEKEVAEVKS

SEQ ID NO: 1032310 - protein, 254 aa, Homo sapiens
MRHTWPFRNVPFGCCTPIHPVYTSSRGDHLGCWALRPECLRIVSRAPWTSTSVGFVAVGPQCLPVRGWHSSRPVRDDSVVEKSLKSLKDKNKKLEEGGPVYSPPAEVVVKKSLGQRVLDELKHYYHGFRLLWIDTKIAARMLWRILNGHSLTRRERRQFLRICADLFRLVPFLVFVVVPFMEFLLPVAVKLFPNMLPSTFETQSLKEERLKKELRVKLELAKFLQDTIEEMALKNKAAKGSATKDFSVFFQKVL

SEQ ID NO: 1032311 - protein, 739 aa, Homo sapiens; identical to SEQ ID NO: 1032308

SEQ ID NO: 1032312 - protein, 85 aa, Homo sapiens
MPSVTQRLRDPDINPCLSESDASTRCLDENNYDRERCSTYFLRYKNCRRFWNSIVMQRRKNGVKPFMPTAAERDEILRAVGNMPY

SEQ ID NO: 1032313 - protein, 158 aa, Homo sapiens
MDVFGAGDGLGAGEAEAGVNTRGTHAKEGTFGNPNLECLVFRIRKEKEMKCEETHAPNSNWVYVMLPSKKTVRMPSVTQRLRDPDINPCLSESDASTRCLDENNYDRERCSTYFLRYKNCRRFWNSIVMQRRKNGVKPFMPTAAERDEILRAVGNMPY

SEQ ID NO: 1032314 - protein, 85 aa, Homo sapiens; identical to SEQ ID NO: 1032312

SEQ ID NO: 1032315 - protein, 158 aa, Homo sapiens; identical to SEQ ID NO: 1032313

SEQ ID NO: 1032316 - protein, 128 aa, Homo sapiens
MDVFGAGDGLGAGEAEAGVNTRGTHAKEGTFGNPNLECLVFRIRKEKEMKCEETHAPNSNWESDASTRCLDENNYDRERCSTYFLRYKNCRRFWNSIVMQRRKNGVKPFMPTAAERDEILRAVGNMPY

SEQ ID NO: 1032317 - protein, 85 aa, Homo sapiens; identical to SEQ ID NO: 1032312

SEQ ID NO: 1032318 - protein, 117 aa, Homo sapiens
RATLVLVLGLEIWMDDNQGFSQPQLREGALVARAPQPCNGGIFLFYFFVGDRLECSGAISVRCNLCFPGSSDSPASASQVAGITGTHHHARLILVFKVEHRVSLMWARLSLNSVTSG

SEQ ID NO: 1032319 - protein, 117 aa, Homo sapiens; identical to SEQ ID NO: 1032318

SEQ ID NO: 1032320 - protein, 117 aa, Homo sapiens; identical to SEQ ID NO: 1032318

SEQ ID NO: 1032321 - protein, 117 aa, Homo sapiens; identical to SEQ ID NO: 1032318

SEQ ID NO: 1032322 - protein, 117 aa, Homo sapiens; identical to SEQ ID NO: 1032318

SEQ ID NO: 1032323 - protein, 327 aa, Homo sapiens
MVSTTSWLYLPGWFFFLLFFLFLDGDNAAEPPALVTFLAIPSAVVTGRASSSSTDMVARGLVAGGARKPGGRAGKRKARGRGGAGGLGARGGSRRERPRPGLGPGGRAGVGAGPGRSEGWGARSRGRTRGPSWGSETESEPAAGAGDVDLGRAGAKRNPAERETPPPQLPLAPLELAGRARCASGGRALLSAFYSFMADHVENNNSLVRGQRQLVLLGAPSPAAGFSDRASPAPPRPQRGAPDRAWAPGAVERRLASWKGSAKANGEVHPRLRERERRGAPRLEANSAGPRGGPTAGSLAAGSPENATGTRALSRPGGLQACPQEEL

SEQ ID NO: 1032324 - protein, 81 aa, Homo sapiens
MVSTTSWLYLPGWFFFLLFFLFLDGDNAAEPPALVTFLAIPSAVVTGRASSSSTDMVARGLVAGGARKPGGRLLPFLPPAA

SEQ ID NO: 1032325 - protein, 327 aa, Homo sapiens; identical to SEQ ID NO: 1032323

SEQ ID NO: 1032326 - protein, 327 aa, Homo sapiens; identical to SEQ ID NO: 1032323

SEQ ID NO: 1032327 - protein, 102 aa, Homo sapiens
MGWEQETQKSRPWNQVEGRQPGHDPEQDTCSTSPFAMSKSSLRPPKKLMPCASCTAAEPDGFPWLCYSHSWKCCLTESSGHPGRMDVVVPPTLQMGKLRLES

SEQ ID NO: 1032328 - protein, 327 aa, Homo sapiens; identical to SEQ ID NO: 1032323

SEQ ID NO: 1032329 - protein, 327 aa, Homo sapiens; identical to SEQ ID NO: 1032323

SEQ ID NO: 1032330 - protein, 327 aa, Homo sapiens; identical to SEQ ID NO: 1032323

SEQ ID NO: 1032331 - protein, 327 aa, Homo sapiens
MVSTTSWLYLPGWFFFLLFFLFLDGDNAAEPPALVTFLAIPSAVVTGRASSSSTDMVARGLVAGGARKPGGRAGKRKARGRGGAGGLGARGGSRRERPRPGLGPGGRAGVGAGPGRSEGWGARSRGRTRGPSWGSETESEPAAGAGDVDLGRAGAKRNPAERETPPPQLPLAPLELAGRARCASGGRALLSAFYSFMADHVENNNSLVRGQRQLVLLGAPSPAAGFSDRASPAPPRPQRGAPDRARAPGAVERRLASWKGSAKANGEVHPRLRERERRGAPRLEANSAGPRGGPTAGSLAAGSPENATGTRALSRPGGLQACPQEEL

SEQ ID NO: 1032332 - protein, 327 aa, Homo sapiens; identical to SEQ ID NO: 1032323

SEQ ID NO: 1032333 - protein, 327 aa, Homo sapiens; identical to SEQ ID NO: 1032323

SEQ ID NO: 1032334 - protein, 137 aa, Homo sapiens
MALLSQEGLAEWTVSRAQDNVEGLRPHLLEEGPCEFPDRERGWVSESTTQLSLPKLHSCFQARLAAWRRERNSQLCVLGPLIRVLRTRSLLRMCRGDSGERNMVATAGVTAVYRDGMGAGNPKEPALEPGGGEAARP

SEQ ID NO: 1032335 - protein, 327 aa, Homo sapiens; identical to SEQ ID NO: 1032331

SEQ ID NO: 1032336 - protein, 327 aa, Homo sapiens; identical to SEQ ID NO: 1032331

SEQ ID NO: 1032337 - protein, 327 aa, Homo sapiens; identical to SEQ ID NO: 1032323

SEQ ID NO: 1032338 - protein, 327 aa, Homo sapiens; identical to SEQ ID NO: 1032323

SEQ ID NO: 1032339 - protein, 114 aa, Homo sapiens
APPLSVPGVCCFFLKGLNALLCPKKGPWNEGKSRAALSPERLFVAHPKARRVGSWERMRGLRVPRAASNHDDGRCQGREPIEASPGLFQKPKANNEKRYIVGGGERLRGPGAPP

SEQ ID NO: 1032340 - protein, 185 aa, Homo sapiens
MVKLGNNFAEKGTKQPLLEDGFDTIPLMTPLDVNQLQFPPPDKVVVKTKTEYEPDRKKGKARPPQIAEFTVSITEGVTERFKVSVLVLFALAFLTCVVFLVVYKVYKYDRACPDGFVLKNTQCIPEGLESYYAEQDSSAREKFYTVINHYNLAKQSITRSVSPWMSVLSEEKLSEQETEAAEKSA

SEQ ID NO: 1032341 - protein, 185 aa, Homo sapiens; identical to SEQ ID NO: 1032340

SEQ ID NO: 1032342 - protein, 185 aa, Homo sapiens; identical to SEQ ID NO: 1032340

SEQ ID NO: 1032343 - protein, 185 aa, Homo sapiens; identical to SEQ ID NO: 1032340

SEQ ID NO: 1032344 - protein, 185 aa, Homo sapiens; identical to SEQ ID NO: 1032340

SEQ ID NO: 1032345 - protein, 185 aa, Homo sapiens; identical to SEQ ID NO: 1032340

SEQ ID NO: 1032346 - protein, 185 aa, Homo sapiens; identical to SEQ ID NO: 1032340

SEQ ID NO: 1032347 - protein, 130 aa, Homo sapiens
MSISCSSRPQIAEFTVSITEGVTERFKVSVLVLFALAFLTCVVFLVVYKVYKYDRACPDGFVLKNTQCIPEGLESYYAEQDSSAREKFYTVINHYNLAKQSITRSVSPWMSVLSEEKLSEQETEAAEKSA

SEQ ID NO: 1032348 - protein, 141 aa, Homo sapiens
MVKLGNNFAEKGTKQPLLEDGFDTIPLMTPLDVNQLQFPPPDKVVVKTKTEYEPDRKKGKARPPQIAEFTVSITEGVTERFKVSVLVLFALAFLTCVVFLVVYKVYKYDRACPDGFVLKNTQCIPEEKLSEQETEAAEKSA

SEQ ID NO: 1032349 - protein, 185 aa, Homo sapiens; identical to SEQ ID NO: 1032340

SEQ ID NO: 1032350 - protein, 185 aa, Homo sapiens; identical to SEQ ID NO: 1032340

SEQ ID NO: 1032351 - protein, 185 aa, Homo sapiens; identical to SEQ ID NO: 1032340

SEQ ID NO: 1032352 - protein, 81 aa, Homo sapiens
KPCACPKWNCPGNNNNDIFTPGRQVPKLSSIPHVGAGNAFPVTDVLMPFKLHIGVPVYSSWRSEAQAREKQARSSVAHFFL

SEQ ID NO: 1032353 - protein, 92 aa, Homo sapiens
MAISINIIFPVFQKKISQFANVRNHFAGPAGEVALWAGGSGGTASSNGCHRPRRPPATPSDRCSASSRSLTLARNSSVISTAIATRTLSPTL

SEQ ID NO: 1032354 - protein, 185 aa, Homo sapiens; identical to SEQ ID NO: 1032340

SEQ ID NO: 1032355 - protein, 185 aa, Homo sapiens; identical to SEQ ID NO: 1032340

SEQ ID NO: 1032356 - protein, 185 aa, Homo sapiens; identical to SEQ ID NO: 1032340

SEQ ID NO: 1032357 - protein, 185 aa, Homo sapiens; identical to SEQ ID NO: 1032340

SEQ ID NO: 1032358 - protein, 185 aa, Homo sapiens; identical to SEQ ID NO: 1032340

SEQ ID NO: 1032359 - protein, 185 aa, Homo sapiens; identical to SEQ ID NO: 1032340

SEQ ID NO: 1032360 - protein, 185 aa, Homo sapiens; identical to SEQ ID NO: 1032340

SEQ ID NO: 1032361 - protein, 119 aa, Homo sapiens
MVKLGNNFAEKGTKQPLLEDGFDTIPLMTPLDVNQLQFPPLRSPCWSSSPWPSSPASSSWLSTRCTSMTAPAPMGSSSRTPSASQKRSCPSRRLKRLRSQLSGMGKFLTMCHLQITKGL

SEQ ID NO: 1032362 - protein, 185 aa, Homo sapiens; identical to SEQ ID NO: 1032340

SEQ ID NO: 1032363 - protein, 185 aa, Homo sapiens; identical to SEQ ID NO: 1032340

SEQ ID NO: 1032364 - protein, 92 aa, Homo sapiens; identical to SEQ ID NO: 1032353

SEQ ID NO: 1032365 - protein, 171 aa, Homo sapiens
MENSQLCKLFIGGLNVQTSESGLRGHFEAFGTLTDCVVVVNPQTKRSRCFGFVTYSNVEEADAAMAASPHAVNGLSKGGGGGYNSYGGYGGGGGGGYNAYGGGGGGSSYGGSDYGNGFGGFGSYSQHQSSYGPMKSGGGGGGGGSSWGGRSNSGPYRGGYGGGGGYGGSSF

SEQ ID NO: 1032366 - protein, 247 aa, Homo sapiens
MENSQLCKLFIGGLNVQTSESGLRGHFEAFGTLTDCVVVVNPQTKRSRCFGFVTYSNVEEADAAMAASPHAVDGNTVELKRAVSREDSARPGAHAKVKKLFVGGLKGDVAEGDLIEHFSQFGTVEKAEIIADKQSGKKRGFGFVYFQNHDAADKAAVVKFHPIQGHRVEVKKAVPKEDIYSGGGGGGSRSSRGEGGAPGETDASGRAGHSTGRAGGGESQEGGAPGGARSGAKTKAWQRGGARASKG

SEQ ID NO: 1032367 - protein, 82 aa, Homo sapiens
MRVSAAHRTVPNVAGRAGAETARPLGTDTPPMAGGEPASTGGTPRHAEGEADPRGGITRARRRAGPTPKGRRTTRPAAKALT

SEQ ID NO: 1032368 - protein, 305 aa, Homo sapiens; identical to SEQ ID NO: 767307

SEQ ID NO: 1032369 - protein, 305 aa, Homo sapiens; identical to SEQ ID NO: 767307

SEQ ID NO: 1032370 - protein, 305 aa, Homo sapiens; identical to SEQ ID NO: 767307

SEQ ID NO: 1032371 - protein, 67 aa, Homo sapiens
TRRGRVGRPTRRENRVLLAMVNPTVFFDIAVDGEPLGRVSFELFADKVPKTAGKFSCSEHWRERIWL

SEQ ID NO: 1032372 - protein, 66 aa, Homo sapiens
LVRGWVRIGRGENRVLLAMVNPTVFFDIAVDGEPLGRVSFELFADKVPKTAGKFSCSEHWRERIWL

SEQ ID NO: 1032373 - protein, 103 aa, Homo sapiens
NFRLGTRLGLNRPRLGILSHGKCWTPTQMGSPVFHLHCPRLKWLDGKHVVFGKVNRRHEYCGGHGALWVPGMARPARRSPLLTVDNSNKFDLCFILTTRSFLL

SEQ ID NO: 1032374 - protein, 165 aa, Homo sapiens; identical to SEQ ID NO: 879533

SEQ ID NO: 1032375 - protein, 165 aa, Homo sapiens; identical to SEQ ID NO: 879533

SEQ ID NO: 1032376 - protein, 165 aa, Homo sapiens; identical to SEQ ID NO: 879533

SEQ ID NO: 1032377 - protein, 165 aa, Homo sapiens; identical to SEQ ID NO: 879533

SEQ ID NO: 1032378 - protein, 165 aa, Homo sapiens; identical to SEQ ID NO: 879533

SEQ ID NO: 1032379 - protein, 165 aa, Homo sapiens; identical to SEQ ID NO: 879533

SEQ ID NO: 1032380 - protein, 69 aa, Homo sapiens
YGRYEAGVESDEAEENRVLLAMVNPTVFFDIAVDGEPLGRVSFELFADKVPKTAGKFSCSEHWRERIWL

SEQ ID NO: 1032381 - protein, 69 aa, Homo sapiens; identical to SEQ ID NO: 1032380

SEQ ID NO: 1032382 - protein, 69 aa, Homo sapiens; identical to SEQ ID NO: 1032380

SEQ ID NO: 1032383 - protein, 69 aa, Homo sapiens; identical to SEQ ID NO: 1032380

SEQ ID NO: 1032384 - protein, 69 aa, Homo sapiens; identical to SEQ ID NO: 1032380

SEQ ID NO: 1032385 - protein, 69 aa, Homo sapiens; identical to SEQ ID NO: 1032380

SEQ ID NO: 1032386 - protein, 69 aa, Homo sapiens; identical to SEQ ID NO: 1032380

SEQ ID NO: 1032387 - protein, 69 aa, Homo sapiens; identical to SEQ ID NO: 1032380

SEQ ID NO: 1032388 - protein, 69 aa, Homo sapiens; identical to SEQ ID NO: 1032380

SEQ ID NO: 1032389 - protein, 69 aa, Homo sapiens; identical to SEQ ID NO: 1032380

SEQ ID NO: 1032390 - protein, 69 aa, Homo sapiens; identical to SEQ ID NO: 1032380

SEQ ID NO: 1032391 - protein, 84 aa, Homo sapiens
GFFVWQTPPPENRVLLAMVNPTVFFDIAVDGEPLGRVSFELFADKVPKTAGFTELFQGLCVRVVTSHAIMALVASPSMGRNFER

SEQ ID NO: 1032392 - protein, 69 aa, Homo sapiens; identical to SEQ ID NO: 1032380

SEQ ID NO: 1032393 - protein, 86 aa, Homo sapiens
VLLMCQMYQISCLGITTNERMNARRYKHFKVTTTSIESPFNHGCVRNIIDFFEFRCCGLFRPVIVDWTRQYTIEYDQISGSGYQLV

SEQ ID NO: 1032394 - protein, 69 aa, Homo sapiens; identical to SEQ ID NO: 1032380

SEQ ID NO: 1032395 - protein, 69 aa, Homo sapiens; identical to SEQ ID NO: 1032380

SEQ ID NO: 1032396 - protein, 86 aa, Homo sapiens; identical to SEQ ID NO: 1032393

SEQ ID NO: 1032397 - protein, 69 aa, Homo sapiens; identical to SEQ ID NO: 1032380

SEQ ID NO: 1032398 - protein, 69 aa, Homo sapiens; identical to SEQ ID NO: 1032380

SEQ ID NO: 1032399 - protein, 69 aa, Homo sapiens; identical to SEQ ID NO: 1032380

SEQ ID NO: 1032400 - protein, 86 aa, Homo sapiens; identical to SEQ ID NO: 1032393

SEQ ID NO: 1032401 - protein, 68 aa, Homo sapiens
GNDLRLGTRPGWRENRVLLAMVNPTVFFDIAVDGEPLGRVSFELFADKVPKTAGKFSCSEHWRERIWL

SEQ ID NO: 1032402 - protein, 69 aa, Homo sapiens; identical to SEQ ID NO: 1032380

SEQ ID NO: 1032403 - protein, 69 aa, Homo sapiens; identical to SEQ ID NO: 1032380

SEQ ID NO: 1032404 - protein, 69 aa, Homo sapiens; identical to SEQ ID NO: 1032380

SEQ ID NO: 1032405 - protein, 69 aa, Homo sapiens; identical to SEQ ID NO: 1032380

SEQ ID NO: 1032406 - protein, 69 aa, Homo sapiens; identical to SEQ ID NO: 1032380

SEQ ID NO: 1032407 - protein, 69 aa, Homo sapiens; identical to SEQ ID NO: 1032380

SEQ ID NO: 1032408 - protein, 69 aa, Homo sapiens; identical to SEQ ID NO: 1032380

SEQ ID NO: 1032409 - protein, 69 aa, Homo sapiens; identical to SEQ ID NO: 1032380

SEQ ID NO: 1032410 - protein, 69 aa, Homo sapiens; identical to SEQ ID NO: 1032380

SEQ ID NO: 1032411 - protein, 103 aa, Homo sapiens
MVSLTCYRYAYSLLPLTTCYGTSSTKLSHIGTWVTERFCKKCQMIVRDASDYWIISGLEVHRRSLLVITTMNIHSPRLCVRVVTSHAIMALVASPSMGRNFER

SEQ ID NO: 1032412 - protein, 69 aa, Homo sapiens; identical to SEQ ID NO: 1032380

SEQ ID NO: 1032413 - protein, 86 aa, Homo sapiens; identical to SEQ ID NO: 1032393

SEQ ID NO: 1032414 - protein, 72 aa, Homo sapiens
TRRGRVGRPTRRCLQTRSQRQQENFRALSTGEKGFGYKGSCFHRIIPGFMCQGGDFTRHNGTGGKSIYGEKF

SEQ ID NO: 1032415 - protein, 69 aa, Homo sapiens; identical to SEQ ID NO: 1032380

SEQ ID NO: 1032416 - protein, 69 aa, Homo sapiens; identical to SEQ ID NO: 1032380

SEQ ID NO: 1032417 - protein, 69 aa, Homo sapiens; identical to SEQ ID NO: 1032380

SEQ ID NO: 1032418 - protein, 86 aa, Homo sapiens; identical to SEQ ID NO: 1032393

SEQ ID NO: 1032419 - protein, 165 aa, Homo sapiens; identical to SEQ ID NO: 879533

SEQ ID NO: 1032420 - protein, 165 aa, Homo sapiens; identical to SEQ ID NO: 879533

SEQ ID NO: 1032421 - protein, 165 aa, Homo sapiens; identical to SEQ ID NO: 879533

SEQ ID NO: 1032422 - protein, 165 aa, Homo sapiens; identical to SEQ ID NO: 879533

SEQ ID NO: 1032423 - protein, 165 aa, Homo sapiens; identical to SEQ ID NO: 879533

SEQ ID NO: 1032424 - protein, 254 aa, Homo sapiens
SAAVVGVLPASLVFPSCGFGRGNEHGSPACHCLPPASSEASLCPAAQVTFRKTLEKEAKGEEPDIAVPKFKQRKGESDGAYIHRMQQEAQHVLFLSKNQAIRQPEVQAAPKEKSEQKKAKKAWWRREGEGSALGAGGKTLGSHDGPLQVPCFIAMGQPGFRETKPEPWELASRSIQLGASEGVASRRLRNLGTLRRPRLVLAFTGKAPESPSPVGISPEGVGLRVTCPGVLFPLEQNVSRPRDYTFLIYVPNSC

SEQ ID NO: 1032425 - protein, 301 aa, Homo sapiens
GSGFSREPPGVEMAGAGRGAAVSRVQAGPGSPRRARGRQQVQPLGKQRPAPWPGLRSKEKKKVNCKPKNQDEQEIPFRLREIMRSRQEMKNPISNKKRKKAAQVTFRKTLEKEAKGEEPDIAVPKFKQRKGESDGAYIHRMQQEAQHVLFLSKNQAIRQPEVQAAPKEKSEQKKAKKAFQKRRLDKVRRKKEEKAADRLEQELLRDTVKFGEVVLQPPELTARPQRSVSKDQPGRRSQMLRMLLSPGGVSQPLTASLARQRIVEEERERAVQAYRALKQRQQQLHGERPHLTSRKKPEPQL

SEQ ID NO: 1032426 - protein, 225 aa, Homo sapiens
SVEAAAAAAARGATPPHFPEEARAAAQVTFRKTLEKEAKGEEPDIAVPKFKQRKGESDGAYIHRMQQEAQHVLFLSKNQAIRQPEVQAAPKEKSEQKKAKKAFQKRRLDKVRRKKEEKAADRLEQELLRDTVKFGEVVLQPPELTARPQRSVSKDQPGRRSQMLRMLLSPGGVSQPLTASLARQRIVEEERERAVQAYRALKQRQQQLHGERPHLTSRKKPEPQL

SEQ ID NO: 1032427 - protein, 245 aa, Homo sapiens
SAAVVGVLPASLVFPSCGFGRGNEHGSPACHCLPPASSEASLCPAAQVTFRKTLEKEAKGEEPDIAVPKFKQRKGESDGAYIHRMQQEAQHVLFLSKNQAIRQPEVQAAPKEKSEQKKAKKAFQKRRLDKVRRKKEEKAADRLEQELLRDTVKFGEVVLQPPELTARPQRSVSKDQPGRRSQMLRMLLSPGGVSQPLTASLARQRIVEEERERAVQAYRALKQRQQQLHGERPHLTSRKKPEPQL

SEQ ID NO: 1032428 - protein, 301 aa, Homo sapiens; identical to SEQ ID NO: 1032425

SEQ ID NO: 1032429 - protein, 310 aa, Homo sapiens
GSGFSREPPGVEMAGAGRGAAVSRVQAGPGSPRRARGRQQVQPLGKQRPAPWPGLRSKEKKKVNCKPKNQDEQEIPFRLREIMRSRQEMKNPISNKKRKKAAQVTFRKTLEKEAKGEEPDIAVPKFKQRKGESDGAYIHRMQQEAQHVLFLSKNQAIRQPEVQAAPKEKSEQKKAKKASVEAGGGGVCPGSRREDMGSHDGPLQVPCFIAMGQPGFRETKPEPWELASRSIQLGASEGVASRRLRNLGTLRRPRLVLAFTGKAPESPSPVGISPEGVGLRVTCPGVLFPLEQNVSRPRDYTFLIYVPNSC

SEQ ID NO: 1032430 - protein, 301 aa, Homo sapiens; identical to SEQ ID NO: 1032425

SEQ ID NO: 1032431 - protein, 338 aa, Homo sapiens
AEVASLGSLPAWRWRELVAEQRCPGCRRVLGVPGERGGGSKCSRWGSSAQPRGPGFAGDLRCPAEAATLPQRRGRLEGSARDPLGSVRSDPFPSKEKKKVNCKPKNQDEQEIPFRLREIMRSRQEMKNPISNKKRKKAAQVTFRKTLEKEAKGEEPDIAVPKFKQRKGESDGAYIHRMQQEAQHVLFLSKNQAIRQPEVQAAPKEKSEQKKAKKAFQKRRLDKVRRKKEEKAADRLEQELLRDTVKFGEVVLQPPELTARPQRSVSKDQPGRRSQMLRMLLSPGGVSQPLTASLARQRIVEEERERAVQAYRALKQRQQQLHGERPHLTSRKKPEPQL

SEQ ID NO: 1032432 - protein, 131 aa, Homo sapiens [sequence omitted]

SEQ ID NO: 1032433 - protein, 301 aa, Homo sapiens; identical to SEQ ID NO: 1032425

SEQ ID NO: 1032434 - protein, 550 aa, Homo sapiens
AAARRWLLCGGHGGPRAASSSPSCPGCGPPGPGAHCPGVPRSAPAQAPTSGADLSAHLWARYQDMRRLVHDLLPPEVCSLLNPAAIYANNEISLRDVEVYGFDYDYTLAQYADALHPEIFSTARDILIEHYKYPEGIRKYDYNPSFAIRGLHYDIQKSLLMKIDAFHYVQLGTAYRGLQPVPDEEVIELYGGTQHIPLYQMSGFYGKGPSIKQFMDIFSLPEMALLSCVVDYFLGHSLEFDQAHLYKDVTDAIRDVHVKGLMYQWIEQDMEKYILRGDETFAVLSRLVAHGKQLFLITNSPFSFVDKGMRHMVGPDWRQLFDVVIVQADKPSFFTDRRKPFRKLDEKGSLQWDRITRLEKGKIYRQGNLFDFLRLTEWRGPRVLYFGDHLYSDLADLMLRHGWRTGAIIPELEREIRIINTEQYMHSLTWQQALTGLLERMQTYQDAESRQVLAAWMKERQELRCITKALFNAQFGSIFRTFHNPTYFSRRLVRFSDLYMASLSCLLNYRVDFTFYPRRTPLQHEAPLWMDQLCTGCMKTPFLGDMAHIR

SEQ ID NO: 1032435 - protein, 461 aa, Homo sapiens
MRRLVHDLLPPEVCSLLNPAAIYANNEISLRDVEVYGFDYDYTLAQYADALHPEIFSTARDILIEHYKSLLMKIDAFHYVQLGTAYRGLQPVPDEEVIELYGGTQHIPLYQMSGFYGKGPSIKQFMDIFSLPEMALLSCVVDYFLGHSLEFDQAHLYKDVTDAIRDVHVKGLMYQWIEQDMEKYILRGDETFAVLSRLVAHGKQLFLITNSPFSFVDKGMRHMVGPDWRQLFDVVIVQADKPSFFTDRRKPFRKLDEKGSLQWDRITRLEKGKIYRQGNLFDFLRLTEWRGPRVLYFGDHLYSDLADLMLRHGWRTGAIIPELEREIRIINTEQYMHSLTWQQALTGLLERMQTYQDAESRQVLAAWMKERQELRCITKALFNAQFGSIFRTFHNPTYFSRRLVRFSDLYMASLSCLLNYRVDFTFYPRRTPLQHEAPLWMDQLCTGCMKTPFLGDMAHIR

SEQ ID NO: 1032436 - protein, 550 aa, Homo sapiens; identical to SEQ ID NO: 1032434

SEQ ID NO: 1032437 - protein, 550 aa, Homo sapiens; identical to SEQ ID NO: 1032434

SEQ ID NO: 1032438 - protein, 418 aa, Homo sapiens
AERGWLGATVKLPPHHPSCLPGAPKSLLMKIDAFHYVQLGTAYRGLQPVPDEEVIELYGGTQHIPLYQMSGFYGKGPSIKQFMDIFSLPEMALLSCVVDYFLGHSLEFDQAHLYKDVTDAIRDVHVKGLMYQWIEQDMEKYILRGDETFAVLSRLVAHGKQLFLITNSPFSFVDKGMRHMVGPDWRQLFDVVIVQADKPSFFTDRRKPFRKLDEKGSLQWDRITRLEKGKIYRQGNLFDFLRLTEWRGPRVLYFGDHLYSDLADLMLRHGWRTGAIIPELEREIRIINTEQYMHSLTWQQALTGLLERMQTYQDAESRQVLAAWMKERQELRCITKALFNAQFGSIFRTFHNPTYFSRRLVRFSDLYMASLSCLLNYRVDFTFYPRRTPLQHEAPLWMDQLCTGCMKTPFLGDMAHIR

SEQ ID NO: 1032439 - protein, 550 aa, Homo sapiens; identical to SEQ ID NO: 1032434

SEQ ID NO: 1032440 - protein, 478 aa, Homo sapiens
AAARRWLLCGGHGGPRAASSSPSCPGCGPPGPGAHCPGVPRSAPAQAPTSGADLSAHLWARYQDMRRLVHDLLPPEVCSLLNPAAIYANNEISLRDVEVYGFDYDYTLAQYADALHPEIFSTARDILIEHYKYPEGIRKYDYNPSFAIRGLHYDIQKSLLMKIDAFHYVQLGTAYRGLQPVPDEEVIELYGGTQHIPLYQMSGFYGKGPSIKQFMDIFSLPEMALLSCVVDYFLGHSLEFDQAHLYKDVTDAIRDVHVKGLMYQWIEQDMEKYILRGDETFAVLSRLVAHGKQLFLITNSPFSFVDKGMRHMVGPDWRQLFDVVIVQADKPSFFTDRRKPFRKLDEKGSLQWDRITRLEKGKIYRQGNLFDFLRLTEWRGPRVLYFGDHLYSDLADLMLRHGWRTGAIIPELEREIRIINTEQYMHSLTWQQALTGLLDERAAGAEVHHQGPVQCAVRQHLPHLPQPHLLLKAPRALL

SEQ ID NO: 1032441 - protein, 550 aa, Homo sapiens; identical to SEQ ID NO: 1032434

SEQ ID NO: 1032442 - protein, 270 aa, Homo sapiens
TEAGGNLAFAQLPNVLGVRTPLAGMGPLEQVGLYGGGMGVARPVPGHRLEVMPFYLHPRPFRKLDEKGSLQWDRITRLEKGKIYRQGNLFDFLRLTEWRGPRVLYFGDHLYSDLADLMLRHGWRTGAIIPELEREIRIINTEQYMHSLTWQQALTGLLERMQTYQDAESRQVLAAWMKERQELRCITKALFNAQFGSIFRTFHNPTYFSRRLVRFSDLYMASLSCLLNYRVDFTFYPRRTPLQHEAPLWMDQLCTGCMKTPFLGDMAHIR

SEQ ID NO: 1032443 - protein, 563 aa, Homo sapiens
MPPQPPKSSDHKGRWWPGGGKRQPVSPGSAGQCTWHLSARAVAGPSSGPQVVPTPPDTAVHRLRSLRGTHSAVCSGRCSSSWQCSAAAPAVAICAGVAGPAAPAITLVVGQAGTSDHCSYLATVGVLTAATMPVLAQVCHCTHAAIPFIAQAALTAVACTAHSLGCTGWGTHRLQLQLHLTAWPSPAFITEAGARAPKALITAAMHSAAAGLTMGPKGTRSTEFTGCPSNNLNGTDTAHCHSCRPCTRHGHYKGCWAAKGKLALTAIVTRAAAGLPGGGDYNCGGSPCPGLGAYPKGWGGPRRCVIPKSAAEGTSRTSGRSASRPQGCPAPVTPQDRVAPAHRCCRCSVAGAGSQSGHSEHQGQVAPAAGRCHRPGHPQKGKCRCTMRASSSPTMSSPGRVRLQEKEMGVPCMVRSGPRLGRSDAKASTLRIMWPRRMAAELVTVVLMVQPGLAIRRQSSKGGVCGPQHCEGPMGCLSKQGQEAGHLQEAAEDLVTEALGGGGDISPRDGSIIRLPVQRLGGQQDTVNEVQDAVHGLMVAAHHAREVIEVYAALPLAEAQWVP

SEQ ID NO: 1032444 - protein, 177 aa, Homo sapiens
MRASSSPTMSSPGRVRLQEKEMGVPCMVRSGPRLGRSDAKASTLRIMWPRRMAAELVTVVLMVQPGLAIRRQSSKGGVCGPQHCEGPMGCLSKQGQEAGHLQEAAEDLVTEALGGGGDISPRDGSIIRLPVQRLGGQQDTVNEVQDAVHGLMVAAHHAREVIEVYAALPLAEAQWVP

SEQ ID NO: 1032445 - protein, 177 aa, Homo sapiens; identical to SEQ ID NO: 1032444

SEQ ID NO: 1032446 - protein, 510 aa, Homo sapiens
AAARRWLLCGGHGGPRAASSSPSCPGCGPPGPGAHCPGVPRSAPAQAPTSGADLSAHLWARYQDMRRLVHDLLPPEVCSLLNPAAIYANNEISLRDVEVYGFDYDYTLAQYADALHPEIFSTARDILIEHYKYPEGIRKYDYNPSFAIRGLHYDIQKSLLMKIDAFHYVQLGTAYRGLQPVPDEEVIELYGGTQHIPLYQMSGFYGKGPSIKQFMDIFSLPEMALLSCVVDYFLGHSLEFDQAHLYKDVTDAIRDVHVKGLMYQWIEQDMEKYILRGDETFAVLSRLVAHGKQLFLITNSPFSFVDKGMRHMVGPDWRQLFDVVIVQADKPSFFTDRRKPFRKLDEKGSLQWDRITRLEKGKIYRQGNLFDFLRLTEWRGPRVLYFGDHLYSDLADLMLRHGWRTGAIIPELEREIRIINTEQYMHSLTWQQALTGLLERMQTYQDAESRQVLAAWMKERQELSCLLNYRVDFTFYPRRTPLQHEAPLWMDQLCTGCMKTPFLGDMAHIR

SEQ ID NO: 1032447 - protein, 177 aa, Homo sapiens; identical to SEQ ID NO: 1032444

SEQ ID NO: 1032448 - protein, 520 aa, Homo sapiens
MRVESGSAQERGILLESLSTLLEKTTASHEGRAPGNRELTDLLPPEVCSLLNPAAIYANNEISLRDVEVYGFDYDYTLAQYADALHPEIFSTARDILIEHYKYPEGIRKYDYNPSFAIRGLHYDIQKSLLMKIDAFHYVQLGTAYRGLQPVPDEEVIELYGGTQHIPLYQMSGFYGKGPSIKQFMDIFSLPEMALLSCVVDYFLGHSLEFDQAHLYKDVTDAIRDVHVKGLMYQWIEQDMEKYILRGDETFAVLSRLVAHGKQLFLITNSPFSFVDKGMRHMVGPDWRQLFDVVIVQADKPSFFTDRRKPFRKLDEKGSLQWDRITRLEKGKIYRQGNLFDFLRLTEWRGPRVLYFGDHLYSDLADLMLRHGWRTGAIIPELEREIRIINTEQYMHSLTWQQALTGLLERMQTYQDAESRQVLAAWMKERQELRCITKALFNAQFGSIFRTFHNPTYFSRRLVRFSDLYMASLSCLLNYRVDFTFYPRRTPLQHEAPLWMDQLCTGCMKTPFLGDMAHIR

SEQ ID NO: 1032449 - protein, 418 aa, Homo sapiens; identical to SEQ ID NO: 1032438

SEQ ID NO: 1032450 - protein, 550 aa, Homo sapiens; identical to SEQ ID NO: 1032434

SEQ ID NO: 1032451 - protein, 550 aa, Homo sapiens; identical to SEQ ID NO: 1032434

SEQ ID NO: 1032452 - protein, 367 aa, Homo sapiens
HSAAMEQRPRHRTSSRADVPFYGKGPSIKQFMDIFSLPEMALLSCVVDYFLGHSLEFDQAHLYKDVTDAIRDVHVKGLMYQWIEQDMEKYILRGDETFAVLSRLVAHGKQLFLITNSPFSFVDKGMRHMVGPDWRQLFDVVIVQADKPSFFTDRRKPFRKLDEKGSLQWDRITRLEKGKIYRQGNLFDFLRLTEWRGPRVLYFGDHLYSDLADLMLRHGWRTGAIIPELEREIRIINTEQYMHSLTWQQALTGLLERMQTYQDAESRQVLAAWMKERQELRCITKALFNAQFGSIFRTFHNPTYFSRRLVRFSDLYMASLSCLLNYRVDFTFYPRRTPLQHEAPLWMDQLCTGCMKTPFLGDMAHIR

SEQ ID NO: 1032453 - protein, 550 aa, Homo sapiens; identical to SEQ ID NO: 1032434

SEQ ID NO: 1032454 - protein, 237 aa, Homo sapiens
SCSVPLSRKWEQQRADVRRERRRIRKRYPDFVGRLPTKWDRITRLEKGKIYRQGNLFDFLRLTEWRGPRVLYFGDHLYSDLADLMLRHGWRTGAIIPELEREIRIINTEQYMHSLTWQQALTGLLERMQTYQDAESRQVLAAWMKERQELRCITKALFNAQFGSIFRTFHNPTYFSRRLVRFSDLYMASLSCLLNYRVDFTFYPRRTPLQHEAPLWMDQLCTGCMKTPFLGDMAHIR

SEQ ID NO: 1032455 - protein, 177 aa, Homo sapiens; identical to SEQ ID NO: 1032444

SEQ ID NO: 1032456 - protein, 177 aa, Homo sapiens; identical to SEQ ID NO: 1032444

SEQ ID NO: 1032457 - protein, 94 aa, Homo sapiens
GRSALAAVRRPRRAASRLVLALLPWVRPPGSRRPLPRRPALRARPGTHQRRRPQRAPMGSLPGHAETGARPPAPRGLQSPEPSSHLRQQRDQPA

SEQ ID NO: 1032458 - protein, 461 aa, Homo sapiens; identical to SEQ ID NO: 1032435

SEQ ID NO: 1032459 - protein, 117 aa, Homo sapiens
AIPQPDLTKLHQCGNATVSFSHEAGNTDPVQGWDASAQTTSHELTIPNDLIGCIIGRQGAKINEIRQMSGAQIKIANPVEGSTDRQVTITGSAASISLAQYLINVRLSSETGGMGSS

SEQ ID NO: 1032460 - protein, 117 aa, Homo sapiens; identical to SEQ ID NO: 1032459

SEQ ID NO: 1032461 - protein, 117 aa, Homo sapiens; identical to SEQ ID NO: 1032459

SEQ ID NO: 1032462 - protein, 117 aa, Homo sapiens; identical to SEQ ID NO: 1032459

SEQ ID NO: 1032463 - protein, 117 aa, Homo sapiens; identical to SEQ ID NO: 1032459

SEQ ID NO: 1032464 - protein, 117 aa, Homo sapiens; identical to SEQ ID NO: 1032459

SEQ ID NO: 1032465 - protein, 107 aa, Homo sapiens
MPFSIEARVHSVNSTLSTISTSTLARHLGISWLGFTAPSKCPPLDFVFVFSVWVSRTHVALKGRTHSLKSVHPTASVMPSLIFQLLHARSSLVTSCYNVTLGLGHLS

SEQ ID NO: 1032466 - protein, 104 aa, Homo sapiens
MPFSIEARVHSVNSTLSTISTSTLARHLGISWLGFTAPSKCPPLDFVFVFSVWVSRTHVALKGRTHSLKSVHPTASVMPSLIFQLLHARSSLVTSWTLGLGHLP

SEQ ID NO: 1032467 - protein, 104 aa, Homo sapiens; identical to SEQ ID NO: 1032466

SEQ ID NO: 1032468 - protein, 104 aa, Homo sapiens; identical to SEQ ID NO: 1032466

SEQ ID NO: 1032469 - protein, 126 aa, Homo sapiens
MSDHFTFLPHGELTHWGLFFPLEKCGYWKFPLFRKNRIGGALWGVLLPSSLLKASWCSGSTSDTRRRFSFILRPHSISATQISSGSGASTFRGSSSNDSSDSSHHSIFLFQQKDLCGGLGSTPGAE

SEQ ID NO: 1032470 - protein, 104 aa, Homo sapiens; identical to SEQ ID NO: 1032466

SEQ ID NO: 1032471 - protein, 237 aa, Homo sapiens
MHLNPSRITKYGEEFIETWKEPKETGEPQVFLASRAEKGPWEMLDLEDPQGIEGFPGPPGLPGAMIPGQTGNRGPPGSRGSQGALGPPGPPGSHVIGIIRRQRVYGPPWAQKVHLELQETWDHQVSLGAPGTPGLPGPRGDPGFQGFPGVKGEKGNPGFLGFIGPPGPIGPKGPPGVRGDPGTLKIISLPGSPGPPGTPGEPGMQGEPGPPGPPGNLGVGLAALTWITEEVVEPKYL

SEQ ID NO: 1032472 - protein, 503 aa, Homo sapiens
MHLNPSRITKYGEEFIETWKEPKETGEPQVFLASRAEKGPWEMLDLEDPQGIEGFPGPPGLPGAMIPGQTGNRGPPGSRGSQGALGPPGPPGSHVIGIIRRQRVYGPPWAQKVHLELQETWDHQVSLGAPGTPGLPGPRGDPGFQGFPGVKGEKGNPGFLGFIGPPGPIGPKGPPGVRGDPGTLKIISLPGSPGPPGTPGEPGMQGEPGPPGPPGNLGPCGPRGKPGKDGKPGTPGPAGEKGNKGSKGEPGPAGSDGLPGLKGKRGDSGSPATWTTRGFVFTRHSQTTAIPSCPEGTVPLYSGFSFLFVQGNQRAHGQDLGTLGSCLQRFTTMPFLFCNVNDVCNFASRNDYSYWLSTPALMPMNMAPITGRALEPYISRCTVCEGPAIAIAVHSQTTDIPPCPHGWISLWKGFSFIMFTSAGSEGTGQALASPGSCLEEFRASPFLECHGRGTCNYYSNSYSFWLASLNPERMFRKPIPSTVKAGELEKIISRCQVCMKKRH

SEQ ID NO: 1032473 - protein, 470 aa, Homo sapiens
MHLNPSRITKYGEEFIETWKEPKETGEPQVFLASRAEKGPWEMLDLEDPQGIEGFPGPPGLPGAMIPGQTGNRGPPGSRGSQGALGPPGPPGSHVIGIIRRQRVYGPPWAQKVHLELQETWDHQVSLGAPGTPGLPGPRGDPGFQGFPGVKGEKGNPGFLGFIGPPGPIGPKGPPGVRGDPGTLKIISLPGSPGPPGTPGEPGMQGEPGPPGPPGNLGPCGPRGKPGKDGKPGTPGPAGEKGNKGSKGEPGPAGSDGLPGLKGKRGDSGSPATWTTRGFVFTRHSQTTAIPSCPEGTVPLYSGFSFLFVQGNQRAHGQDLGTLGSCLQRFTTMPFLFCNVNDVCNFASRNDYSYWLSTPALMPMNMAPITGRALEPYISRCTVCEGPAIAIAVHSQTTDIPPCPHGWISLWKGFSFIMKAYSINCESWGIRKNNKSLSGVHEEKTLKLKKTAELVFFILKNKVMTEHAVI

SEQ ID NO: 1032474 - protein, 152 aa, Homo sapiens
YKINVQKSQAFLYTNNRQTESQIMSELPFTIASKRIKYLGIQLTREVKDLFKENYKPLLNEIKEDTNKWKNIPCSCIGRINIMKMAILPKVIYRFNAIPIKLPMTFFTELEKTTLKFIWNQKRTSIPTQITRILLMKCALYPHSINVGAYLM

SEQ ID NO: 1032475 - protein, 503 aa, Homo sapiens; identical to SEQ ID NO: 1032472

SEQ ID NO: 1032476 - protein, 331 aa, Homo sapiens
MHLNPSRITKYGEEFIETWKEPKETGEPQVFLASRAEKGPWEMLDLEDPQGIEGFPGPPGLPGAMIPGQTGNRGPPGSRGSQGALGPPGPPGSHVIGIIRRQRVYGPPWAQKVHLELQETWDHQVSLGAPGTPGLPGPRGDPGFQGFPGVKGEKGNPGFLGFIGPPGPIGPKGPPGVRGDPGTLKIISLPGSPGPPGTPGEPGMQGEPGPPGPPGNLGPCGPRGKPGKDGKPGTPGPAGEKGNKGSKGEPGPAGSDGLPGLKGKRGDSGSPATWTTRGFVFTRHSQTTAIPSCPEGTVPLYSGFSFLFVQGNQRAHGQDLDALFVKVLRSP

SEQ ID NO: 1032477 - protein, 301 aa, Homo sapiens
MPGISSQILTNAQGQVIGTLPWVVNSASVAAPAPAQSLQVQAVTPQLLLNAQGQVIATLASSPLPPPVAVRKPSTPESPAKSEVQPIQPTPTVPQPAVVIASPAPAAKPSASAPIPITCSETPTVSQLVSKPHTPSLDEDGINLEEIREFAKNFKIRRLSLGLTQTQVGQALTATEGPAYSQSAICRFEKLDITPKSAQKLKPVLEKWLNEAELRNQEGQQNLMEFVGGEPSKKRKRRTSFTPQAIEALNAYFEKNPLPTGQEITEIAKELNYDREVVRVWFCNRRQTLKNTSKLNVFQIP

SEQ ID NO: 1032478 - protein, 352 aa, Homo sapiens
PSQWTPPPQITVQPAAFAFSPGIISAASLGGQTQILGSLTTAPVITSAIPSMPGISSQILTNAQGQVIGTLPWVVNSASVAAPAPAQSLQVQAVTPQLLLNAQGQVIATLASSPLPPPVAVRKPSTPESPAKSEVQPIQPTPTVPQPAVVIASPAPAAKPSASAPIPITCSETPTVSQLVSKPHTPSLDEDGINLEEIREFAKNFKIRRLSLGLTQTQVGQALTATEGPAYSQSAICRFEKLDITPKSAQKLKPVLEKWLNEAELRNQEGQQNLMEFVGGEPSKKRKRRTSFTPQAIEALNAYFEKNPLPTGQEITEIAKELNYDREVVRVWFCNRRQTLKNTSKLNVFQIP

SEQ ID NO: 1032479 - protein, 353 aa, Homo sapiens
GTLTDHGETAARYLAQESLFLHPQISAASLGGQTQILGSLTTAPVITSAIPSMPGISSQILTNAQGQVIGTLPWVVNSASVAAPAPAQSLQVQAVTPQLLLNAQGQVIATLASSPLPPPVAVRKPSTPESPAKSEVQPIQPTPTVPQPAVVIASPAPAAKPSASAPIPITCSETPTVSQLVSKPHTPSLDEDGINLEEIREFAKNFKIRRLSLGLTQTQVGQALTATEGPAYSQSAICRFEKLDITPKSAQKLKPVLEKWLNEAELRNQEGQQNLMEFVGGEPSKKRKRRTSFTPQAIEALNAYFEKNPLPTGQEITEIAKELNYDREVVRVWFCNRRQTLKNTSKLNVFQIP

SEQ ID NO: 1032480 - protein, 352 aa, Homo sapiens; identical to SEQ ID NO: 1032478

SEQ ID NO: 1032481 - protein, 184 aa, Homo sapiens
GTLTDHGETAARYLAQESLFLHPQISAASLGGQTQILGSLTTAPVITSAIPSMPGISSQILTNAQGQVIGTLPWVVNSASVAAPAPAQSLQVQAVTPQLLLNAQGQVIATLASSPLPPPVAVRKPSTPESPAKSEVQPIQPTPTVPQPAVVIASPAPAAKPSASAPIQLRSALFPKCPARGPNS

SEQ ID NO: 1032482 - protein, 196 aa, Homo sapiens [sequence omitted]

SEQ ID NO: 1032483 - protein, 101 aa, Homo sapiens
  misc_feature (2)..(2): Xaa can be any naturally occurring amino acid
  misc_feature (21)..(21): Xaa can be any naturally occurring amino acid
RXREREREREREREREREREXKNTLARRKGRHMGIGKRKGTANARMPEKVTWMRRMRILRRLLRRYRESKKIDRHMYHSLYLKVKGNVFKTSGFSWNTSTS

SEQ ID NO: 1032484 - protein, 232 aa, Homo sapiens
MAKFFPFISGMSAIAFHTQRLGPESNSAKRALVNQGSNILPLVFCNFSREYNHPLWASPRDRGARSHNGDTKLYITGKYGINTPHCVPHRCPKRKGSHHVNEEEEIVGSFCPPASVSPRKEYSAENLYKKDIRFLPHNEYFTTAVYTVKGDKGEMLVSQRTIARIFHWRTHNPPQGCKEHKTQGLRHKKLLADQAEARRSKTKEARKRREERLQAKKEEIIKTLSKEEETQK

SEQ ID NO: 1032485 - protein, 98 aa, Homo sapiens
EPGNSAIMAGKLFPFAAAAAAMSMLRLQKRLASSVLRCGKKKVWLDPNETNEIANANSRQQIRKLIKDGLIIRKPVTVHSRARCRVQPMPECQRRSHG

SEQ ID NO: 1032486 - protein, 96 aa, Homo sapiens
EPGNSAIMAGKLFPFAAAAAAMSMLRLQKRLASSVLRCGKKKVWLDPNETNEIANANSRQQIRKLIKDGLIIRKPVTVHSRARCRKHLAPEGKTMA

SEQ ID NO: 1032487 - protein, 98 aa, Homo sapiens; identical to SEQ ID NO: 1032485

SEQ ID NO: 1032488 - protein, 95 aa, Homo sapiens
ELRTPQIRHRESKKRSPHVSQPVPEGEGECVQNKRILMEHIHKLKADKARKKLLADQAEARRSKTKEARKRREERLQAKKEEIIKTLSKEEETQK

SEQ ID NO: 1032489 - protein, 115 aa, Homo sapiens
EPGNSAIMAGKLFPFAAAAAAMSMLRLQKRLASSVLRCGKKKVWLDPNETNEIANANSRQQIRKLIKDGLIIRKPVTVHSRARCRKNTLARRKGRHMGIGKRKATPIPNSERYMD

SEQ ID NO: 1032490 - protein, 117 aa, Homo sapiens
EPGNSAIMAGKLFPFAAAAAAMSMLRLQKRLASSVLRCGKKKVWLDPNETNEIANANSRQQIRKLIKDGLIIRKPVTVHSRARCREKHLWARRKGQGTLGIRYSGKGVTGQIAPKLP

SEQ ID NO: 1032491 - protein, 196 aa, Homo sapiens [sequence omitted]

SEQ ID NO: 1032492 - protein, 196 aa, Homo sapiens
VRFFVRPLCFVLFSLFSPSLFFLACLALVSSFSSLCLVFVFSLALLLFSLFLALSFSLFSFSCFVLFVSVLSVRVFSPLAVVSLQSVVLVLSFFLPCPLGFVAPFAALLSFAIFFFFFCLACTRVSCALFSSWWWLSLCCFMFVAVSYLVFDLGRSGARLLLRVKFSFVDVIIATDGLDKCEPVPSSLRGKLFVEN

SEQ ID NO: 1032493 - protein, 650 aa, Homo sapiens
QPHLRQPHPRLGAVSGSGPGVGGGAAGGRRSSSAAAAAAAHAWGGAAGAAGPELPPGARAEGRRRARRCCLLVALLPLLPAPGAAAAPAPRPPELQSASAGPSVSLYLSEDEVRRLIGLDAELYYVRNDLISHYALSFSLLVPSETNFLHFTWHAKSKVEYKLGFQVDNVLAMDMPQVNISVQGEVPRTLSVFRVELSCTGKVDSEVMILMQLNLTVNSSKNFTVLNFKRRKMCYKKLEEVKTSALDKNTSRTIYDPVHAAPTTSTRVFYISVGVCCAVIFLVAIILAVLHLHSMKRIELDDSISASSSSQGLSQPSTQTTQYLRADTPNNATPITSSLGYPTLRIEKNDLRSVTLLEAKGKVKDIAISRERITLKDVLQEGTFGRIFHGILIDEKDPNKEKQAFVKTVKDQASEIQVTMMLTESCKLRGLHHRNLLPITHVCIEEGEKPMVILPYMNWGNLKLFLRQCKLVEANNPQAISQQDLVHMAIQIACGMSYLARREVIHKDLAARNCVIDDTLQVKITDNALSRDLFPMDYHCLGDNENRPVRWMALESLVNNEFSSASDVWAFGVTLWELMTLGQTPYVDIDPFEMAAYLKDGYRIAQPINCPDELFAVMACCWALDPEERPKFQQLVQCLTEFHAALGAYV

SEQ ID NO: 1032494 - protein, 611 aa, Homo sapiens
QPHLRQPHPRLGAVSGSGPGVGGGAAGPPCCLLVALLPLLPAPGAAAAPAPRPPELQSASAGPSVSLYLSEDEVRRLIGLDAELYYVRNDLISHYALSFSLLVPSETNFLHFTWHAKSKVEYKLGFQVDNVLAMDMPQVNISVQGEVPRTLSVFRVELSCTGKVDSEVMILMQLNLTVNSSKNFTVLNFKRRKMCYKKLEEVKTSALDKNTSRTIYDPVHAAPTTSTRVFYISVGVCCAVIFLVAIILAVLHLHSMKRIELDDSISASSSSQGLSQPSTQTTQYLRADTPNNATPITSSLGYPTLRIEKNDLRSVTLLEAKGKVKDIAISRERITLKDVLQEGTFGRIFHGILIDEKDPNKEKQAFVKTVKDQASEIQVTMMLTESCKLRGLHHRNLLPITHVCIEEGEKPMVILPYMNWGNLKLFLRQCKLVEANNPQAISQQDLVHMAIQIACGMSYLARREVIHKDLAARNCVIDDTLQVKITDNALSRDLFPMDYHCLGDNENRPVRWMALESLVNNEFSSASDVWAFGVTLWELMTLGQTPYVDIDPFEMAAYLKDGYRIAQPINCPDELFAVMACCWALDPEERPKFQQLVQCLTEFHAALGAYV

SEQ ID NO: 1032495 - protein, 451 aa, Homo sapiens
QPHLRQPHPRLGAVSGSGPGVGGGAAGGRRSSSAAAAAAAHAWGGAAGAAGPELPPGARAEGRRRARRCCLLVALLPLLPAPGAAAAPAPRPPELQSASAGPSVSLYLSEDEVRRLIGLDAELYYVRNDLISHYALSFSLLVPSETNFLHFTWHAKSKVEYKLGFQVDNVLAMDMPQVNISVQGEVPRTLSVFRVELSCTGKVDSEVMILMQLNLTVNSSKNFTVLNFKRRKMCYKKLEEVKTSALDKNTSRTIYDPVHAAPTTSTRVFYISVGVCCAVIFLVAIILAVLHLHSMKRIELDDSISASSSSQGLSQPSTQTTQYLRADTPNNATPITSSLGYPTLRIEKNDLRSVTLLEAKGKVKDIAISRERITLKDVLQEGTFGRIFHGILIDEKDPNKEKQAFVKTVKDQASEIQVTMMLTESCKLRGLHHRQFLSKTWYTWLFRLPVE

SEQ ID NO: 1032496 - protein, 352 aa, Homo sapiens
QPHLRQPHPRLGAVSGSGPGVGGGAAGGRRSSSAAAAAAAHAWGGAAGAAGPELPPGARAEGRRRARRCCLLVALLPLLPAPGAAAAPAPRPPELQSASAGPSVSLYLSEDEVRRLIGLDAELYYVRNDLISHYALSFSLLVPSETNFLHFTWHAKSKVEYKLGFQVDNVLAMDMPQVNISVQGEVPRTLSVFRVELSCTGKVDSEVMILMQLNLTVNSSKNFTVLNFKRRKMCYKKLEEVKTSALDKNTSRTIYDPVHAAPTTSTRVFYISVGVCCAVIFLVAIILAVLHLHSMKRIELDDSISASSSSQGLSQPSTQTTQYLRADTPHYHSLHLLSVSSYRAAHRESCMP

SEQ ID NO: 1032497 - protein, 127 aa, Homo sapiens
AETLGLSSGSKAQQQAITANNVIRPVRWMALESLVNNEFSSASDVWAFGVTLWELMTLGQTPYVDIDPFEMAAYLKDGYRIAQPINCPDELFAVMACCWALDPEERPKFQQLVQCLTEFHAALGAYV

SEQ ID NO: 1032498 - protein, 607 aa, Homo sapiens [sequence omitted]

SEQ ID NO: 1032499 - protein, 108 aa, Homo sapiens
EDLGKKIALALNKVDGANVALKDSDQVAQSDGEESPAAEEQLLGEHIKEEKEESEFLPSSGGTFNISVSGDIDRQQLNFRGRAVCRPVLDPNLRDKVMFEARISTILG

SEQ ID NO: 1032500 - protein, 522 aa, Homo sapiens
CPGWLPCGLKPDGSHPLSLQDLIEKVVILRKAVQLTQAMDTSTVGVLLAAKMSQYANLLAAQGSIAAALAFLPDNTNQPNIMQLRDRLCRAQGEPVAGHESPKIPYEKQQLPKGRPGPVAGHHQMPRVQTQQYYPHGENPPPPGFIMHGNVNPNAAGQLPTSPGHMHTQVPPYPQPQPYQPAQPYPFGTGGSAMYRPQQPVAPPTSNAYPNTPYISSASSYTGQSQLYAAQHQASSPTSSPATSFPPPPSSGASFQHGGPGAPPSSSAYALPPGTTGTLPAASELPASQRTGPQNGWNDPPALNRVPKKKKMPENFMPPVPITSPIMNPLGDPQSQMLQQQPSAPVPLSSQSSFPQPHLPGGQPFHGVQQPLGQTGMPPSFSKPNIEGAPGAPIGNTFQHVQSLPTKKITKKPIPDEHLILKTTFEDLIQRCLSSATDPQTKRKLDDASKRLEFLYDKLREQTLSPTITSGLHNIARSIETRNYSEGLTMHTHIVSTSNFSETSAFMPVLKVVLTQANKLGV

SEQ ID NO: 1032501 - protein, 754 aa, Homo sapiens
EDLGKKIALALNKVDGANVALKDSDQVAQSDGEESPAAEEQLLGEHIKEEKEESEFLPSSGGTFNISVSGDIDGLITQALLTGNFESAVDLCLHDNRMADAIILAIAGGQELLARTQKKYFAKSQSKITRLITAVVMKNWKEIVESCDLKNWREALAAVLTYAKPDEFSALCDLLGTRLENEGDSLLQTQACLCYICAGNVEKLVACWTKAQDGSHPLSLQDLIEKVVILRKAVQLTQAMDTSTVGVLLAAKMSQYANLLAAQGSIAAALAFLPDNTNQPNIMQLRDRLCRAQGEPVAGHESPKIPYEKQQLPKGRPGPVAGHHQMPRVQTQQYYPHVRIAPTVTTWSNKTPTALPSHPPAASPSDNTGENPPPPGFIMHGNVNPNAAGQLPTSPGHMHTQVPPYPQPQPYQPAQPYPFGTGGSAMYRPQQPVAPPTSNAYPNTPYISSASSYTGQSQLYAAQHQASSPTSSPATSFPPPPSSGASFQHGGPGAPPSSSAYALPPGTTGTLPAASELPASQRTGPQNGWNDPPALNRVPKKKKMPENFMPPVPITSPIMNPLGDPQSQMLQQQPSAPVPLSSQSSFPQPHLPGGQPFHGVQQPLGQTGMPPSFSKPNIEGAPGAPIGNTFQHVQSLPTKKITKKPIPDEHLILKTTFEDLIQRCLSSATDPQTKRKLDDASKRLEFLYDKLREQTLSPTITSGLHNIARSIETRNYSEGLTMHTHIVSTSNFSETSAFMPVLKVVLTQANKLGV

SEQ ID NO: 1032502 - protein, 723 aa, Homo sapiens
EDLGKKIALALNKVDGANVALKDSDQVAQSDGEESPAAEEQLLGEHIKEEKEESEFLPSSGGTFNISVSGDIDGLITQALLTGNFESAVDLCLHDNRMADAIILAIAGGQELLARTQKKYFAKSQSKITRLITAVVMKNWKEIVESCDLKNWREALAAVLTYAKPDEFSALCDLLGTRLENEGDSLLQTQACLCYICAGNVEKLVACWTKAQDGSHPLSLQDLIEKVVILRKAVQLTQAMDTSTVGVLLAAKMSQYANLLAAQGSIAAALAFLPDNTNQPNIMQLRDRLCRAQGEPVAGHESPKIPYEKQQLPKGRPGPVAGHHQMPRVQTQQYYPHGENPPPPGFIMHGNVNPNAAGQLPTSPGHMHTQVPPYPQPQPYQPAQPYPFGTGGSAMYRPQQPVAPPTSNAYPNTPYISSASSYTGQSQLYAAQHQASSPTSSPATSFPPPPSSGASFQHGGPGAPPSSSAYALPPGTTGTLPAASELPASQRTGPQNGWNDPPALNRVPKKKKMPENFMPPVPITSPIMNPLGDPQSQMLQQQPSAPVPLSSQSSFPQPHLPGGQPFHGVQQPLGQTGMPPSFSKPNIEGAPGAPIGNTFQHVQSLPTKKITKKPIPDEHLILKTTFEDLIQRCLSSATDPQTKRKLDDASKRLEFLYDKLREQTLSPTITSGLHNIARSIETRNYSEGLTMHTHIVSTSNFSETSAFMPVLKVVLTQANKLGV

SEQ ID NO: 1032503 - protein, 708 aa, Homo sapiens
EDLGKKIALALNKVDGANVALKDSDQVAQSDGEESPAAEEQLLGEHIKEEKEESEFLPSSGGTFNISVSGDIDGLITQALLTGNFESAVDLCLHDNRMADAIILAIAGGQELLARTQKKYFAKSQSKITRLITAVVMKNWKEIVESCDLKNWREALAAVLTYAKPDEFSALCDLLGTRLENEGDSLLQTQACLCYICAGNVEKLVACWTKAQDGSHPLSLQDLIEKVVILRKAVQLTQAMDTSTVGVLLAAKMSQYANLLAAQGSIAAALAFLPDNTNQPNIMQLRDRLCRAQGEPVAGHESPKIPYEKQQLPKGRPGPVAGHHQMPRVQTQQYYPHGENPPPPGFIMHGNVNPNAAGQLPTSPGHMHTQVPPYPQPQPYQPAQPYPFGTGGSAMYRPQQPVAPPTSNAYPNTPYISSASSYTGQSQLYAAQHQASSPTSSPATSFPPPPSSGASFQHGGPGAPPSSSAYALPPGTTGPQNGWNDPPALNRVPKKKKMPENFMPPVPITSPIMNPLGDPQSQMLQQQPSAPVPLSSQSSFPQPHLPGGQPFHGVQQPLGQTGMPPSFSKPNIEGAPGAPIGNTFQHVQSLPTKKITKKPIPDEHLILKTTFEDLIQRCLSSATDPQTKRKLDDASKRLEFLYDKLREQTLSPTITSGLHNIARSIETRNYSEGLTMHTHIVSTSNFSETSAFMPVLKVVLTQANKLGV

SEQ ID NO: 1032504 - protein, 721 aa, Homo sapiens
EDLGKKIALALNKVDGANVALKDSDQVAQSDGEESPAAEEQLLGEHIKEEKEESEFLPSSGGTFNISVSGDIDGLITQALLTGNFESAVDLCLHDNRMADAIILAIAGGQELLARTQKKYFAKSQSKITRLITAVVMKNWKEIVESCDLKNWREALAAVLTYAKPDEFSALCDLLGTRLENEGDSLLQTQACLCYICAGNVEKLVACWTKAQDGSHPLSLQDLIEKVVILRKAVQLTQAMDTSTVGVLLAAKMSQYANLLAAQGSIAAALAFLPDNTNQPNIMQLRDRLCRAQGEPVAGHESPKIPYEKQQLPKGRPGPVAGHHQMPRVQTQQYYPHGENPPPPGFIMHGNVNPNAAGQLPTSPGHMHTQVPPYPQPQPYQPAQPYPFGTGGSAMYRPQQPVAPPTSNAYPNTPYISSASSYTGQSQLYAAQHQASSPTSSPATSFPPPPSSGASFQHGGPGAPPSSSAYALPPGTTENQSIQDQAPMLEGPQNGWNDPPALNRVPKKKKMPENFMPPVPITSPIMNPLGDPQSQMLQQQPSAPVPLSSQSSFPQPHLPGGQPFHGVQQPLGQTGMPPSFSKPNIEGAPGAPIGNTFQHVQSLPTKKITKKPIPDEHLILKTTFEDLIQRCLSSATDPQTKRKLDDASKRLEFLYDKLREQTLSPTITSGLHNIARSIETRNYSEGLTMHTHIVSTSNFSETSAFMPVLKVVLTQANKLGV

SEQ ID NO: 1032505 - protein, 745 aa, Homo sapiens
EDLGKKIALALNKVDGANVALKDSDQVAQSDGEESPAAEEQLLGEHIKEEKEESEFLPSSGGTFNISVSGDIDGLITQALLTGNFESAVDLCLHDNRMADAIILAIAGGQELLARTQKKYFAKSQSKITRLITAVVMKNWKEIVESCDLKNWREALAAVLTYAKPDEFSALCDLLGTRLENEGDSLLQTQACLCYICAGNVEKLVACWTKAQDGSHPLSLQDLIEKVVILRKAVQLTQAMDTSTVGVLLAAKMSQYANLLAAQGSIAAALAFLPDNTNQPNIMQLRDRLCRAQGEPVAGHESPKIPYEKQQLPKGRPGPVAGHHQMPRVQTQQYYPHGENPPPPGFIMHGNVNPNAAGQLPTSPGHMHTQVPPYPQPQPYQPAQPYPFGTGGSAMYRPQQPVAPPTSNAYPNTPYISSASSYTGRALHYRRIRLPKSSPAQHQASSPTSSPATSFPPPPSSGASFQHGGPGAPPSSSAYALPPGTTGTLPAASELPASQRTENQSIQDQAPMLEGPQNGWNDPPALNRVPKKKKMPENFMPPVPITSPIMNPLGDPQSQMLQQQPSAPVPLSSQSSFPQPHLPGGQPFHGVQQPLGQTGMPPSFSKPNIEGAPGAPIGNTFQHVQSLPTKKITKKPIPDEHLILKTTFEDLIQRCLSSATDPQTKRKLDDASKRLEFLYDKLREQTLSPTITSGLHNIARSIETRNYSEGLTMHTHIVSTSNFSETSAFMPVLKVVLTQANKLGV

SEQ ID NO: 1032506 - protein, 434 aa, Homo sapiens
EDLGKKIALALNKVDGANVALKDSDQVAQSDGEESPAAEEQLLGEHIKEEKEESEFLPSSGGTFNISVSGDIDGLITQALLTGNFESAVDLCLHDNRMADAIILAIAGGQELLARTQKKYFAKSQSKITRLITAVVMKNWKEIVESCDLKNWREALAAVLTYAKPDEFSALCDLLGTRLENEGDSLLQTQACLCYICAGNVEKLVACWTKAQDGSHPLSLQDLIEKVVILRKAVQLTQAMDTSTVGVLLAAKMSQYANLLAAQGSIAAALAFLPDNTNQPNIMQLRDRLCRAQGEPVAGHESPKIPYEKQQLPKGRPGPVAGHHQMPRVQTQQYYPHGENPPPPGFIMHGNVNPNAAGQLPTSPGHMHTQVPPYPQPQPYQPAQPYPFGTGGSAMYRPQHPSSMADQELHHHLQLMHCLLEQQVLRMVGMTLQL

SEQ ID NO: 1032507 - protein, 377 aa, Homo sapiens
EDLGKKIALALNKVDGANVALKDSDQVAQSDGEESPAAEEQLLGEHIKEEKEESEFLPSSGGTFNISVSGDIDGLITQALLTGNFESAVDLCLHDNRMADAIILAIAGGQELLARTQKKYFAKSQSKITRLITAVVMKNWKEIVESCDLKNWREALAAVLTYAKPDEFSALCDLLGTRLENEGDSLLQTQACLCYICAGNVEKLVACWTKAQDGSHPLSLQDLIEKVVILRKAVQLTQAMDTSTVGVLLAAKMSQYANLLAAQGSIAAALAFLPDNTNQPNIMQLRDRLCRAQGEPVAGHESPKIPYEKQQLPKGRPGPVAGHHQMPRVQTQQYYPHVRIAPTVTTWSNKTPTALPSHPPAASPSDTQEKILHLRVS

SEQ ID NO: 1032508 - protein, 567 aa, Homo sapiens
EDLGKKIALALNKVDGANVALKDSDQVAQSDGEESPAAEEQLLGEHIKEEKEESEFLPSSGGTFNISVSGDIDGLITQALLTGNFESAVDLCLHDNRMADAIILAIAGGQELLARTQKKYFAKSQSKITRLITAVVMKNWKEIVESCDLKNWREALAAVLTYAKPDEFSALCDLLGTRLENEGDSLLQTQACLCYICAGNVEKLVACWTKAQDGSHPLSLQDLIEKVVILRKAVQLTQAMDTSTVGVLLAAKMSQYANLLAAQGSIAAALAFLPDNTNQPNIMQLRDRLCRAQGEPVAGHESPKIPYEKQQLPKGRPGPVAGHHQMPRVQTQQYYPHGENPPPPGFIMHGNVNPNAAGQLPTSPGHMHTQVPPYPQPQPYQPAQPYPFGTGGSAMYRPQQPVAPPTSNAYPNTPYISSASSYTGQSQLYAAQHQASSPTSSPATSFPPPPSSGASFQHGGPGAPPSSSAYALPPGTTENQSIQDQAPMLEGPQNGWNDPPALNRVPKKKKMPEPPVTNAAATAFSSSTTVKPVFIPTATSSRWPALPWRTATSWSNRHATIFFKAQY

SEQ ID NO: 1032509 - protein, 723 aa, Homo sapiens; identical to SEQ ID NO: 1032502

SEQ ID NO: 1032510 - protein, 227 aa, Homo sapiens
VNHIERDNITKQGGALQPRNFMPPVPITSPIMNPLGDPQSQMLQQQPSAPVPLSSQSSFPQPHLPGGQPFHGVQQPLGQTGMPPSFSKPNIEGAPGAPIGNTFQHVQSLPTKKITKKPIPDEHLILKTTFEDLIQRCLSSATDPQTKRKLDDASKRLEFLYDKLREQTLSPTITSGLHNIARSIETRNYSEGLTMHTHIVSTSNFSETSAFMPVLKVVLTQANKLGV

SEQ ID NO: 1032511 - protein, 730 aa, Homo sapiens
EDLGKKIALALNKVDGANVALKDSDQVAQSDGEESPAAEEQLLGEHIKEEKEESEFLPSSGGTFNISVSGDIDGLITQALLTGNFESAVDLCLHDNRMADAIILAIAGGQELLARTQKKYFAKSQSKITRLITAVVMKNWKEIVESCDLKNWREALAAVLTYAKPDEFSALCDLLGTRLENEGDSLLQTQACLCYICAGNVEKLVACWTKAQDGSHPLSLQDLIEKVVILRKAVQLTQAMDTSTVGVLLAAKMSQYANLLAAQGSIAAALAFLPDNTNQPNIMQLRDRLCRAQGEPVAGHESPKIPYEKQQLPKGRPGPVAGHHQMPRVQTQQYYPHGENPPPPGFIMHGNVNPNAAGQLPTSPGHMHTQVPPYPQPQPYQPAQPYPFGTGGSAMYRPQQPVAPPTSNAYPNTPYISSASSYTGQSQLYAAQHQASSPTSSPATSFPPPPSSGASFQHGGPGAPPSSSAYALPPGTTGTLPAASELPASQRTGPQNGWNDPPALNRVPKKKKMPENFMPPVPITSPIMNPLGDPQSQMLQQQPSAPVPLSSQSSFPQPHLPGGQPFHGVQQPLGQTGMPPSFSKPNIEGAPGAPIGNTFQHVQSLPTKKITKKPIPDEHLILKTTFEDLIQRCLSSATDPQTKRKLDDASKRLEFLYDKLREQTRSLLFQLSPTITRGLLHNIARSIETRNYSEGLTMHTHIVSTSNFSETSAFMPVLKVVLTQANKLGV

SEQ ID NO: 1032512 - protein, 716 aa, Homo sapiens
EDLGKKIALALNKVDGANVALKDSDQVAQSDGEESPAAEEQLLGEHIKEEKEESEFLPSSGGTFNISVSGDIDGLITQALLTGNFESAVDLCLHDNRMADAIILAIAGGQELLARTQKKYFAKSQSKITRLITAVVMKNWKEIVESCDLKNWREALAAVLTYAKPDEFSALCDLLGTRLENEGDSLLQTQACLCYICAGNVEKLVACWTKAQDGSHPLSLQDLIEKVVILRKAVQLTQAMDTSTVGVLLAAKMSQYANLLAAQGSIAAALAFLPDNTNQPNIMQLRDRLCRAQGEPVAGHESPKIPYEKQQLPKGRPGPVAGHHQMPRVQTQQYYPHGENPPPPGFIMHGNVNPNAAGQLPTSPGHMHTQVPPYPQPQPYQPAQPYPFGTGGSAMYRPQQPVAPPTSNAYPNTPYISSASSYTGQSQLYAAQHQASSPTSSPATSFPPPPSSGASFQHGGPGAPPSSSAYALPPGTTGTLPAASELPASQRTENQSIQDQAPMLEGPQNGWNDPPALNRVPKKKKMPENFMPPVPITSPIMNPLGDPQSQMLQQQPSAPVPLSSQSSFPQPHLPGGQPFHGVQQPLGQTGMPPSFSKPNIEGAPGAPIGNTFQHVQSLPTKKITKKPIPDEHLILKTTFEDLIQRCLSSATDPQTKRKLDDASKRLEFLYDKLREQTLSPTITSGYHCRAESNYRRCCYPLLPQSWTCFCVQVCPP

SEQ ID NO: 1032513 - protein, 605 aa, Homo sapiens
EDLGKKIALALNKVDGANVALKDSDQVAQSDGEESPAAEEQLLGEHIKEEKEESEFLPSSGGTFNISVSGDIDGLITQALLTGNFESAVDLCLHDNRMADAIILAIAGGQELLARTQKKYFAKSQSKITRLITAVVMKNWKEIVESCDLKNWREALAAVLTYAKPDEFSALCDLLGTRLENEGDSLLQTQACLCYICAGNVEKLVACWTKAQDGSHPLSLQDLIEKVVILRKAVQLTQAMDTSTVGVLLAAKMSQYANLLAAQGSIAAALAFLPDNTNQPNIMQLRDRLCRAQGEPVAGHESPKIPYEKQQLPKGRPGPVAGHHQMPRVQTQQYYPHGENPPPPGFIMHGNVNPNAAGQLPTSPGHMHTQVPPYPQPQPYQPAQPYPFGTGGSAMYRPQQPVAPPTSNAYPNTPYISSASSYTGQSQLYAAQHQASSPTSSPATSFPPPPSSGASFQHGGPGAPPSSSAYALPPGTTGTLPAASELPASQRTGPQNGWNDPPALNRVPKKKKMPENFMPPVPITSPIMNPLGDPQSQMLQQQPSAPVPLSSQSSFPQPHLPGGQPFHGVQQPLGQTGMPPSFSKPNIEGAPGAPIGNTFQVTVNL

SEQ ID NO: 1032514 - protein, 67 aa, Homo sapiens
RLYEDPPASMLIRSTAPGLFTYLQPCYFFPSSPFLWSILPAWRTRSSTIIFSLCTASWNNRYTACCQ

SEQ ID NO: 1032515 - protein, 723 aa, Homo sapiens; identical to SEQ ID NO: 1032502

SEQ ID NO: 1032516 - protein, 736 aa, Homo sapiens
EDLGKKIALALNKVDGANVALKDSDQVAQSDGEESPAAEEQLLGEHIKEEKEESEFLPSSGGTFNISVSGDIDGLITQALLTGNFESAVDLCLHDNRMADAIILAIAGGQELLARTQKKYFAKSQSKITRLITAVVMKNWKEIVESCDLKNWREALAAVLTYAKPDEFSALCDLLGTRLENEGDSLLQTQACLCYICAGNVEKLVACWTKAQDGSHPLSLQDLIEKVVILRKAVQLTQAMDTSTVGVLLAAKMSQYANLLAAQGSIAAALAFLPDNTNQPNIMQLRDRLCRAQGEPVAGHESPKIPYEKQQLPKGRPGPVAGHHQMPRVQTQQYYPHGENPPPPGFIMHGNVNPNAAGQLPTSPGHMHTQVPPYPQPQPYQPAQPYPFGTGGSAMYRPQQPVAPPTSNAYPNTPYISSASSYTGQSQLYAAQHQASSPTSSPATSFPPPPSSGASFQHGGPGAPPSSSAYALPPGTTGTLPAASELPASQRTENQSIQDQAPMLEGPQNGWNDPPALNRVPKKKKMPENFMPPVPITSPIMNPLGDPQSQMLQQQPSAPVPLSSQSSFPQPHLPGGQPFHGVQQPLGQTGMPPSFSKPNIEGAPGAPIGNTFQHVQSLPTKKITKKPIPDEHLILKTTFEDLIQRCLSSATDPQTKRKLDDASKRLEFLYDKLREQTLSPTITSGLHNIARSIETRNYSEGLTMHTHIVSTSNFSETSAFMPVLKVVLTQANKLGV

SEQ ID NO: 1032517 - protein, 723 aa, Homo sapiens; identical to SEQ ID NO: 1032502

SEQ ID NO: 1032518 - protein, 716 aa, Homo sapiens
EDLGKKIALALNKVDGANVALKDSDQVAQSDGEESPAAEEQLLGEHIKEEKEESEFLPSSGGTFNISVSGDIDGLITQALLTGNFESAVDLCLHDNRMADAIILAIAGGQELLARTQKKYFAKSQSKITRLITAVVMKNWKEIVESCDLKNWREALAAVLTYAKPDEFSALCDLLGTRLENEGDSLLQTQACLCYICAGNVEKLVACWTKAQDGSHPLSLQDLIEKVVILRKAVQLTQAMDTSTVGVLLAAKMSQYANLLAAQGSIAAALAFLPDNTNQPNIMQLRDRLCRAQGEPVAGHESPKIPYEKQQLPKGRPGPVAGHHQMPRVQTQQYYPHGENPPPPGFIMHGNVNPNAAGQLPTSPGHMHTQVPPYPQPQPYQPAQPYPFGTGGSAMYRPQQPVAPPTSNAYPNTPYISSASSYTGQSQLYAAQHQASSPTSSPATSFPPPPSSGASFQHGGPGAPPSSSAYALPPGTTGTLPAASELPASQRTGPQNGWNDPPALNRVPKKKKMPENFMPPVPITSPIMNPLGDPQSQMLQQQPSAPVPLSSQSSFPQPFHGVQQPLGQTGMPPSFSKPNIEGAPGAPIGNTFQHVQSLPTKKITKKPIPDEHLILKTTFEDLIQRCLSSATDPQTKRKLDDASKRLEFLYDKLREQTLSPTITSGLHNIARSIETRNYSEGLTMHTHIVSTSNFSETSAFMPVLKVVLTQANKLGV

SEQ ID NO: 1032519 - protein, 355 aa, Homo sapiens
PPVPKDTAGLVDKAVAVDKVVPGGSAMYRPQQPVAPPTSNAYPNTPYISSASSYTGQSQLYAAQHQASSPTSSPATSFPPPPSSGASFQHGGPGAPPSSSAYALPPGTTGTLPAASELPASQRTGPQNGWNDPPALNRVPKKKKMPENFMPPVPITSPIMNPLGDPQSQMLQQQPSAPVPLSSQSSFPQPHLPGGQPFHGVQQPLGQTGMPPSFSKPNIEGAPGAPIGNTFQHVQSLPTKKITKKPIPDEHLILKTTFEDLIQRCLSSATDPQTKRKLDDASKRLEFLYDKLREQTLSPTITSGLHNIARSIETRNYSEGLTMHTHIVSTSNFSETSAFMPVLKVVLTQANKLGV

SEQ ID NO: 1032520 - protein, 385 aa, Homo sapiens
EDLGKKIALALNKVDGANVALKDSDQVAQSDGEESPAAEEQLLGEHIKEEKEESEFLPSSGGTFNISVSGDIDGLITQALLTGNFESAVDLCLHDNRMADAIILAIAGGQELLARTQKKYFAKSQSKITRLITAVVMKNWKEIVESCDLKNWREALAAVLTYAKPDEFSALCDLLGTRLENEGDSLLQTQACLCYICAGNVEKLVACWTKAQDGSHPLSLQDLIEKVVILRKAVQLTQAMDTSTVGVLLAAKMSQYANLLAAQGSIAAALAFLPDNTNQPNIMQLRDRLCRAQGEPVAGHESPKIPYEKQQLPKGRPGPVAGHHQMPRVQTQQYYPHGENPPPPGFIMHGNVNPNAAGQLPTSPGHMHTQVPPYPQPQRSSEWLE

SEQ ID NO: 1032521 - protein, 318 aa, Homo sapiens
DSMRIRRLYDDPPASSYTGQSQLYAAQHQASSPTSSPATSFPPPPSSGASFQHGGPGAPPSSSAYALPPGTTGTLPAASELPASQRTGPQNGWNDPPALNRVPKKKKMPENFMPPVPITSPIMNPLGDPQSQMLQQQPSAPVPLSSQSSFPQPHLPGGQPFHGVQQPLGQTGMPPSFSKPNIEGAPGAPIGNTFQHVQSLPTKKITKKPIPDEHLILKTTFEDLIQRCLSSATDPQTKRKLDDASKRLEFLYDKLREQTLSPTITSGLHNIARSIETRNYSEGLTMHTHIVSTSNFSETSAFMPVLKVVLTQANKLGV

SEQ ID NO: 1032522 - protein, 211 aa, Homo sapiens [sequence omitted]

SEQ ID NO: 1032523 - protein, 699 aa, Homo sapiens
EDLGKKIALALNKVDGANVALKDSDQVAQSDGEESPAAEEQLLGEHIKEEKEESEFLPSSGGTFNISVSGDIDGLITQALLTGNFESAVDLCLHDNRMADAIILAIAGGQELLARTQKKYFAKSQSKITRLITAVVMKNWKEIVESCDLKNWREALAAVLTYAKPDEFSALCDLLGTRLENEGDSLLQTQACLCYICAGNVEKLVACWTKAQDGSHPLSLQDLIEKVVILRKAVQLTQAMDTSTVGVLLAAKMSQYANLLAAQGSIAAALAFLPDNTNQPNIMQLRDRLCRAQGEPVAGHESPKIPYEKQQLPKGRPGPVAGHHQMPRVQTQQYYPHGENPPPPGFIMHGNVNPNAAGQLPTSPGHMHTQVPPYPQPQPYQPAQPYPFGTGGSAMYRPQQPVAPPTSNAYPNTPYISSASSYTGQSQLYAAQHQASSPTSSPATSFPPPPSSGASFQHGGPGAPPSSSAYALPPGTTGTLPAASELPASQRTGPQNGWNDPPALNRVPKKKKMPENFMPPVPITSPIMNPLGDPQSQMLQQQPSAPVPLSSQSSFPQPHLPGGQPFHGVQQPLGQTGMPPSFSKPNIEGAPGAPIGNTFQHVQSLPTKKITKKPIPDEHLILKTTFEDLIQRCLSSATDPLSPTITSGLHNIARSIETRNYSEGLTMHTHIVSTSNFSETSAFMPVLKVVLTQANKLGV

SEQ ID NO: 1032524 - protein, 385 aa, Homo sapiens; identical to SEQ ID NO: 1032520

SEQ ID NO: 1032525 - protein, 417 aa, Homo sapiens
EDLGKKIALALNKVDGANVALKDSDQVAQSDGEESPAAEEQLLGEHIKEEKEESEFLPSSGGTFNISVSGDIDGLITQALLTGNFESAVDLCLHDNRMADAIILAIAGGQELLARTQKKYFAKSQSKITRLITAVVMKNWKEIVESCDLKNWREALAAVLTYAKPDEFSALCDLLGTRLENEGDSLLQTQACLCYICAGNVEKLVACWTKAQDGSHPLSLQDLIEKVVILRKAVQLTQAMDTSTVGVLLAAKMSQYANLLAAQGSIAAALAFLPDNTNQPNIMQLRDRLCRAQGEPVAGHESPKIPYEKQQLPKGRPGPVAGHHQMPRVQTQQYYPHGENPPPPGFIMHGNVNPNAAGQLPTSPGHMHTQVPPYPQPQPYQPAQPYPFGTGGSAMYRPQPCCFLVLHTLYDVGTELD

SEQ ID NO: 1032526 - protein, 245 aa, Homo sapiens; identical to SEQ ID NO: 886778

SEQ ID NO: 1032527 - protein, 118 aa, Homo sapiens
MNGRADFREPNAEVPRPIPHIGPDYIPTEEERRVFAECNDESFWFRSVPLAATSMLITQGLISKGILSSHPKYGSIPKLILACIMGYFAGKLSYVKTCQEKFKKLLKSFFSPVFSVLS

SEQ ID NO: 1032528 - protein, 245 aa, Homo sapiens; identical to SEQ ID NO: 886778

SEQ ID NO: 1032529 - protein, 187 aa, Homo sapiens; identical to SEQ ID NO: 886790

SEQ ID NO: 1032530 - protein, 245 aa, Homo sapiens; identical to SEQ ID NO: 886778

SEQ ID NO: 1032531 - protein, 193 aa, Homo sapiens
MNGRADFREPNAEVPRPIPHIGPDYIPTEEERRVFAECNDESFWFRSVPLAATSMLITQGLISKGILSSHPKYGSIPKLILACIMGYFAGKLSYVKTCQEKFKKLENSPLGEALRSGQARRSSPPGHYYQKSKYDSSVSGQSSFVTSPAADNIEMLPHYEPIPFSSSMNESAPTGITDHIVQGQSKQVWRYLG

SEQ ID NO: 1032532 - protein, 245 aa, Homo sapiens; identical to SEQ ID NO: 886778

SEQ ID NO: 1032533 - protein, 245 aa, Homo sapiens; identical to SEQ ID NO: 886778

SEQ ID NO: 1032534 - protein, 187 aa, Homo sapiens; identical to SEQ ID NO: 886790

SEQ ID NO: 1032535 - protein, 224 aa, Homo sapiens
MPLVPRWCPTLLSSQPSVSLMTFLGTETQSLVEQLTMVKRMQHIPTPLFVLEIWKACFVGLIESPEGTEELKWTAFTFLKIPQVLVKLKKYSHGDKDFTEDVNCAFEFLLKLTPLLDKADQRCNCDCTNFLLQECGKQGLLSEASVNNLMAKRKADREHAPQQKSGENANIQPNIQLILRAEPTVTNILKTMDADHSKSPEGLLGVPGHMLSGKSLDLPLAYST

SEQ ID NO: 1032536 - protein, 456 aa, Homo sapiens
MKVVNLKQAILQAWKERWSDYQWAINMKKFFPKGATWDILNLADALLEQAMIGPSPNPLILSYLKYAISSQMVSYSSVLTAISKFDDFSRDLCVQALLDIMDMFCDRLSCHGKAEECIGLCRALLSALHWLLRCTAASAERLREGLEAGTPAAGEKQLAMCLQRLEKTLSSTKNRALLHIAKLEEASSWTAIEHSLLKLGEILANLSNPQLRSQAEQCGTLIRSIPTMLSVHAEQMHKTGFPTVHAVILLEGTMNLTGETQSLVEQLTMVKRMQHIPTPLFVLEIWKACFVGLIESPEGTEELKWTAFTFLKIPQVLVKLKKYSHGDKDFTEDVNCAFEFLLKLTPLLDKADQRCNCDCTNFLLQECGKQGLLSEASVNNLMAKRKADREHAPQQKSGENANIQPNIQLILRAEPTVTNILKTMDADHSKSPEGLLGVPGHMLSGKSLDLPLAYST

SEQ ID NO: 1032537 - protein, 481 aa, Homo sapiens
LPGFILNGCTSRGWPPPLPPAQSEIMKVVNLKQAILQAWKERWSDYQWAINMKKFFPKGATWDILNLADALLEQAMIGPSPNPLILSYLKYAISSQMVSYSSVLTAISKFDDFSRDLCVQALLDIMDMFCDRLSCHGKAEECIGLCRALLSALHWLLRCTAASAERLREGLEAGTPAAGEKQLAMCLQRLEKTLSSTKNRALLHIAKLEEASSWTAIEHSLLKLGEILANLSNPQLRSQAEQCGTLIRSIPTMLSVHAEQMHKTGFPTVHAVILLEGTMNLTGETQSLVEQLTMVKRMQHIPTPLFVLEIWKACFVGLIESPEGTEELKWTAFTFLKIPQVLVKLKKYSHGDKDFTEDVNCAFEFLLKLTPLLDKADQRCNCDCTNFLLQECGKQGLLSEASVNNLMAKRKADREHAPQQKSGENANIQPNIQLILRAEPTVTNILKTMDADHSKSPEGLLGVPGHMLSGKSLDLPLAYST

SEQ ID NO: 1032538 - protein, 443 aa, Homo sapiens
MKVVNLKQAILQAWKERWSDYQWAINMKKFFPKGATWDILNLADALLEQAMIGPSPNPLILSYLKYAISSQFDDFFRDLCVQALLDIMDMFCDRLSCHGKAEECIGLCRALLSALHWLLRCTAASAERLREGLEAGTPAAGEKQLAMCLQRLEKTLSSTKNRALLHIAKLEEASSWTAIEHSLLKLGEILANLSNPQLRSQAEQCGTLIRSIPTMLSVHAEQMHKTGFPTVHAVILLEGTMNLTGETQSLVEQLTMVKRMQHIPTPLFVLEIWKACFVGLIESPEGTEELKWTAFTFLKIPQVLVKLKKYSHGDKDFTEDVNCAFEFLLKLTPLLDKADQRCNCDCTNFLLQECGKQGLLSEASVNNLMAKRKADREHAPQQKSGENANIQPNIQLILRAEPTVTNILKTMDADHSKSPEGLLGVPGHMLSGKSLDLPLAYST

SEQ ID NO: 1032539 - protein, 475 aa, Homo sapiens
MKVVNLKQAILQAWKERWSDYQWAINMKKFFPKGATWDILNLADALLEQAMIGPSPNPLILSYLKYAISSQMVSYSSVLTAISKFDDFSRDLCVQALLDIMDMFCDRLSCHGKAEECIGLCRALLSALHWLLRCTAASAERLREGLEAGTPAAGEKQLAMCLQRLEKTLSSTKNRALLHIAKLEEASLHTSQGLGQGGTRANQPTASWTAIEHSLLKLGEILANLSNPQLRSQAEQCGTLIRSIPTMLSVHAEQMHKTGFPTVHAVILLEGTMNLTGETQSLVEQLTMVKRMQHIPTPLFVLEIWKACFVGLIESPEGTEELKWTAFTFLKIPQVLVKLKKYSHGDKDFTEDVNCAFEFLLKLTPLLDKADQRCNCDCTNFLLQECGKQGLLSEASVNNLMAKRKADREHAPQQKSGENANIQPNIQLILRAEPTVTNILKTMDADHSKSPEGLLGVPGHMLSGKSLDLPLAYST

SEQ ID NO: 1032540 - protein, 456 aa, Homo sapiens; identical to SEQ ID NO: 1032536

SEQ ID NO: 1032541 - protein, 479 aa, Homo sapiens
AYVDQRRWIVRWPPPLPPAQSEIMKVVNLKQAILQAWKERWSDYQWAINMKKFFPKGATWDILNLADALLEQAMIGPSPNPLILSYLKYAISSQMVSYSSVLTAISKFDDFSRDLCVQALLDIMDMFCDRLSCHGKAEECIGLCRALLSALHWLLRCTAASAERLREGLEAGTPAAGEKQLAMCLQRLEKTLSSTKNRALLHIAKLEEASSWTAIEHSLLKLGEILANLSNPQLRSQAEQCGTLIRSIPTMLSVHAEQMHKTGFPTVHAVILLEGTMNLTGETQSLVEQLTMVKRMQHIPTPLFVLEIWKACFVGLIESPEGTEELKWTAFTFLKIPQVLVKLKKYSHGDKDFTEDVNCAFEFLLKLTPLLDKADQRCNCDCTNFLLQECGKQGLLSEASVNNLMAKRKADREHAPQQKSGENANIQPNIQLILRAEPTVTNILKTMDADHSKSPEGLLGVPGHMLSGKSLDLPLAYST

SEQ ID NO: 1032542 - protein, 371 aa, Homo sapiens
MTFLRDLCVQALLDIMDMFCDRLSCHGKAEECIGLCRALLSALHWLLRCTAASAERLREGLEAGTPAAGEKQLAMCLQRLEKTLSSTKNRALLHIAKLEEASSWTAIEHSLLKLGEILANLSNPQLRSQAEQCGTLIRSIPTMLSVHAEQMHKTGFPTVHAVILLEGTMNLTGETQSLVEQLTMVKRMQHIPTPLFVLEIWKACFVGLIESPEGTEELKWTAFTFLKIPQVLVKLKKYSHGDKDFTEDVNCAFEFLLKLTPLLDKADQRCNCDCTNFLLQECGKQGLLSEASVNNLMAKRKADREHAPQQKSGENANIQPNIQLILRAEPTVTNILKTMDADHSKSPEGLLGVPGHMLSGKSLDLPLAYST

SEQ ID NO: 1032543 - protein, 302 aa, Homo sapiens
  misc_feature (68)..(68): Xaa can be any naturally occurring amino acid
  misc_feature (70)..(70): Xaa can be any naturally occurring amino acid
  misc_feature (72)..(77): Xaa can be any naturally occurring amino acid
  misc_feature (79)..(81): Xaa can be any naturally occurring amino acid
  misc_feature (83)..(84): Xaa can be any naturally occurring amino acid
  misc_feature (87)..(89): Xaa can be any naturally occurring amino acid
  misc_feature (91)..(91): Xaa can be any naturally occurring amino acid
  misc_feature (94)..(100): Xaa can be any naturally occurring amino acid
  misc_feature (302)..(302): Xaa can be any naturally occurring amino acid
AGSRGAAARLGAGRGAQDPKWGSRSQRANSCPPSSMASCAEPSEPSAPLPAGVPPLEDFEVLDGVSSXSXSXXXXXXPXXXAXXNSXXXLXALXXXXXXXAKQPGALAREFLAAMEPEPAPAPAPEEWLDILGNGLLRKKNAGPRAARFEPPGQGPGGHLYICRRRWRIGTLGAGGAGAGVHSVVTVTSSRPWISVSHSLDVGETAMVTADSKYCYGPQGSRSPYIPPHAALCLEVTLKTAVDGPDLEMLTGQERVALANRKRECGNPTYQRADFVLAANSYDLAIKAITSSAKVDMTFEEX

SEQ ID NO: 1032544 - protein, 302 aa, Homo sapiens
  misc_feature (302)..(302): Xaa can be any naturally occurring amino acid
AGSRGAAARLGAGRGAQDPKWGSRSQRANSCPPSSMASCAEPSEPSAPLPAGVPPLEDFEVLDGVEDAEGEEEEEEEEEEEDDLSELPPLEDMGQPPAEEAEQPGALAREFLAAMEPEPAPAPAPEEWLDILGNGLLRKKNAGPRAARFEPPGQGPGGHLYICRRRWRIGTLGAGGAGAGVHSVVTVTSSRPWISVSHSLDVGETAMVTADSKYCYGPQGSRSPYIPPHAALCLEVTLKTAVDGPDLEMLTGQERVALANRKRECGNPTYQRADFVLAANSYDLAIKAITSSAKVDMTFEEX

SEQ ID NO: 1032545 - protein, 476 aa, Homo sapiens
GLIARRVDRPKSAPRAAPSRATARAGPSRAEPQPSRAGPSAPVPAAMPAGRARTCALLALCLLGPQDFGPTRFICTSVPVDADMCAASVAAGGAEELRSSNVLQLRETVLQQKETILSQKETIRELTAKLGRCESQSTLDPGAGEARAGGGRKQPGSGKNTMGDLSRTPAAETLSQLGQTLQSLKTRLENLEQYSRLNSSSQTNSLKDLLQSKIDELERQVLSRVNTLEEGKGGPRNDTEERVKIETALTSLHQRISELEKGQKDNRPGDKFQLTFPLRTNYMYAKVKKSLPEMYAFTVCMWLKSSATPGVGTPFSYAVPGQANELVLIEWGNNPMEILINDKVAKLPFVINDGKWHHICVTWTTRDGVWEAYQDGTQGGSGENLAPYHPIKPQGVLVLGQEQDTLGGGFDATQAFVGELAHFNIWDRKLTPGEVYNLATCSTKALSGNVIAWAESHIEIYGGATKWTFEACRQIN

SEQ ID NO: 1032546 - protein, 476 aa, Homo sapiens; identical to SEQ ID NO: 1032545

SEQ ID NO: 1032547 - protein, 476 aa, Homo sapiens; identical to SEQ ID NO: 1032545

SEQ ID NO: 1032548 - protein, 430 aa, Homo sapiens
MPAGRARTCALLALCLLGPQDFGPTRFICTSVPVDADMCAASVAAGGAEELRSSNVLQLRETVLQQKETILSQKETIRELTAKLGRCESQSTLDPGAGEARAGGGRKQPGSGKNTMGDLSRTPAAETLSQLGQTLQSLKTRLENLEQYSRLNSSSQTNSLKDLLQSKIDELERQVLSRVNTLEEGKGGPKNDTEERVKIETALTSLHQRISELEKGQKDNRPGDKFQLTFPLRTNYMYAKVKKSLPEMYAFTVCMWLKSSATPGVGTPFSYAVPGQANELVLIEWGNNPMEILINDKVAKLPFVINDGKWHHICVTWTTRDGVWEAYQDGTQGGSGENLAPYHPIKPQGVLVLGQEQDTLGGGFDATQAFVGELAHFNIWDRKLTPGEVYNLATCSTKALSGNVIAWAESHIEIYGGATKWTFEACRQIN

SEQ ID NO: 1032549 - protein, 233 aa, Homo sapiens
MLQCLCFPGLAPPHTRAPSPLGPTRDPVATFLETCREPGSQPAGPASLRAEYLPPSVASIKVSAELLRAALKDGHSGVPLCCATLQWLLAENAAVDVVRARALSSIQGVAPDGANVHLIVREVAMTDLCPAGPIQAVEIQVESSSLADICRAHHAVVGRMQTMVTEQAAQGSSAPDLRVQYLRQIHANHETLLREVQTLRDRLCTEDEASSCATAQRLLQVYRQLRHPSLILL

SEQ ID NO: 1032550 - protein, 909 aa, Homo sapiens
SWYGSGFLDRRSRRRAAGASHSDGPARTMAGAAPRVRYLAGFCCPLGGLAAGKPRVLCHEAEVFLSTGSELVYVYDQEGGLLTAAFRFPDQVWHLELLAPRRLLYALCARRGLYCLSLDHPGRSRSTSQDDRDSEDGDQPSPVIPVDPDACILPDAALCAFTLLDSVLVTLVQGPARWKMQLFEQPCPGEDPRPGGQIGEVELSSYTPPAGVPGKPAAPHFLPVLCSVSPSGSRVPHDLLGGSGGFTLEDALFGLLFGADATLLQSPVVLCGLPDGQLCCVILKALVTSRSAPGDPNALVKILHHLEEPVIFIGALKTEPQAAEAAENFLPDEDVHCDCLVAFGHHGRMLAIKASWDESGKLVPELREYCLPGPVLCAACGGGGRVYHSTPSDLCVVDLSRGSTPLGPEQPEEGPGGLPPMLCPASLNICSVVSLSASPRTHEGGTKLLALSAKGRLMTCSLDLDSEMPGPARMTTESAGQKIKELLSGIGNISERVSFLKKAVDQRNKALTSLNEAMNVSCALLSSGTGPRPISCTTSTTWSRLQTQDVLMATCVLENSSSFSLDQGWTLCIQVLTSSCALDLDSACSAITYTIPVDQLGPGARREVTLPLGPGENGGLDLPVTVSCTLFYSLREVVGGALAPSDSEDPFLDECPSDVLPEQEGVCLPLSRHTVDMLQCLRFPGLALPHTRAPSPLGPTRDPVATFLETCREPGSQPAGPASLRAEYLPPSVASIKVSAELLRAALKDGHSGVPLCCATLQWLLAENAAVDVVRARALSSIQGVAPDGANVHLIVREVAMTDLCPAGPIQAVEIQVESSSLADICRAHHAVVGRMQTMVTEQAAQGSSAPDLRVQYLRQIHANHETLLREVQTLRDRLCTEDEASSCATAQRLLQVYRQLRHPSLILL

SEQ ID NO: 1032551 - protein, 909 aa, Homo sapiens; identical to SEQ ID NO: 1032550

SEQ ID NO: 1032552 - protein, 866 aa, Homo sapiens
SWYGSGFLDRRSRRRAAGASHSDGPARTMAGAAPRVRYLAGFCCPLGGLAAGKPRVLCHEAEVFLSTGSELVYVYDQEGGLLTAAFRFPDQVWHLELLAPRRLLYALCARRGLYCLSLDHPGRSRSTSQDDRDSEDGDQPSPVIPVDPDACILPDAALCAFTLLDSVLVTLVQGPARWKMQLFEQPCPGEDPRPGGQIGEVELSSYTPPAGVPGKPAAPHFLPVLCSVSPSGSRVPHDLLGGSGGFTLEDALFGLLFGADATLLQSPVVLCGLPDGQLCCVILKALVTSRSAPGDPNALVKILHHLEEPVIFIGALKTEPQAAEAAENFLPDEDVHCDCLVAFGHHGRMLAIKASWDESGKLVPELREYCLPGPVLCAACGGGGRVYHSTPSDLCVVDLSRGSTPLGPEQPEEGPGGLPPMLCPASLNICSVVSLSASPRTHEGGTKLLALSAKGRLMTCSLDLDSEMPGPARMTTESAGQKIKELLSGIGNISESTTWSRLQTQDVLMATCVLENSSSFSLDQGWTLCIQVLTSSCALDLDSACSAITYTIPVDQLGPGARREVTLPLGPGENGGLDLPVTVSCTLFYSLREVVGGALAPSDSEDPFLDECPSDVLPEQEGVCLPLSRHTVDMLQCLRFPGLALPHTRAPSPLGPTRDPVATFLETCREPGSQPAGPASLRAEYLPPSVASIKVSAELLRAALKDGHSGVPLCCATLQWLLAENAAVDVVRARALSSIQGVAPDGANVHLIVREVAMTDLCPAGPIQAVEIQVESSSLADICRAHHAVVGRMQTMVTEQAAQGSSAPDLRVQYLRQIHANHETLLREVQTLRDRLCTEDEASSCATAQRLLQVYRQLRHPSLILL

SEQ ID NO: 1032553 - protein, 773 aa, Homo sapiens
PTRSRTRGSTHASGHASANAALCAFTLLDSVLVTLVQGPARWKMQLFEQPCPGEDPRPGGQIGEVELSSYTPPAGVPGKPAAPHFLPVLCSVSPSGSRVPHDLLGGSGGFTLEDALFGLLFGADATLLQSPVVLCGLPDGQLCCVILKALVTSRSAPGDPNALVKILHHLEEPVIFIGALKTEPQAAEAAENFLPDEDVHCDCLVAFGHHGRMLAIKASWDESGKLVPELREYCLPGPVLCAACGGGGRVYHSTPSDLCVVDLSRGSTPLGPEQPEEGPGGLPPMLCPASLNICSVVSLSASPRTHEGGTKLLALSAKGRLMTCSLDLDSEMPGPARMTTESAGQKIKELLSGIGNISERVSFLKKAVDQRNKALTSLNEAMNVSCALLSSGTGPRPISCTTSTTWSRLQTQDVLMATCVLENSSSFSLDQGWTLCIQVLTSSCALDLDSACSAITYTIPVDQLGPGARREVTLPLGPGENGGLDLPVTVSCTLFYSLREVVGGALAPSDSEDPFLDECPSDVLPEQEGVCLPLSRHTVDMLQCLRFPGLALPHTRAPSPLGPTRDPVATFLETCREPGSQPAGPASLRAEYLPPSVASIKVSAELLRAALKDGHSGVPLCCATLQWLLAENAAVDVVRARALSSIQGVAPDGANVHLIVREVAMTDLCPAGPIQAVEIQVESSSLADICRAHHAVVGRMQTMVTEQAAQGSSAPDLRVQYLRQIHANHETLLREVQTLRDRLCTEDEASSCATAQRLLQVYRQLRHPSLILL

SEQ ID NO: 1032554 - protein, 254 aa, Homo sapiens
MPASFPMLRCARSPCWTVCWSPWCRALPDGRCSCLSSPPSPLGPTRDPVATFLETCREPGSQPAGPASLRAEYLPPSVASIKVSAELLRAALKDGHSGVPLCCATLQWLLAENAAVDVVRARALSSIQGVAPDGANVHLIVREVAMTDLCPAGPIQAVEIQVESSSLADICRAHHAVVGRMQTMVTEQAAQGSSAPDLRVQYLRQIHANHETLLREVQTLRDRLCTEDEASSCATAQRLLQVYRQLRHPSLILL

SEQ ID NO: 1032555 - protein, 956 aa, Homo sapiens
SWYGSGFLDRRSRRRAAGASHSDGPARTMAGAAPRVRYLAGFCCPLGGLAAGKPRVLCHEAEVFLSTGSELVYVYDQEGGLLTAAFRFPDQVWHLELLAPRRLLYALCARRGLYCLSLDHPGRSRSTSQDDRDSEDGDQPSPVIPVDPDACILPDAALCAFTLLDSVLVTLVQGPARWKMQLFEQPCPGEDPRPGGQIGEVELSSYTPPAGVPGKPAAPHFLPVLCSVSPSGSRVPHDLLGGSGGFTLEDALFGLLFGADATLLQSPVVLCGLPDGQLCCVILKALVTSRSAPGDPNALVKILHHLEEPVIFIGALKTEPQAAEAAENFLPDEDVHCDCLVAFGHHGRMLAIKASWDESGKLVPELREYCLPGPVLCAACGGGGRVYHSTPSDLCVVDLSRGSTPLGPEQPEEGPGGLPPMLCPASLNICSVVSLSASPRTHEGGTKLLALSAKGRLMTCSLDLDSEMPGPARMTTESAGQKIKELLSGIGNISERVSFLKKAVDQRNKALTSLNEAMNVSCALLSSGTGPRPISCTTSTTWSRLQTQDVLMATCVLENSSSFSLDQGWTLCIQVLTSSCALDLDSACSAITYTIPVDQLGPGARREVTLPLGPGENGGLDLPVTVSCTLFYSLREVVGGALAPSDSEDPFLDECPSDVLPEQEGVCLPLSRHTVDMLQCLRFPGLALPHTRAPSPLGPTRDPVATFLETCREPGSQPAGPASLRAEYLPPSVASIKVSAELLRAALKDGHSVMFFKPIYGSVTKIQKSHKGANCELHSAGTRGGRQLLLTPKPQHRSSGVPLCCATLQWLLAENAAVDVVRARALSSIQGVAPDGANVHLIVREVAMTDLCPAGPIQAVEIQVESSSLADICRAHHAVVGRMQTMVTEQAAQGSSAPDLRVQYLRQIHANHETLLREVQTLRDRLCTEDEASSCATAQRLLQVYRQLRHPSLILL

SEQ ID NO: 1032556 - protein, 80 aa, Homo sapiens
PPATSQVGSCEWWVPQRYPVTSPGPGVGPELCLLHLQTLLREVQTLRDRLCTEDEASSCATAQRLLQVYRQLRHPSLILL

SEQ ID NO: 1032557 - protein, 774 aa, Homo sapiens
SWYGSGFLDRRSRRRAAGASHSDGPARTMAGAAPRVRYLAGFCCPLGGLAAGKPRVLCHEAEVFLSTGSELVYVYDQEGGLLTAAFRFPDQVWHLELLAPRRLLYALCARRGLYCLSLDHPGRSRSTSQDDRDSEDGDQPSPVIPVDPDACILPDAALCAFTLLDSVLVTLVQGPARWKMQLFEQPCPGEDPRPGGQIGEVELSSYTPPAGVPGKPAAPHFLPVLCSVSPSGSRVPHDLLGGSGGFTLEDALFGLLFGADATLLQSPVVLCGLPDGQLCCVILKALVTSRSAPGDPNALVKILHHLEEPVIFIGALKTEPQAAEAAENFLPDEDVHCDCLVAFGHHGRMLAIKASWDESGKLVPELREYCLPGPVLCAACGGGGRVYHSTPSDLCVVDLSRGSTPLGPEQPEEGPGGLPPMLCPASLNICSVVSLSASPRTHEGGTKLLALSAKGRLMTCSLDLDSEMPGPARMTTESAGQKIKELLSGIGNISERVSFLKKAVDQRNKALTSLNEAMNVSCALLSSGTGPRPISCTTSTTWSRLQTQDVLMATCVLENSSSFSLDQGWTLCIQVLTSSCALDLDSACSAITYTIPVDQLGPGARREVTLPLGPGENGGLDLPVTVSCTLFYSLREVVGGALAPSDSEDPFLDECPSDVLPEQEGVCLPLSRHTVDMLQCLRFPGLALPHTRAPSPLGPTRDPVATFLETCREPGSQPAGPASLRAEYLPPSVASIKVSAELLRAALKDGHSGAPRYPCHTVHTCPAAHSGTPR

SEQ ID NO: 1032558 - protein, 249 aa, Homo sapiens
MAGGSFQQRLRCGWGREKHCPWGGGSLSGGGSTPTVCWSWSQARCLPGLSQDVAPGAVGVPPLPGVMSVLRRVSFLKKAVDQRNKALTSLNEAMNVSCALLSSGTGPRPISCTTSTTWSRLQTQDVLMATCVLENSSSFSPAPSLLPQPGLRPTSWCWCFHLGRVLAPLPLQALSAMSAGRSREVLLCCDKRPCLSVNLQASAVFSRPFPPSLTGLLPEPGAAWEPSPPGWPPRKTRPCDPVTPEEALL

SEQ ID NO: 1032559 - protein, 730 aa, Homo sapiens
MQLFEQPCPGEDPRPGGQIGEVELSSYTPPAGVPGKPAAPHFLPVLCSVSPSGSRVPHDLLGGSGGFTLEDALFGLLFGADATLLQSPVVLCGLPDGQLCCVILKALVTSRSAPGDPNALVKILHHLEEPVIFIGALKTEPQAAEAAENFLPDEDVHCDCLVAFGHHGRMLAIKASWDESGKLVPELREYCLPGPVLCAACGGGGRVYHSTPSDLCVVDLSRGSTPLGPEQPEEGPGGLPPMLCPASLNICSVVSLSASPRTHEGGTKLLALSAKGRLMTCSLDLDSEMPGPARMTTESAGQKIKELLSGIGNISERVSFLKKAVDQRNKALTSLNEAMNVSCALLSSGTGPRPISCTTSTTWSRLQTQDVLMATCVLENSSSFSLDQGWTLCIQVLTSSCALDLDSACSAITYTIPVDQLGPGARREVTLPLGPGENGGLDLPVTVSCTLFYSLREVVGGALAPSDSEDPFLDECPSDVLPEQEGVCLPLSRHTVDMLQCLRFPGLALPHTRAPSPLGPTRDPVATFLETCREPGSQPAGPASLRAEYLPPSVASIKVSAELLRAALKDGHSGVPLCCATLQWLLAENAAVDVVRARALSSIQGVAPDGANVHLIVREVAMTDLCPAGPIQAVEIQVESSSLADICRAHHAVVGRMQTMVTEQAAQGSSAPDLRVQYLRQIHANHETLLREVQTLRDRLCTEDEASSCATAQRLLQVYRQLRHPSLILL

SEQ ID NO: 1032560 - protein, 792 aa, Homo sapiens
GPSTGVLWSTSQDDRDSEDGDQPSPVIPVDPDACILPDAALCAFTLLDSVLVTLVQGPARWKMQLFEQPCPGEDPRPGGQIGEVELSSYTPPAGVPGKPAAPHFLPVLCSVSPSGSRVPHDLLGGSGGFTLEDALFGLLFGADATLLQSPVVLCGLPDGQLCCVILKALVTSRSAPGDPNALVKILHHLEEPVIFIGALKTEPQAAEAAENFLPDEDVHCDCLVAFGHHGRMLAIKASWDESGKLVPELREYCLPGPVLCAACGGGGRVYHSTPSDLCVVDLSRGSTPLGPEQPEEGPGGLPPMLCPASLNICSVVSLSASPRTHEGGTKLLALSAKGRLMTCSLDLDSEMPGPARMTTESAGQKIKELLSGIGNISERVSFLKKAVDQRNKALTSLNEAMNVSCALLSSGTGPRPISCTTSTTWSRLQTQDVLMATCVLENSSSFSLDQGWTLCIQVLTSSCALDLDSACSAITYTIPVDQLGPGARREVTLPLGPGENGGLDLPVTVSCTLFYSLREVVGGALAPSDSEDPFLDECPSDVLPEQEGVCLPLSRHTVDMLQCLRFPGLALPHTRAPSPLGPTRDPVATFLETCREPGSQPAGPASLRAEYLPPSVASIKVSAELLRAALKDGHSGVPLCCATLQWLLAENAAVDVVRARALSSIQGVAPDGANVHLIVREVAMTDLCPAGPIQAVEIQVESSSLADICRAHHAVVGRMQTMVTEQAAQGSSAPDLRVQYLRQIHANHETLLREVQTLRDRLCTEDEASSCATAQRLLQVYRQLRHPSLILL

SEQ ID NO: 1032561 - protein, 485 aa, Homo sapiens
MAGGSFQQRLRCGWGREKHCPWGGGSLSGGGSTPTVCWSWSQARCLPGLSQDVAPGAVGVPPLPGVMSVLRRVSFLKKAVDQRNKALTSLNEAMNVSCALLSSGTGPRPISCTTSTTWSRLQTQDVLMATCVLENSSSFSLDQGWTLCIQVLTSSCALDLDSACSAITYTIPVDQLGPGARREVTLPLGPGENGGLDLPVTVSCTLFYSLREVVGGALAPSDSEDPFLDECPSDVLPEQEGVCLPLSRHTVDMLQCLRFPGLALPHTRAPSPLGPTRDPVATFLETCREPGSQPAGPASLRAEYLPPSVASIKVSAELLRAALKDGHSGVPLCCATLQWLLAENAAVDVVRARALSSIQGVAPDGANVHLIVREVAMTDLCPAGPIQAVEIQVESSSLADICRAHHAVVGRMQTMVTEQAAQGSSAPDLRVQYLRQIHANHETLLREVQTLRDRLCTEDEASSCATAQRLLQVYRQLRHPSLILL

SEQ ID NO: 1032562 - protein, 909 aa, Homo sapiens; identical to SEQ ID NO: 1032550

SEQ ID NO: 1032563 - protein, 766 aa, Homo sapiens
SWYGSGFLDRRSRRRAAGASHSDGPARTMAGAAPRVRYLAGFCCPLGGLAAGKPRVLCHEAEVFLSTGSELVYVYDQEGGLLTAAFRFPDQVWHLELLAPRRLLYALCARRGLYCLSLDHPGRSRSTSQDDRDSEDGDQPSPVIPVDPDACILPDAALCAFTLLDSVLVTLVQGPARWKMQLFEQPCPGEDPRPGGQIGEVELSSYTPPAGVPGKPAAPHFLPVLCSVSPSGSRVPHDLLGGSGGFTLEDALFGLLFGADATLLQSPVVLCGLPDGQLCCVILKALVTSRSAPGDPNALVKILHHLEEPVIFIGALKTEPQAAEAAENFLPDEDVHCDCLVAFGHHGRMLAIKASWDESGKLVPELREYCLPGPVLCAACGGGGRVYHSTPSDLCVVDLSRGSTPLGPEQPEEGPGGLPPMLCPASLNICSVVSLSASPRTHEGGTKLLALSAKGRLMTCSLDLDSEMPGPARMTTESAGQKIKELLSGIGNISERVSFLKKAVDQRNKALTSLNEAMNVSCALLSSGTGPRPISCTTSTTWSRLQTQDVLMATCVLENSSSFSLDQGWTLCIQVLTSSCALDLDSACSAITYTIPVDQLGPGARREVTLPLGPGENGGLDLPVTVSCTLFYSLREVVGGALAPSDSEDPFLDECPSDVLPEQEGVCLPLSRHTVDMLQCLRFPGLALPHTRAPSPLGPTRDPVATFLETCREPGSQPAGPASLRAEYLPPSVASSAGVSPSLTAAAAPALAFLTAGQPSHHRSSP

SEQ ID NO: 1032564 - protein, 792 aa, Homo sapiens
SWYGSGFLDRRSRRRAAGASHSDGPARTMAGAAPRVRYLAGFCCPLGGLAAGKPRVLCHEAEVFLSTGSELVYVYDQEGGLLTAAFRFPDQVWHLELLAPRRLLYALCARRGLYCLSLDHPGRSRSTSQDDRDSEDGDQPSPVIPVDPDACILPDAALCAFTLLDSVLVTLVQGPARWKMQLFEQPCPGEDPRPGGQIGEVELSSYTPPAGVPGKPAAPHFLPVLCSVSPSGSRVPHDLLGGSGGFTLEDALFGLLFGADATLLQSPVVLCGLPDGQLCCVILKALVTSRSAPGDPNALVKILHHLEEPVIFIGALKTEPQAAEAAENFLPDEDVHCDCLVAFGHHGRMLAIKASWDESGKLVPELREYCLPGPVLCAACGGGGRVYHSTPSDLCVVDLSRGSTPLGPEQPEEGPGGLPPMLCPASLNICSVVSLSASPRTHEGGTKLLALSAKGRLMTCSLDLDSEMPGPARMTTESAGQKIKELLSGIGNISERVSFLKKAVDQRNKALTSLNEAMNVSCALLSSGTGPRPISCTTSTTWSRLQTQDVLMATCVLENSSSFSLDQGWTLCIQVLTSSCALDLDSACSAITYTIPVDQLGPGARREVTLPLGPGENGGLDLPVTVSCTLFYSLREVVGGALAPSDSEDPFLDECPSDVLPEQEGVCLPLSRHTVDMLQCLRFPGLALPHTRAPSPLGPTRDPVATFLETCREPGSQPAGPASLRAEYLPPSVASIKVSAELLRAALKDGHSGWWHCLALLSLGDFFFFFKRQELALLPRLECSGAIMAHCS

SEQ ID NO: 1032565 - protein, 903 aa, Homo sapiens [sequence omitted]

SEQ ID NO: 1032566 - protein, 980 aa, Homo sapiens
MATSADSPSSPLGAEDLLSDSSEPPGLNQVSSEVTSQLYASLRLSRQAEATARAQLYLPSTSPPHEGLDGFAQELSRSLSVGLEKNLKKKDGSKHIFEMESVRGQLQTMLQTSRDTAYRDPLIPGAGSERREEDSFDSDSTATLLNTRPLQDLSPSSSAQALEELFPRYTSLRPGPPLNPPDFQGLRDALDSEHTRRKHCERHIQSLQTRVLELQQQLAVAVAADRKKDTMIEQLDKTLARVVEGWNRHEAERTEVLRGLQEEHQAAELTRSKQQETVTRLEQSLSEAMEALNREQESARLQQRERETLEEERQALTLRLEAEQQRCCVLQEERDAARAGQLSEHRELETLRAALEEERQTWAQQEHQLKEHYQALQEESQAQLEREKEKSQREAQAAWETQHQLALVQSEVRRLEGELDTARRERDALQLEMSLVQARYESQRIQLESELAVQLEQRVTERLAQAQESSLRQAASLREHHRKQLQDLSGQHQQELASQLAQFKVEMAEREERQQQVAEDYELSPGPQSAPFRPQPLSHVVEPKLGTVKSCSLDGSVLLYMGPSPFQNIRCPTFPFVALFSSQVSASLKALSHFFSLGFRRLAREQARVCELQSGNQQLEEQRVELVERLQAMLQAHWDEANQLLSTTLPPPNPQAPPAGPSSPGPQEPEKEERRVWTMPPMAVALKPVLQQSREARDELPGAPPVLCSSSSDLSLLLGPSFQSQHSFQPLEPKPDLTSSTAGAFSALGAFHPDHRAERPFPEEDPGPDGEGLLKQGLPPAQLEGLKNFLHQLLETVPQNNENPSVDLLPPKSGPLTVPSWEEAPQVPRIPPPVHKTKVPLAMASSLFRVPEPPSSHSQGSGPSSGSPERGGDGLTFPRQLMEVSQLLRLYQARGWGALPAEDLLLYLKRLEHSGTDGRGDNVPRRNTDSRLGEIPRKEIPSQAVPRRLATAPKTEKPPARKKSGHPAPSSMRSRGGVWR

SEQ ID NO: 1032567 - protein, 946 aa, Homo sapiens
MATSADSPSSPLGAEDLLSDSSEPPGLNQVSSEVTSQLYASLRLSRQAEATARAQLYLPSTSPPHEGLDGFAQELSRSLSVGLEKNLKKKDGSKHIFEMESVRGQLQTMLQTSRDTAYRDPLIPGAGSERREEDSFDSDSTATLLNTRPLQDLSPSSSAQALEELFPRYTSLRPGPPLNPPDFQGLRDALDSEHTRRKTYSVLGTQASWLQPTPPLEELESLVLWSYQRWATPRLLTLFPSHCERHIQSLQTRVLELQQQLAVAVAADRKKDTMIEQLDKTLARVVEGWNRHEAERTEVLRGLQEEHQAAELTRSKQQETVTRLEQSLSEAMEALNREQESARLQQRERETLEEERQALTLRLEAEQQRCCVLQEERDAARAGQLSEHRELETLRAALEEERQTWAQQEHQLKEHYQALQEESQAQLEREKEKSQREAQAAWETQHQLALVQSEVRRLEGELDTARRERDALQLEMSLVQARYESQRIQLESELAVQLEQRVTERLAQAQESSLRQAASLREHHRKQLQDLSGQHQQELASQLAQFKVEMAEREERQQQVAEDYELRLAREQARVCELQSGNQQLEEQRVELVERLQAMLQAHWDEANQLLSTTLPPPNPQAPPAGPSSPGPQEPEKEERRVWTMPPMAVALKPVLQQSREARDELPGAPPVLCSSSSDLSLLLGPSFQSQHSFQPLEPKPDLTSSTAGAFSALGAFHPDHRAERPFPEEDPGPDGEGLLKQGLPPAQLEGLKNFLHQLLETVPQNNENPSVDLLPPKSGPLTVPSWEEAPQVPRIPPPVHKTKVPLAMASSLFRVPEPPSSHSQGSGPSSGSPERGGDGLTFPRQLMEVSQLLRLYQARGWGALPAEDLLLYLKRLEHSGTDGRGDNVPRRNTDSRLGEIPRKEIPSQAVPRRLATAPKTEKPPARKKSGHPAPSSMRSRGGVWR

SEQ ID NO: 1032568 - protein, 401 aa, Homo sapiens
YKTPGVFKHSTCQLTYYTGSIPRYADVPCVAVLTLSVPPLCTQRVELVERLQAMLQAHWDEANQLLSTTLPPPNPQAPPAGPSSPGPQEPEKEERRVWTMPPMAVALKPVLQQSREARDELPGAPPVLCSSSSDLSLLLGPSFQSQHSFQPLEPKPDLTSSTAGAFSALGAFHPDHRAERPFPEEDPGPDGEGLLKQGLPPAQLEGLKNFLHQLLETVPQNNENPSVDLLPPKSGPLTVPSWEEAPQVPRIPPPVHKTKVPLAMASSLFRVPEPPSSHSQGSGPSSGSPERGGDGLTFPRQLMEVSQLLRLYQARGWGALPAEDLLLYLKRLEHSGTDGRGDNVPRRNTDSRLGEIPRKEIPSQAVPRRLATAPKTEKPPARKKSGHPAPSSMRSRGGVWR

SEQ ID NO: 1032569 - protein, 579 aa, Homo sapiens
MIEQLDKTLARVVEGWNRHEAERTEVLRGLQEEHQAAELTRSKQQETVTRLEQSLSEAMEALNREQESARLQQRERETLEEERQALTLRLEAEQQRCCVLQEERDAARAGQLSEHRELETLRAALEEERQTWAQQEHQLKEHYQALQEESQAQLEREKEKSQREAQAAWETQHQLALVQSEVRRLEGELDTARRERDALQLEMSLVQARYESQRIQLESELAVQLEQRVTERLAQAQESSLRQAASLREHHRKQLQDLSGQHQQELASQLAQFKVEMAEREERQQQVAEDYELSPPAGPSSPGPQEPEKEERRVWTMPPMAVALKPVLQQSREARDELPGAPPVLCSSSSDLSLLLGPSFQSQHSFQPLEPKPDLTSSTAGAFSALGAFHPDHRAERPFPEEDPGPDGEGLLKQGLPPAQLEGLKNFLHQLLETVPQNNENPSVDLLPPKSGPLTVPSWEEAPQVPRIPPPVHKTKVPLAMASSLFRVPEPPSSHSQGSGPSSGSPERGGDGLTFPRQLMEVSQLLRLYQARGWGALPAEDLLLYLKRLEHSGYKPGRKEEGFSGWKLDYGEWSGCVLH

SEQ ID NO: 1032570 - protein, 903 aa, Homo sapiens [sequence omitted]

SEQ ID NO: 1032571 - protein, 761 aa, Homo sapiens
MATSADSPSSPLGAEDLLSDSSEPPGLNQVSSEVTSQLYASLRLSRQAEATARAQLYLPSTSPPHEGLDGFAQELSRSLSVGLEKNLKKKDGSKHIFEMESVRGQLQTMLQTSRDTAYRDPLIPGAGSERREEDSFDSDSTATLLNTRPLQDLSPSSSAQALEELFPRYTSLRPGPPLNPPDFQGLRDALDSEHTRRKHCERHIQSLQTRVLELQQQLAVAVAADRKKDTMIEQLDKTLARVVEGWNRHEAERTEVLRGLQEEHQAAELTRSKQQETVTRLEQSLSEAMEALNREQESARLQQRERETLEEERQALTLRLEAEQQRCCVLQEERDAARAGQLSEHRELETLRAALEEERQTWAQQEHQLKEHYQALQEESQAQLEREKEKSQREAQAAWETQHQLALVQSEVRRLEGELDTARRERDALQLEMSLVHPPAGPSSPGPQEPEKEERRVWTMPPMAVALKPVLQQSREARDELPGAPPVLCSSSSDLSLLLGPSFQSQHSFQPLEPKPDLTSSTAGAFSALGAFHPDHRAERPFPEEDPGPDGEGLLKQGLPPAQLEGLKNFLHQLLETVPQNNENPSVDLLPPKSGPLTVPSWEEAPQVPRIPPPVHKTKVPLAMASSLFRVPEPPSSHSQGSGPSSGSPERGGDGLTFPRQLMEVSQLLRLYQARGWGALPAEDLLLYLKRLEHSGTDGRGDNVPRRNTDSRLGEIPRKEIPSQAVPRRLATAPKTEKPPARKKSGHPAPSSMRSRGGVWR

SEQ ID NO: 1032572 - protein, 864 aa, Homo sapiens [sequence omitted]

SEQ ID NO: 1032573 - protein, 774 aa, Homo sapiens
LGSFAHVGDLEPQGACFRILLILPLQTYSVLGTQASWLQPTPPLEELESLVLWSYQRWATPRLLTLFPSHCERHIQSLQTRVLELQQQLAVAVAADRKKDTMIEQLDKTLARVVEGWNRHEAERTEVLRGLQEEHQAAELTRSKQQETVTRLEQSLSEAMEALNREQESARLQQRERETLEEERQALTLRLEAEQQRCCVLQEERDAARAGQLSEHRELETLRAALEEERQTWAQQEHQLKEHYQALQEESQAQLEREKEKSQREAQAAWETQHQLALVQSEVRRLEGELDTARRERDALQLEMSLVQARYESQRIQLESELAVQLEQRVTERLAQAQESSLRQAASLREHHRKQLQDLSGQHQQELASQLAQFKVEMAEREERQQQVAEDYELRLAREQARVCELQSGNQQLEEQRVELVERLQAMLQAHWDEANQLLSTTLPPPNPQAPPAGPSSPGPQEPEKEERRVWTMPPMAVALKPVLQQSREARDELPGAPPVLCSSSSDLSLLLGPSFQSQHSFQPLEPKPDLTSSTAGAFSALGAFHPDHRAERPFPEEDPGPDGEGLLKQGLPPAQLEGLKNFLHQLLETVPQNNENPSVDLLPPKSGPLTVPSWEEAPQVPRIPPPVHKTKVPLAMASSLFRVPEPPSSHSQGSGPSSGSPERGGDGLTFPRQLMEVSQLLRLYQARGWGALPAEDLLLYLKRLEHSGTDGRGDNVPRRNTDSRLGEIPRKEIPSQAVPRRLATAPKTEKPPARKKSGHPAPSSMRSRGGVWR

SEQ ID NO: 1032574 - protein, 388 aa, Homo sapiens
MASLYVAKPGSNCQPQTVLPKCWDYRCEPLHPEIYNLIKVFVPCLISLNLLCFDPSFCLSPGQAPPAGPSSPGPQEPEKEERRVWTMPPMAVALKPVLQQSREARDELPGAPPVLCSSSSDLSLLLGPSFQSQHSFQPLEPKPDLTSSTAGAFSALGAFHPDHRAERPFPEEDPGPDGEGLLKQGLPPAQLEGLKNFLHQLLETVPQNNENPSVDLLPPKSGPLTVPSWEEAPQVPRIPPPVHKTKVPLAMASSLFRVPEPPSSHSQGSGPSSGSPERGGDGLTFPRQLMEVSQLLRLYQARGWGALPAEDLLLYLKRLEHSGTDGRGDNVPRRNTDSRLGEIPRKEIPSQAVPRRLATAPKTEKPPARKKSGHPAPSSMRSRGGVWR

SEQ ID NO: 1032575 - protein, 843 aa, Homo sapiens
MATSADSPSSPLGAEDLLSDSSEPPGLNQVSSEVTSQLYASLRLSRQAEATARAQLYLPSTSPPHEGLDGFAQELSRSLSVGLEKNLKKKDGSKHIFEMESVRGQLQTMLQTSRDTAYRDPLIPGAGSERREEDSFDSDSTATLLNTRPLQDLSPSSSAQALEELFPRYTSLRPGPPLNPPDFQGLRDALDSEHTRRKHCERHIQSLQTRVLELQQQLAVAVAADRKKDTMIEQLDKTLARVVEGWNRHEAERTEVLRGLQEEHQAAELTRSKQQETVTRLEQSLSEAMEALNREQESARLQQRERETLEEERQALTLRLEAEQQRCCVLQEERDAARAGQLSEHRELETLRAALEEERQTWAQQEHQLKEHYQALQEESQAQLEREKEKSQREAQAAWETQHQLALVQSEVRRLEGELDTARRERDALQLEMSLVQARYESQRIQLESELAVQLEQRVTERLAQAQESSLRQAASLREHHRKQLQDLSGQHQQELASQLAQFKVEMAEREERQQQVAEDYELSPGPQSAPFRPQPLSHVVEPKLGTVKSCSLDGSVLLYMGPSPFQNIRCPTFPFVALFSSQVSASLKALSHFFSLGFRRLAREQARVCELQSGNQQLEEQRVELVERLQAMLQAHWDEANQLLSEGLKNFLHQLLETVPQNNENPSVDLLPPKSGPLTVPSWEEAPQVPRIPPPVHKTKVPLAMASSLFRVPEPPSSHSQGSGPSSGSPERGGDGLTFPRQLMEVSQLLRLYQARGWGALPAEDLLLYLKRLEHSGTDGRGDNVPRRNTDSRLGEIPRKEIPSQAVPRRLATAPKTEKPPARKKSGHPAPSSMRSRGGVWR

SEQ ID NO: 1032576 - protein, 851 aa, Homo sapiens
PGVGESGQRKQAGKPLSKRFQEKSLPFFGRGGEGVRELEREGLFSSGGPCFCHYLTLALGSLWLPAGDPLIPGAGSERREEDSFDSDSTATLLNTRPLQDLSPSSSAQALEELFPRYTSLRPGPPLNPPDFQGLRDALDSEHTRRKHCERHIQSLQTRVLELQQQLAVAVAADRKKDTMIEQLDKTLARVVEGWNRHEAERTEVLRGLQEEHQAAELTRSKQQETVTRLEQSLSEAMEALNREQESARLQQRERETLEEERQALTLRLEAEQQRCCVLQEERDAARAGQLSEHRELETLRAALEEERQTWAQQEHQLKEHYQALQEESQAQLEREKEKSQREAQAAWETQHQLALVQSEVRRLEGELDTARRERDALQLEMSLVQARYESQRIQLESELAVQLEQRVTERLAQAQESSLRQAASLREHHRKQLQDLSGQHQQELASQLAQFKVEMAEREERQQQVAEDYELRLAREQARVCELQSGNQQLEEQRVELVERLQAMLQAHWDEANQLLSTTLPPPNPQAPPAGPSSPGPQEPEKEERRVWTMPPMAVALKPVLQQSREARDELPGAPPVLCSSSSDLSLLLGPSFQSQHSFQPLEPKPDLTSSTAGAFSALGAFHPDHRAERPFPEEDPGPDGEGLLKQGLPPAQLEGLKNFLHQLLETVPQNNENPSVDLLPPKSGPLTVPSWEEAPQVPRIPPPVHKTKVPLAMASSLFRVPEPPSSHSQGSGPSSGSPERGGDGLTFPRQLMEVSQLLRLYQARGWGALPAEDLLLYLKRLEHSGTDGRGDNVPRRNTDSRLGEIPRKEIPSQAVPRRLATAPKTEKPPARKKSGHPAPSSMRSRGGVWR

SEQ ID NO: 1032577 - protein, 591 aa, Homo sapiens
MDDFRDPQRWKECAKQGKMPCYFDLIEENVYLTERKKNKSHRDIKRMQCECTPLSKDKELKGEIACGEDCLNRLLMIECSSRCPNGDYCSNRRFQRKQHADVEVILTEKKGWGLRAAKDLPSNTFVLEYCGEVLDHKEFKARVKEYARNKNIHYYFMALKNDEIIDATQKGNCSRFMNHSCEPNCETQKWTVNGQLRVGFFTTKLVPSGSELTFDYQFQRYGKEAQKCFCGSANCRGYLGGENRVSIRAAGGKMKNERSRRGFKVDGELEALMENGEGLSDKNQVLSLSRLMVRIETLEQKLTCLELIQNTHSQSCLKSFLERHGLSLLWIWMAELGDGRESNQKLQEEIIKTLEHLPIPTKNMLEESKVLPIIQRWSQTKTAVPPLSEGDGYSSENTSRAHTPLNTPDPSTKLSTEADTDTPKKLMFRRLKIISENSMDSAISDATSELEGKGWQEDLDQLENVPVEEEEELQSQQLLPQQLPECKVDSETNIEASKLPTSEPEADAEIEPKESNGTKLEEPINEETPSQDEEEGVSDVESERSQEQPDKTVDISDLATKLLDSWKDLKEVYRIPKKSQTEKENTRNQPE

SEQ ID NO: 1032578 - protein, 773 aa, Homo sapiens
MENGEGLSDKNQVLSLSRLMVRIETLEQKLTCLELIQNTHSQSCLKSFLERHGLSLLWIWMAELGDGRESNQKLQEEIIKTLEHLPIPTKNMLEESKVLPIIQRWSQTKTAVPPLSEGDGYSSENTSRAHTPLNTPDPSTKLSTEADTDTPKKLMFRRLKIISENSMDSAISDATSELEGKDGKEDLDQLENVPVEEEEELQSQQLLPQQLPECKVDSETNIEASKLPTSEPEADAEIEPKESNGTKLEEPINEETPSQDEEEGVSDVESERSQEQPDKTVDISDLATKLLDSWKDLKEVYRIPKKSQTEKENTTTERGRDAVGFRDQTPAPKTPNRSRERDPDKQTQNKEKRKRRSSLSPPSSAYERGTKRPDDRYDTPTSKKKVRIKDRNKLSTEERRKLFEQEVAQREAQKQQQQMQNLGMTSPLPYDSLGYNAPHHPFAGYPPGYPMQAYVDPSNPNAGKVLLPTPSMDPVCSPAPYDHAQPLVGHSTEPLSAPPPVPVVPHVAAPVEVSSSQYVAQSDGVVHQDSSVAVLPVPAPGPVQGQNYSVWDSNQQSVSVQQQYSPAQSQATIYYQGQTCPTVYGVTSPYSQTTPPIVQSYAQPSLQYIQGQQIFTAHPQGVVVQPAAAVTTIVAPGQPQPLQPSEMVVTNNLLDLPPPSPPKPKTIVLPPNWKTARDPEGKIYYYHVITRQTQWDPPTWESPGDDASLEHEAGDGPGELQHMDENPMKASKKPKTAEADNPSGTGKERPAFPKKARSRPRVNYGTAGCGIPG

SEQ ID NO: 1032579 - protein, 375 aa, Homo sapiens
MEDSDGVTYALKCDSSGHAPEIVSTVHEDYSGSSESSNDESDSEDTDSDDSSIPRNRLQSVVVVPKNSTLPMEETSPCSSRSSQSYRHYSDHWEDERLESRRHLYEEKFESIASKACPQTDKFFLHKGTEKNPEISFTQSSRKQIDNRLPELSHPQSDGVDSTSHTDVKSDPLGHPNSEETVKAKIPSRQQEELPIYSSDFEDVPNKSWQQTTFQNRPDSRLGKTELSFSSSCEIPHVDGLHSSEELRNLGWDFSQEKPSTTYQQPDSSYGACGGHKYQQNAEQYGGTRDYWQGNGYWDPRSGRPPGTGVVYDRTQGQVPDSLTDDREEEENWDQQDGSHFSDQSDKFLLSLQKDKGSVQAPEISSNSIKDTLAV

SEQ ID NO: 1032580 - protein, 1833 aa, Homo sapiens
NGFQNISRCKEKDLDDTCMLHKKSESPFRETEPLVSPHQDKLMSMPVMTVDYSKTVVKEPVDTRVSCCKTKDSDIYCTLNDSNPSLCNSEAENIEPSVMKISSNSFMNVHLESKPVICDSRNLTDHSKFACEEYKQSIGSTSSASVNHFDDLYQPIGSSGIASSLQSLPPGIKVDSLTLLKCGENTSPVLDAVPKSKKSSEFLKHAGKETIVEVGSDLPDSGKGFASRENRRNNGLSGKCLQEAQEEGNSILPERRGRPEISLDERGEGGHVHTSDDSEVVFSSCDLNLTMEDSDGVTYALKCDSSGHAPEIVSTVHEDYSGSSESSNDESDSEDTDSDDSSIPRNRLQSVVVVPKNSTLPMEETSPCSSRSSQSYRHYSDHWEDERLESRRHLYEEKFESIASKACPQTDKFFLHKGTEKNPEISFTQSSRKQIDNRLPELSHPQSDGVDSTSHTDVKSDPLGHPNSEETVKAKIPSRQQEELPIYSSDFEDVPNKSWQQTTFQNRPDSRLGKTELSFSSSCEIPHVDGLHSSEELRNLGWDFSQEKPSTTYQQPDSSYGACGGHKYQQNAEQYGGTRDYWQGNGYWDPRSGRPPGTGVVYDRTQGQVPDSLTDDREEEENWDQQDGSHFSDQSDKFLLSLQKDKGSVQAPEISSNSIKDTLAVNEKKDFSKNLEKNDIKDRGPLKKRRQEIESDSESDGELQDRKKVRVEVEQGETSVPPGSALVGPSCVMDDFRDPQRWKECAKQGKMPCYFDLIEENVYLTERKKNKSHRDIKRMQCECTPLSKDERAQGEIACGEDCLNRLLMIECSSRCPNGDYCSNRRFQRKQHADVEVILTEKKGWGLRAAKDLPSNTFVLEYCGEVLDHKEFKARVKEYARNKNIHYYFMALKNDEIIDATQKGNCSRFMNHSCEPNCETQKWTVNGQLRVGFFTTKLVPSGSELTFDYQFQRYGKEAQKCFCGSANCRGYLGGENRVSIRAAGGKMKKERSRKKDSVDGELEALMENGEGLSDKNQVLSLSRLMVRIETLEQKLTCLELIQNTHSQSCLKSFLERHGLSLLWIWMAELGDGRESNQKLQEEIIKTLEHLPIPTKNMLEESKVLPIIQRWSQTKTAVPPLSEGDGYSSENTSRAHTPLNTPDPSTKLSTEADTDTPKKLMFRRLKIISENSMDSAISDATSELEGKDGKEDLDQLENVPVEEEEELQSQQLLPQQLPECKVDSETNIEASKLPTSEPEADAEIEPKESNGTKLEEPINEETPSQDEEEGVSDVESERSQEQPDKTVDISDLATKLLDSWKDLKLLRAARSLLTSPADHVSPFLNSISNFVLKKNENLRAFCEETGRWLGSWMMHEKYNRRYIEFQRKVKLKRKTQQLNEEGMLLASEIKHLPRRLLIGQERETQTSKLKIKRKGNEEAPSHHPLLPMSGEQKGQMTDDDTPTSKKKVRIKDRNKLSTEERRKLFEQEVAQREAQKQQQQMQNLGMTSPLPYDSLGYNAPHHPFAGYPPGYPMQAYVDPSNPNAGKVLLPTPSMDPVCSPAPYDHAQPLVGHSTEPLSAPPPVPVVPHVAAPVEVSSSQYVAQSDGVVHQDSSVAVLPVPAPGPVQGQNYSVWDSNQQSVSVQQQYSPAQSQATIYYQGQTCPTVYGVTSPYSQTTPPIVQSYAQPSLQYIQGQQIFTAHPQGVVVQPAAAVTTIVAPGQPQPLQPSEMVVTNNLLDLPPPSPPKPKTIVLPPNWKTARDPEGKIYYYHVITRQTQWDPPTWESPGDDASLEHEAGDGPGELQHMDENPMKASKKPKTAEADNFQWNWQRKAGVSKESPVSPARELWNCWMWDSR

SEQ ID NO: 1032581 - protein, 591 aa, Homo sapiens; identical to SEQ ID NO: 1032577

SEQ ID NO: 1032582 - protein, 1778 aa, Homo sapiens
NGFQNISRCKEKDLDDTCMLHKKSESPFRETEPLVSPHQDKLMSMPVMTVDYSKTVVKEPVDTRVSCCKTKDSDIYCTLNDSNPSLCNSEAENIEPSVMKISSNSFMNVHLESKPVICDSRNLTDHSKFACEEYKQSIGSTSSASVNHFDDLYQPIGSSGIASSLQSLPPGIKVDSLTLLKCGENTSPVLDAVPKSKKSSEFLKHAGKETIVEVGSDLPDSGKGFASRENRRNNGLSGKCLQEAQEEGNSILPERRGRPEISLDERGEGGHVHTSDDSEVVFSSCDLNLTMEDSDGVTYALKCDSSGHAPEIVSTVHEDYSGSSESSNDESDSEDTDSDDSSIPRNRLQSVVVVPKNSTLPMEETSPCSSRSSQSYRHYSDHWEDERLESRRHLYEEKFESIASKACPQTDKFFLHKGTEKNPEISFTQSSRKQIDNRLPELSHPQSDGVDSTSHTDVKSDPLGHPNSEETVKAKIPSRQQEELPIYSSDFEDVPNKSWQQTTFQNRPDSRLGKTELSFSSSCEIPHVDGLHSSEELRNLGWDFSQEKPSTTYQQPDSSYGACGGHKYQQNAEQYGGTRDYWQGNGYWDPRSGRPPGTGVVYDRTQGQVPDSLTDDREEEENWDQQDGSHFSDQSDKFLLSLQKDKGSVQAPEISSNSIKDTLAVNEKKDFSKNLEKNDIKDRGPLKKRRQEIESDSESDGELQDRKKVRVEVEQGETSVPPGSALVGPSCVMDDFRDPQRWKECAKQGKMPCYFDLIEENVYLTERKKNKSHRDIKRMQCECTPLSKDERAQGEIACGEDCLNRLLMIECSSRCPNGDYCSNRRFQRKQHADVEVILTEKKGWGLRAAKDLPSNTFVLEYCGEVLDHKEFKARVKEYARNKNIHYYFMALKNDEIIDATQKGNCSRFMNHSCEPNCETQKWTVNGQLRVGFFTTKLVPSGSELTFDYQFQRYGKEAQKCFCGSANCRGYLGGENRVSIRAAGGKMKKERSRKKDSVDGELEALMENGEGLSDKNQVLSLSRLMVRIETLEQKLTCLELIQNTHSQSCLKSFLERHGLSLLWIWMAELGDGRESNQKLQEEIIKTLEHLPIPTKNMLEESKVLPIIQRWSQTKTAVPPLSEGDGYSSENTSRAHTPLNTPDPSTKLSTEADTDTPKKLMFRRLKIISENSMDSAISDATSELEGKDGKEDLDQLENVPVEEEEELQSQQLLPQQLPECKVDSETNIEASKLPTSEPEADAEIEPKESNGTKLEEPINEETPSQDEEEGVSDVESERSQEQPDKTVDISDLATKLLDSWKDLKEVYRIPKKSQTEKENTTTERGRDAVGFRDQTPAPKTPNRSRERDPDKQTQNKEKRKRRSSLSPPSSAYERGTKRPDDRYDTPTSKKKVRIKDRNKLSTEERRKLFEQEVAQREAQKQQQQMQNLGMTSPLPYDSLGYNAPHHPFAGYPPGYPMQAYVDPSNPNAGKVLLPTPSMDPVCSPAPYDHAQPLVGHSTEPLSAPPPVPVVPHVAAPVEVSSSQYVAQSDGVVHQDSSVAVLPVPAPGPVQGQNYSVWDSNQQSVSVQQQYSPAQSQATIYYQGQTCPTVYGVTSPYSQTTPPIVQSYAQPSLQYIQGQQIFTAHPQGVVVQPAAAVTTIVAPGQPQPLQPSEMVVTNNLLDLPPPSPPKPKTIVLPPNWKTARDPEGKIYYYHVITRQTQWDPPTWESPGDDASLEHEAGDGPGELQHMDENPMKASKKPKDSRSRQLPVELDKERPAFPKKARSRPRVNYGTAGCGIPG

SEQ ID NO: 1032583 - protein, 355 aa, Homo sapiens
MQNLGMTSPLPYDSLGYNAPHHPFAGYPPGYPMQAYVDPSNPNAGKVLLPTPSMDPVCSPAPYDHAQPLVGHSTEPLSAPPPVPVVPHVAAPVEVSSSQYVAQSDGVVHQDSSVAVLPVPAPGPVQGQNYSVWDSNQQSVSVQQQYSPAQSQATIYYQGQTCPTVYGVTSPYSQTTPPIVQSYAQPSLQYIQGQQIFTAHPQGVVVQPAAAVTTIVAPGQPQPLQPSEMVVTNNLLDLPPPSPPKPKTIVLPPNWKTARDPEGKIYYYHVITRQTQWDPPTWESPGDDASLEHEAGDGPGELQHMDENPMKASKKPKTAEADNFQWNWPRKAGVSKESPVSPARELWNCWMWDSR

SEQ ID NO: 1032584 - protein, 204 aa, Homo sapiens [sequence omitted]

SEQ ID NO: 1032585 - protein, 204 aa, Homo sapiens [sequence omitted]

SEQ ID NO: 1032586 - protein, 186 aa, Homo sapiens; identical to SEQ ID NO: 919972

SEQ ID NO: 1032587 - protein, 117 aa, Homo sapiens
ETEKGRGKATKEKNFLEATWAHCGALRVLNSYWVGEDSTYKFFEVILIDPFHKAIRRNPDTQWITKPVHKHREMRGLTSAGRKSRGLGKGHKFHHTIGGSRRAAWRRRNTLQLHRYR

SEQ ID NO: 1032588 - protein, 204 aa, Homo sapiens [sequence omitted]

SEQ ID NO: 1032589 - protein, 204 aa, Homo sapiens [sequence omitted]

SEQ ID NO: 1032590 - protein, 105 aa, Homo sapiens
GRVGRPTRRHCGALRVLNSYWVGEDSTYKFFEVILIDPFHKAIRRNPDTQWITKPVHKHREMRGLTSAGRKSRGLGKGHKFHHTIGGSRRAAWRRRNTLQLHRYR

SEQ ID NO: 1032591 - protein, 204 aa, Homo sapiens [sequence omitted]

SEQ ID NO: 1032592 - protein, 204 aa, Homo sapiens [sequence omitted]

SEQ ID NO: 1032593 - protein, 228 aa, Homo sapiens
MGAYKYIQELWRKKQSDVMRFLLRVRCWQYRQLSALHRAPRPTRPDKARRLGYKAKQGYVIYRIRVRRGGRKRPVPKGATYGKPVHHGVNQLKFARSLQSVAEERAGRHCGALRVLNSYWVGEDSTYKFFEVILIDPFHKAIRRNPDTQWITKPVHKHREMRGLTSAGRKSRGLGKGHKFHHTIGGSRRAAWRRRNTLQLHRYFSMAGEALENLYIMVEEEANMSFFT

SEQ ID NO: 1032594 - protein, 79 aa, Homo sapiens
  misc_feature (74)..(74): Xaa can be any naturally occurring amino acid
AAAAMEPRSMEYFCAQVQQKDVGGRLQVGQELLLYLGAPGAISDLEEDLGRLGKTVDALTGWVGSSNYRCLALXPAGVQ

SEQ ID NO: 1032595 - protein, 771 aa, Homo sapiens
MAMGDDKSFDDEESVDGNRPSSAASAFKVPAPKTSGNPANSARKPGSAGGPKVGGASKEGGAGAVDEDDFIKAFTDVPSIQIYSSRELEETLNKIREILSDDKHDWDQRANALKKIRSLLVAGAAQYDCFFQHLRLLDGALKLSAKDLRSQVVREACITVAHLSTVLGNKFDHGAEAIVPTLFNLVPNSAKVMATSGCAAIRFIIRHTHVPRLIPLITSNCTSKSVPVRRRSFEFLDLLLQEWQTHSLERHAAVLVETIKKGIHDADAEARVEARKTYMGLTNHFPGEAETLYNSLEPSYQKSLQTYLKSSGSVASLPQSDRSSSSSQESLNRPFSSKWSTANPSTVAGRVSAGSSKASSLPGSLQRSRSDIDVNAAAGAKAHHAAGQSVRSGRLGAGALNAGSYASLGRVRAKLSAPLAGMGNAKADSRGRSRTKMVSQSQPGSRSGSPGRVLTTTALSTVSSGVQRVLVNSASAQKRSKIPRSQGCSREASPSRLSVARSSRIPRPSVSQGCSREASRESSRDTSPVRSFQPLGPGYGISQSSRLSSSVSAMRVLNTGSDVEEAVADALKKPARRRYESYGMHSDDDANSDASSACSERSYSSRNGSIPTYMRQTEDVAEVLNRCASSNWSERKEGLLGLQNLLKNQRTLSRVELKRLCEIFTRMFADPHGKRVFSMFLETLVDFIQVHKDDLQDWLFVLLTQLLKKMGADLLGSVQAKVQKALDVTRESYPNDLQFNILMRFTVDQTQTPSLKVKVAILKYIETLAKQ

SEQ ID NO: 1032596 - protein, 779 aa, Homo sapiens
MAMGDDKSFDDEESVDGNRPSSAASAFKVPAPKTSGNPANSARKPGSAGGPKVGGASKEGGAGAVDEDDFIKAFTDVPSIQIYSSRELEETLNKIREILSDDKHDWDQRANALKKIRSLLVAGAAQYDCFFQHLRLLDGALKLSAKDLRSQVVREACITVAHLSTVLGNKFDHGAEAIVPTLFNLVPNSAKVMATSGCAAIRFIIRHTHVPRLIPLITSNCTSKSVPVRRRSFEFLDLLLQEWQTHSLERHAAVLVETIKKGIHDADAEARVEARKTYMGLTNHFPGEAETLYNSLEPSYQKSLQTYLKSSGSVASLPQSDRSSSSSQESLNRPFSSKWSTANPSTVAGRVSAGSSKASSLPGSLQRSRSDIDVNAAAGAKAHHAAGQSVRSGRLGAGALNAGSYASLGRVRAKLSAPLAGMGNAKADSRGRSRTKMVSQSQPGSRSGSPGRVLTTTALSTVSSGVQRVLVNSASAQKRSKIPRSQGCSREASPSRLSVARSSRIPRPSVSQGCSREASRESSRDTSPVRSFQPLGPGYGISQSSRLSSSVSAMRVLNTGSDVEEAVADALLLGDIRTKKKPARRRYESYGMHSDDDANSDASSACSERSYSSRNGSIPTYMRQTEDVAEVLNRCASSNWSERKEGLLGLQNLLKNQRTLSRVELKRLCEIFTRMFADPHGKRVFSMFLETLVDFIQVHKDDLQDWLFVLLTQLLKKMGADLLGSVQAKVQKALDVTRESYPNDLQFNILMRFTVDQTQTPSLKVKVAILKYIETLAKQ

SEQ ID NO: 1032597 - protein, 653 aa, Homo sapiens
MAMGDDKSFDDEESVDGNRPSSAASAFKVPAPKTSGNPANSARKPGSAGGPKVGGASKEGGAGAVDEDDFIKAFTDVPSIQIYSSRELEETLNKIREILSDDKHDWDQRANALKKIRSLLVAGAAQYDCFFQHLRLLDGALKLSAKDLRSQVVREACITVAHLSTVLGNKFDHGAEAIVPTLFNLVPNSAKVMATSGCAAIRFIIRHTHVPRLIPLITSNCTSKSVPVRRRSFEFLDLLLQEWQTHSLERHAAVLVETIKKGIHDADAEARVEARKTYMGLTNHFPGEAETLYNSLEPSYQKSLQTYLKSSGSVASLPQSDRSSSSSQESLNRPFSSKWSTANPSTVAGRVSAGSSKASSLPGSLQRSRSDIDVNAAAGAKAHHAAGQSVRSGRLGAGALNAGSYASLGRVRAKLSAPLAGMGNAKADSRGRSRTKMVSQSQPGSRSGSPGRVLTTTALSTVSSGVQRVLVNSASAQKRSKIPRSQGCSREASPSRLSVARSSRIPRPSVSQGCSREASRESSRDTSPVRSFQPLGPGYGISQSSRLSSSVSAMRVLNTGSDVEEAVADALKKPARRRYESYGMHSDDDANSDASSACSERSYSSRNGSIPTYMRQTEDVAEVLNRCASSNWSERKEGLLGLQNLLKNQRTLR

SEQ ID NO: 1032598 - protein, 456 aa, Homo sapiens
MAMGDDKSFDDEESVDGNRPSSAASAFKVPAPKTSGNPANSARKPGSAGGPKVGGASKEGGAGAVDEDDFIKAFTDVPSIQIYSSRELEETLNKIREILSDDKHDWDQRANALKKIRSLLVAGAAQYDCFFQHLRLLDGALKLSAKDLRSQVVREACITVAHLSTVLGNKFDHGAEAIVPTLFNLVPNSAKVMATSGCAAIRFIIRHTHVPRLIPLITSNCTSKSVPVRRRSFEFLDLLLQEWQTHSLERHAAVLVETIKKGIHDADAEARVEARKTYMGLTNHFPGEAETLYNSLEPSYQKSLQTYLKSSGSVASLPQSDRSSSSSQESLNRPFSSKWSTANPSTVAGRVSAGSSKASSLPGSLQRSRSDIDVNAAAGAKAHHAAGQSVRSGRLGAGALNAGSYASLGRVRAKLSAPLAGMGNAKADSRGRSRTKMVSQSQRMYCLSALLYLSLC

SEQ ID NO: 1032599 - protein, 428 aa, Homo sapiens
MAMGDDKSFDDEESVDGNRPSSAASAFKVPAPKTSGNPANSARKPGSAGGPKVGGASKEGGAGAVDEDDFIKAFTDVPSIQIYSSRELEETLNKIREILSDDKHDWDQRANALKKIRSLLVAGAAQYDCFFQHLRLLDGALKLSAKDLRSQVVREACITVAHLSTVLGNKFDHGAEAIVPTLFNLVPNSAKVMATSGCAAIRFIIRHTHVPRLIPLITSNCTSKSVPVRRRSFEFLDLLLQEWQTHSLERHAAVLVETIKKGIHDADAEARVEARKTYMGLTNHFPGEAETLYNSLEPSYQKSLQTYLKSSGSVASLPQSDRSSSSSQESLNRPFSSKWSTANPSTVAGRVSAGSSKASSLPGSLQRSRSDIDVNAAAGAKAHHAAGQSVRSGRLGAGALNAGSYASLEDTSDKLDGTASEDGIGVHT

SEQ ID NO: 1032600 - protein, 244 aa, Homo sapiens
AAAAMEPRSMEYFCAQVQQKDVGGRLQVGQELLLYLGAPGAISDLEEDLGRLGKTVDALTGWVGSSNYRVSLMGLEILSAFVDRLSTRFKSYVAMVIVALIDRMGDAKDKVRDEAQTLILKLMDQVAPPMYIWEQLASGFKHKNFRSREGVCLCLIETLNIFGAQPLVISKLIPHLCILFGDSNSQVRDAAILAIVEIYRHVGEKVRMDLYKRGIPPARQGLALLPRLQCSVTISAYCNLHLPG

SEQ ID NO: 1032601 - protein, 785 aa, Homo sapiens
MAMGDDKSFDDEESVDGNRPSSAASAFKVPAPKTSGNPANSARKPGSAGGPKVGGASKEGGAGAVDEDDFIKAFTDVPSIQIYSSRELEETLNKIREILSDDKHDWDQRANALKKIRSLLVAGAAQYDCFFQHLRLLDGALKLSAKDLRSQVVREACITVAHLSTVLGNKFDHGAEAIVPTLFNLVPNSAKVMATSGCAAIRFIIRHTHVPRLIPLITSNCTSKSVPVRRRSFEFLDLLLQEWQTHSLERHAAVLVETIKKGIHDADAEARVEARKTYMGLTNHFPGEAETLYNSLEPSYQKSLQTYLKSSGSVASLPQSDRSSSSSQESLNRPFSSKWSTANPSTVAGRVSAGSSKASSLPGSLQRSRSDIDVNAAAGAKAHHAAGQSVRSGRLGAGALNAGSYASLEDTSDKLDGTASEDGRVRAKLSAPLAGMGNAKADSRGRSRTKMVSQSQPGSRSGSPGRVLTTTALSTVSSGVQRVLVNSASAQKRSKIPRSQGCSREASPSRLSVARSSRIPRPSVSQGCSREASRESSRDTSPVRSFQPLGPGYGISQSSRLSSSVSAMRVLNTGSDVEEAVADALKKPARRRYESYGMHSDDDANSDASSACSERSYSSRNGSIPTYMRQTEDVAEVLNRCASSNWSERKEGLLGLQNLLKNQRTLSRVELKRLCEIFTRMFADPHGKRVFSMFLETLVDFIQVHKDDLQDWLFVLLTQLLKKMGADLLGSVQAKVQKALDVTRESYPNDLQFNILMRFTVDQTQTPSLKVKVAILKYIETLAKQ

SEQ ID NO: 1032602 - protein, 1008 aa, Homo sapiens
AAAAMEPRSMEYFCAQVQQKDVGGRLQVGQELLLYLGAPGAISDLEEDLGRLGKTVDALTGWVGSSNYRVSLMGLEILSAFVDRLSTRFKSYVAMVIVALIDRMGDAKDKVRDEAQTLILKLMDQVAPPMYIWEQLASGFKHKNFRSREGVCLCLIETLNIFGAQPLVISKLIPHLCILFGDSNSQVRDAAILAIVEIYRHVGEKVRMDLYKRGIPPARLEMIFAKFDEVQSSGGMILSVCKDKSFDDEESVDGNRPSSAASAFKVPAPKTSGNPANSARKPGSAGGPKVGGASKEGGAGAVDEDDFIKAFTDVPSIQIYSSRELEETLNKIREILSDDKHDWDQRANALKKIRSLLVAGAAQYDCFFQHLRLLDGALKLSAKDLRSQVVREACITVAHLSTVLGNKFDHGAEAIVPTLFNLVPNSAKVMATSGCAAIRFIIRHTHVPRLIPLITSNCTSKSVPVRRRSFEFLDLLLQEWQTHSLERHAAVLVETIKKGIHDADAEARVEARKTYMGLTNHFPGEAETLYNSLEPSYQKSLQTYLKSSGSVASLPQSDRSSSSSQESLNRPFSSKWSTANPSTVAGRVSAGSSKASSLPGSLQRSRSDIDVNAAAGAKAHHAAGQSVRSGRLGAGALNAGSYASLGRVRAKLSAPLAGMGNAKADSRGRSRTKMVSQSQPGSRSGSPGRVLTTTALSTVSSGVQRVLVNSASAQKRSKIPRSQGCSREASPSRLSVARSSRIPRPSVSQGCSREASRESSRDTSPVRSFQPLGPGYGISQSSRLSSSVSAMRVLNTGSDVEEAVADALKKPARRRYESYGMHSDDDANSDASSACSERSYSSRNGSIPTYMRQTEDVAEVLNRCASSNWSERKEGLLGLQNLLKNQRTLSRVELKRLCEIFTRMFADPHGKRVFSMFLETLVDFIQVHKDDLQDWLFVLLTQLLKKMGADLLGSVQAKVQKALDVTRESYPNDLQFNILMRFTVDQTQTPSLKVKVAILKYIETLAKQ

SEQ ID NO: 1032603 - protein, 833 aa, Homo sapiens
GREEKEKCRHKPQWWFCGCFCLFLIESLISIEFTVFGHVNYWEPPRVREIKSFQRNEATDLQTGSVIDKSFDDEESVDGNRPSSAASAFKVPAPKTSGNPANSARKPGSAGGPKVGGASKEGGAGAVDEDDFIKAFTDVPSIQIYSSRELEETLNKIREILSDDKHDWDQRANALKKIRSLLVAGAAQYDCFFQHLRLLDGALKLSAKDLRSQVVREACITVAHLSTVLGNKFDHGAEAIVPTLFNLVPNSAKVMATSGCAAIRFIIRHTHVPRLIPLITSNCTSKSVPVRRRSFEFLDLLLQEWQTHSLERHAAVLVETIKKGIHDADAEARVEARKTYMGLTNHFPGEAETLYNSLEPSYQKSLQTYLKSSGSVASLPQSDRSSSSSQESLNRPFSSKWSTANPSTVAGRVSAGSSKASSLPGSLQRSRSDIDVNAAAGAKAHHAAGQSVRSGRLGAGALNAGSYASLGRVRAKLSAPLAGMGNAKADSRGRSRTKMVSQSQPGSRSGSPGRVLTTTALSTVSSGVQRVLVNSASAQKRSKIPRSQGCSREASPSRLSVARSSRIPRPSVSQGCSREASRESSRDTSPVRSFQPLGPGYGISQSSRLSSSVSAMRVLNTGSDVEEAVADALKKPARRRYESYGMHSDDDANSDASSACSERSYSSRNGSIPTYMRQTEDVAEVLNRCASSNWSERKEGLLGLQNLLKNQRTLSRVELKRLCEIFTRMFADPHGKRVFSMFLETLVDFIQVHKDDLQDWLFVLLTQLLKKMGADLLGSVQAKVQKALDVTRESYPNDLQFNILMRFTVDQTQTPSLKVKVAILKYIETLAKQ

SEQ ID NO: 1032604 - protein, 471 aa, Homo sapiens
LNFPQNSVVFYWFLSEECEIVFLLKAFFILCSRPFSSKWSTANPSTVAGRVSAGSSKASSLPGSLQRSRSDIDVNAAAGAKAHHAAGQSVRSGRLGAGALNAGSYASLGRVRAKLSAPLAGMGNAKADSRGRSRTKMVSQSQPGSRSGSPGRVLTTTALSTVSSGVQRVLVNSASAQKRSKIPRSQGCSREASPSRLSVARSSRIPRPSVSQGCSREASRESSRDTSPVRSFQPLGPGYGISQSSRLSSSVSAMRVLNTGSDVEEAVADALKKPARRRYESYGMHSDDDANSDASSACSERSYSSRNGSIPTYMRQTEDVAEVLNRCASSNWSERKEGLLGLQNLLKNQRTLSRVELKRLCEIFTRMFADPHGKRVFSMFLETLVDFIQVHKDDLQDWLFVLLTQLLKKMGADLLGSVQAKVQKALDVTRESYPNDLQFNILMRFTVDQTQTPSLKVKVAILKYIETLAKQ

SEQ ID NO: 1032605 - protein, 143 aa, Homo sapiens
KVVIKDPPPPRVPAPKEEEEEPLPTKKWPPVDASYYGGRGVGGIKRMEVRWGDKGSTEEGARLEKAKNAVVKIPEETEEPIRPRPPRPKPTHQPPQTKWYTPIKGRLDALWALLRRQYDRVSLMRPQEGDEGRCINFSRVPSQ

SEQ ID NO: 1032606 - protein, 143 aa, Homo sapiens; identical to SEQ ID NO: 1032605

SEQ ID NO: 1032607 - protein, 143 aa, Homo sapiens; identical to SEQ ID NO: 1032605

SEQ ID NO: 1032608 - protein, 143 aa, Homo sapiens; identical to SEQ ID NO: 1032605

SEQ ID NO: 1032609 - protein, 144 aa, Homo sapiens
KVVIKDPPPPRVPAPKEEEEEPLPTKKWPPVDASYYGGRGVGGIKRMEVRWGDKGSTEEGARLEKAKNAVVKIPEETEEPIRPRPPRPKPTHQPPQTKWYTPIKGRLDALWALLRRQYDRVSLMRPQEGDEVCIWECIEKELTA

SEQ ID NO: 1032610 - protein, 106 aa, Homo sapiens
MSAEVVESGKTVWVSLSLPGGLKTKGPVHKLLPSSISVKGKQEDQEGTKMAHFHIADFQPNEKNQVHFRSFWKSSLIPLSREMFSLPSALLAPNISKHLFCHLHGR

SEQ ID NO: 1032611 - protein, 143 aa, Homo sapiens; identical to SEQ ID NO: 1032605

SEQ ID NO: 1032612 - protein, 389 aa, Homo sapiens
RHEGQLLELAARPGRLRERVLELARGGGDPYSDLSKGVLICWTVQDVLTPLEDCFMLDASTVLDFGVLASIMQSGHTRIPVYEEERSNIVDMLYLKDLAFVDPEDCTPLSTITRFYNHPLHFVFNDTKLDAVLEEFKRGDTVVKRKPASLMAPLKRKEEFSLFKVSDDEYKVTISPQLLLATQRFLSREVDVFSPLRISEKVLLHLLKHPSVNQEVRFDESNRLATHHYLYQRSQPVDYFILILQGRVEVEIGKEGLKFENGAFTYYGVSALTVPSSVHQSPVSSLQPIRHDLQPDPGDGTHSSAYCPDYTVRALSDLQLIKVTRLQYLNALLATRAQNLPQSPENTDLQVIPGSQTRLLGEKTTTAAGSSHSRPGVPVEGSPGRNPGV

SEQ ID NO: 1032613 - protein, 355 aa, Homo sapiens
MLDASTVLDFGVLASIMQSGHTRIPVYEEERSNIVDMLYLKDLAFVDPEDCTPLSTITRFYNHPLHFVFNDTKLDAVLEEFKRGDTVVKRKPASLMAPLKRKEEFSLFKVSDDEYKVTISPQLLLATQRFLSREVDVFSPLRISEKVLLHLLKHPSVNQEVRFDESNRLATHHYLYQRSQPVDYFILILQGRVEVEIGKEGLKFENGAFTYYGVSALTVPSSVHQSPVSSLQPIRHDLQPDPGDGTHSSAYCPDYTVRALSDLQLIKVTRLQYLNALLATRAQNLPQSPENTDLQVIPGSQTRLLGEKTTTAAGSSHSRPSLPLLPRGRDSAAYSDSDLFGLSHLVSAVTAFVWP

SEQ ID NO: 1032614 - protein, 389 aa, Homo sapiens; identical to SEQ ID NO: 1032612

SEQ ID NO: 1032615 - protein, 389 aa, Homo sapiens; identical to SEQ ID NO: 1032612

SEQ ID NO: 1032616 - protein, 288 aa, Homo sapiens
MLAHCNLRLLGSSDSPASASQVAGITGVTPHLAPAKFSCVEVLGAAAHRPPGRSLVGTITLNCLQCWVWFHWPLGPSGHCPFFPPRAEVDVFSPLRISEKVLLHLLKHPSVNQEVRFDESNRLATHHYLYQRSQPVDYFILILQGRVEVEIGKEGLKFENGAFTYYGVSALTVPSSVHQSPVSSLQPIRHDLQPDPGDGTHSSAYCPDYTVRALSDLQLIKVTRLQYLNALLATRAQNLPQSPENTDLQVIPGSQTRLLGEKTTTAAGSSHSRPGVPVEGSPGRNPGV

SEQ ID NO: 1032617 - protein, 239 aa, Homo sapiens
MAPLKRKEEFSLFKVSDDEYKVTISPQLLLATQRFLSREVDVFSPLRISEKVLLHLLKHPSVNQEVRFDESNRLATHHYLYQRSQPVDYFILILQGRVEVEIGKEGLKFENGAFTYYGVSALTVPSSVHQSPVSSLQPIRHDLQPDPGDGTHSSAYCPDYTVRALSDLQLIKVTRLQYLNALLATRAQNLPQSPENTDLQVIPGSQTRLLGEKTTTAAGSSHSRPGVPVEGSPGRNPGV

SEQ ID NO: 1032618 - protein, 122 aa, Homo sapiens
  misc_feature (121)..(121): Xaa can be any naturally occurring amino acid
MAPLKRKEEFSLFKVSDDEYKVTISPQLLLATQRFLSREVDVFSPLRISEKVLLHLLKHPSVNQEVRFDESNRLATHHYLYQRSQPVDYFILILQVAVGPRPGVPPASSRPREGSRRRGEXG

SEQ ID NO: 1032619 - protein, 239 aa, Homo sapiens; identical to SEQ ID NO: 1032617

SEQ ID NO: 1032620 - protein, 335 aa, Homo sapiens
MLAHCNLRLLGSSDSPASASQVAGITGVYHHAQLIFVFLVEAGFCHIGQAGLQLLTAGDPPASASESVGIKAVSHDRTWPLPEFSCVEVLGAAAHRPPGRSLVGTITLNCLQCWVWFHWPLGPSGHCPFFPPRAEVDVFSPLRISEKVLLHLLKHPSVNQEVRFDESNRLATHHYLYQRSQPVDYFILILQGRVEVEIGKEGLKFENGAFTYYGVSALTVPSSVHQSPVSSLQPIRHDLQPDPGDGTHSSAYCPDYTVRALSDLQLIKVTRLQYLNALLATRAQNLPQSPENTDLQVIPGSQTRLLGEKTTTAAGSSHSRPGVPVEGSPGRNPGV

SEQ ID NO: 1032621 - protein, 103 aa, Homo sapiens
MLKVVPLSSSGTVSPFLPTFCISLHQLGPSNAVILQVTRLQYLNALLATRAQNLPQSPENTDLQVIPGSQTRLLGEKTTTAAGSSHSRPGVPVEGSPGRNPGV

SEQ ID NO: 1032622 - protein, 83 aa, Homo sapiens
LTVARVQDVTCSSACLWLILGLGYQAQSQEKDNDPNQTDEEVFHFLGLGYQDSPIQDAILHLELLLSFFLTLYFEIISDDRKL

SEQ ID NO: 1032623 - protein, 354 aa, Homo sapiens
MCGRTSCHLPRDVLTRACAYQDRRGQQRLPEWRDPDKYCPSYNKSPQSNSPVLLSRLHFDKDADSSERIIAPMRWGLVPSWFKESDPSKLQFNTTNCRSDTVMEKRSFKVPLGKGRRCVVLADGFYEWQRCQGTNQRQPYFIYFPQIKTEKSGSIGAADSPENWEKVWDNWRLLTMAGIFDCWEPPEGGDVLYSYTIITVDSCKGLSDIHHRMPAILDGEEAVSKWLDFGEVSTQEALKLIHPTENITFHAVSSVVNNSRNNTPECLAPVDLVVKKELRASGSSQRMLQWLATKSPKKEDSKTPQKEESDVPQWSSQFLQKSPLPTKRGTAGLLEQWLKREKEEEPVAKRPYSQ

SEQ ID NO: 1032624 - protein, 354 aa, Homo sapiens
MCGRTSCHLPRDVLTRACAYQDRRGQQRLPEWRDPDKYCPSYNKSPQSNSPVLLSRLHFEKDADSSERIIAPMRWGLVPSWFKESDPSKLQFNTTNCRSDTVMEKRSFKVPLGKGRRCVVLADGFYEWQRCQGTNQRQPYFIYFPQIKTEKSGSIGAADSPENWEKVWDNWRLLTMAGIFDCWEPPEGGDVLYSYTIITVDSCKGLSDIHHRMPAILDGEEAVSKWLDFGEVSTQEALKLIHPTENITFHAVSSVVNNSRNNTPECLAPVDLVVKKELRASGSSQRMLQWLATKSPKKEDSKTPQKEESDVPQWSSQFLQKSPLPTKRGTAGLLEQWLKREKEEEPVAKRPYSQ

SEQ ID NO: 1032625 - protein, 371 aa, Homo sapiens
MCGRTSCHLPRDVLTRACAYQDRRGQQRLPEWRDPDKYCPSYNKSPQSNSPVLLSRLHFEKDADSSERIIAPMRWGLVPSWFKESDPSKLQFNTTNCRSDTVMEKRSFKVPLGKGRRCVVLADGFYEWQRCQGTNQRQPYFIYFPQIKTEKSGSIGAADSPENWEKVWDNWRLLTMAGIFDCWEPPEGGDVLYSYTIITVDSCKGLSDIHHRMPAILDGEEAVSKWLDFGEVSTQEALKLIHPTENITFHAVSSVVNNSRNNTPECLAPVDLVVKKELRASGSSRGCCSGWPQRHPKRKTQKHLKRKSQMFPSGPVSSCRRVHSPPKRGTAGLLEQWLKREKEDGTCGQASLQPVTQDFQRPRPGSAALLF

SEQ ID NO: 1032626 - protein, 264 aa, Homo sapiens
MCGRTSCHLPRDVLTRACAYQDRRGQQRLPEWRDPDKYCPSYNKSPQSNSPVLLSRLHFEKSGSIGAADSPENWEKVWDNWRLLTMAGIFDCWEPPEGGDVLYSYTIITVDSCKGLSDIHHRMPAILDGEEAVSKWLDFGEVSTQEALKLIHPTENITFHAVSSVVNNSRNNTPECLAPVDLVVKKELRASGSSQRMLQWLATKSPKKEDSKTPQKEESDVPQWSSQFLQKSPLPTKRGTAGLLEQWLKREKEEEPVAKRPYSQ

SEQ ID NO: 1032627 - protein, 34 aa, Homo sapiens
MGDKKTAVNAVESPVWTPGVDHERKCCTCVYLKK

SEQ ID NO: 1032628 - protein, 354 aa, Homo sapiens; identical to SEQ ID NO: 1032624

SEQ ID NO: 1032629 - protein, 354 aa, Homo sapiens; identical to SEQ ID NO: 1032624

SEQ ID NO: 1032630 - protein, 179 aa, Homo sapiens [sequence omitted]

SEQ ID NO: 1032631 - protein, 181 aa, Homo sapiens
MCGRTSCHLPRDVLTRACAYQDRRGQQRLPEWRDPDKYCPSYNKSPQSNSPVLLSRLHFEKDADSSERIIAPMRWGLVPSWFKESDPSKLQFNTTNCRSDTVMEKRSFKVPLGKGRRCVVLADGFYEWQRCQGTNQRQPYFIYFPQIKTEKSGSIGAADSPENWGHSQKLSQAAGRKQLPR

SEQ ID NO: 1032632 - protein, 371 aa, Homo sapiens; identical to SEQ ID NO: 1032625

SEQ ID NO: 1032633 - protein, 371 aa, Homo sapiens; identical to SEQ ID NO: 1032625

SEQ ID NO: 1032634 - protein, 371 aa, Homo sapiens; identical to SEQ ID NO: 1032625

SEQ ID NO: 1032635 - protein, 371 aa, Homo sapiens; identical to SEQ ID NO: 1032625

SEQ ID NO: 1032636 - protein, 295 aa, Homo sapiens
MFSRELAPTRIGGASSGSRSGGTLISTAPLTTRVLNPTAQCFCLDCTLRKVPLGKGRRCVVLADGFYEWQRCQGTNQRQPYFIYFPQIKTEKSGSIGAADSPENWEKVWDNWRLLTMAGIFDCWEPPEGGDVLYSYTIITVDSCKGLSDIHHRMPAILDGEEAVSKWLDFGEVSTQEALKLIHPTENITFHAVSSVVNNSRNNTPECLAPVDLVVKKELRASGSSQRMLQWLATKSPKKEDSKTPQKEESDVPQWSSQFLQKSPLPTKRGTAGLLEQWLKREKEEEPVAKRPYSQ

SEQ ID NO: 1032637 - protein, 142 aa, Homo sapiens [sequence omitted]

SEQ ID NO: 1032638 - protein, 109 aa, Homo sapiens
PLRHSDLKKSVRHGCNISFHSQVYQIVSAPDAKSPLLQESLFATEVRMAAAEHRHSSGLPYWPYLTAETLKNRMGHQPPPPTQQHSITDNSLSLKTPSECVLYPHHCAR

SEQ ID NO: 1032639 - protein, 221 aa, Homo sapiens
STRRGDNIKTPAFHPQRMISRHLPSVSSLPFHPQLHPQQMIISRYLLSVCGFRFHHQPFHPQRMIISRHLPSVSSLPFHPQLHPQQMIISRHLPSVCGGRFHPQRMIISRHLPSVSSLPLPPRRRAGQAHLPRLRRMIIYKTAFRGVSVTRHFTPLQTHKTVRQMIEKSTTPGQTRICGEAGFQPLEADGQSSENTIPRRQRDTSHIATRSSLTSPSRQNR

SEQ ID NO: 1032640 - protein, 109 aa, Homo sapiens
MIISRQLAERLRRRAGQAHLPRLRRMIIYKTAFRGVSVTRHFTPLQTHKTVQTDDRVVNDTWPDADLRGGRLPTARGGWTIVREHHSETSEGHIPHCNPLEPYQPVKTE

SEQ ID NO: 1032641 - protein, 163 aa, Homo sapiens
TCGFSIVILQSRLAPASVQTLSSCSSPQLYPQLHPQQMIISRHVPSVCSIPFHPQRMIISRHHVSSLPFHPQLHPQQMIISRHLPSVCGGRAPPSADDSFSRHLPSVSSVPFQPQLQPLPMILSRVLPSVCGGRFHPQRMIFSRHLPSVSSLPFHPQLLPLPI

SEQ ID NO: 1032642 - protein, 72 aa, Homo sapiens
MRSRGVPSVRDFVPPSADDNLKTPSERQLTPLPPSAPPSADDNIKTPAERLRGRFHPERMIISQRDPLSHLS

SEQ ID NO: 1032643 - protein, 256 aa, Homo sapiens
MAAAEHRHSSGLPYWPYLTAETLKNRMGHQPPPPTQQHSITDNSLSLKTPPECLLIPLPPSADDNLKTPSERQLTPLPPSAPPSADDNIKTPAERLRGPLPPSADDNLKTPSERQLTPLPPSAPPSADDNIKTPAERLQLRGPLPPSADDNLKTPSERQLTPLPPSAPPSADDNIKTPAERLRGPLPPSADDNLKTPSERQLTPLPPSAPPSADDNIKTPAERLRGPLPPSADDNLKTPSERQLTSPSTLSSTLSR

SEQ ID NO: 1032644 - protein, 256 aa, Homo sapiens; identical to SEQ ID NO: 1032643

SEQ ID NO: 1032645 - protein, 256 aa, Homo sapiens; identical to SEQ ID NO: 1032643

SEQ ID NO: 1032646 - protein, 256 aa, Homo sapiens; identical to SEQ ID NO: 1032643

SEQ ID NO: 1032647 - protein, 256 aa, Homo sapiens; identical to SEQ ID NO: 1032643

SEQ ID NO: 1032648 - protein, 129 aa, Homo sapiens
MHTKKRVSSFRGNKIGLKDVITLRRHVETKVRAKIRKRKVTTKINHHDKINGKRKTAKEHLRKLSMKEREHGEKERQVSEAEENGKLDMKEIHTYMEMFQRAQALRRRAEDYYRCKITPSARKPLCNRG

SEQ ID NO: 1032649 - protein, 425 aa, Homo sapiens
MAAAEHRHSSGLPYWPYLTAETLKNRMGHQPPPPTQQHSITDNSLSLKTPPECLLIPLPPSADDNLKTPSERQLTPLPPSAPPSADDNIKTPAERLRGPLPPSADDNLKTPSERQLTPLPPSAPPSADDNIKTPAERLQLRGPLPPSADDNLKTPSERQLTPLPPSAPPSADDNIKTPAERLRGPLPPSADDNLKTPSERQLTPLPPSAPPSADDNIKTPAERLRGPLPPSADDNLKTPSERQLTSPSTLPPSADDNIKTPAERLRGPLPPSADDNLKTPSERQLTPLPPSAPPSADDNIKTPAERLRGPLPPSADDNLKTPSERQLTPLPPSAPPSADDNIKTPAERLRGPTPLPPSADDNLKTPPECVLTPLPPSADDNLKTPSECVLTPLPPSASRVAGITGACHHAWLIFCIFSREGVSPY

SEQ ID NO: 1032650 - protein, 129 aa, Homo sapiens; identical to SEQ ID NO: 1032648

SEQ ID NO: 1032651 - protein, 129 aa, Homo sapiens; identical to SEQ ID NO: 1032648

SEQ ID NO: 1032652 - protein, 129 aa, Homo sapiens; identical to SEQ ID NO: 1032648

SEQ ID NO: 1032653 - protein, 129 aa, Homo sapiens; identical to SEQ ID NO: 1032648

SEQ ID NO: 1032654 - protein, 129 aa, Homo sapiens; identical to SEQ ID NO: 1032648

SEQ ID NO: 1032655 - protein, 129 aa, Homo sapiens; identical to SEQ ID NO: 1032648

SEQ ID NO: 1032656 - protein, 129 aa, Homo sapiens; identical to SEQ ID NO: 1032648

SEQ ID NO: 1032657 - protein, 129 aa, Homo sapiens; identical to SEQ ID NO: 1032648

SEQ ID NO: 1032658 - protein, 43 aa, Homo sapiens
EKPESLEKILDSNRMGHQPPPPTQQHSIIDNSLSLKTPPECVL

SEQ ID NO: 1032659 - protein, 106 aa, Homo sapiens
HRWHSERTSAGNLQQTGQPLDLAVNGKGFFHILQLNNIAITDNSLSLKTPAERLRGPLPPSADDNLKTPSERQLTPLPPSAPPSADDNIKTKRLRGRFHRIRTGSL

SEQ ID NO: 1032660 - protein, 165 aa, Homo sapiens
DTRGERLRGASAGAGFHPQRMIISRHLPSVSSLPFHPQLLPPSADDNIKTPAERLRGPLPPSADDNLKTPSERQLTPLPPSAPPSADDNIKTPAERLRGPLPPSADDNLKTPSERQLTPLPPSAPPSADDNIKTPAERLRGPLSTPQRMIVSNTRGDEHTVPSSM

SEQ ID NO: 1032661 - protein, 96 aa, Homo sapiens
DVWLQHRHSASRLAPASVQTLSSCSSPQLYPQLHPQQMIISRHVPSVCSEAASTITDDNLKTPSERQLTPLPPSAPPSADKYQDTCQFPGGRTSSF

SEQ ID NO: 1032662 - protein, 256 aa, Homo sapiens; identical to SEQ ID NO: 1032643

SEQ ID NO: 1032663 - protein, 256 aa, Homo sapiens
MAAAEHRHSSGLPYWPYLTAETLKNRMGHQPPPPTQQHSITDNSLSLKTPPECLLIPLPPSADDNLKTPSERQLTPLPPSAPPSADDNIKIPAERLRIPLPPSADDNLKTPSERQLTPLPPSAPPSADDNIKTPAERLQLRGPLPPSADDNLKTPSERQLTPLPPSAPPSADDNIKTPAERLRGPLPPSADDNLKTPSERQLTPLPPSAPPSADDNIKTPAERLRGPLPPSADDNLKTPSERQLTSPSTLSSTLSR

SEQ ID NO: 1032664 - protein, 300 aa, Homo sapiens
MAAAEHRHSSGLPYWPYLTAETLKNRMGHQPPPPTQQHSITDNSLSLKTPPECLLIPLPFHPQLHPQQMIISRHLPSVCGGRFHPQRMIISRHLPSVSSLPFHPQLHPQQMIISRYLLSVCGFRFHHQPMIISRHLPSVSSLPFHPQLHPQQMIISRHLPSVCSCGGRFHPQRMIISRHLPSVSSLPFHPQLHPQQMIISRHLPSVCGGRFHPQRMIISRHLPSVSSLPFHPQLHPQQMIISRHLPSVCGGRFHPQRMIISRHLPSVSSLPLPPSAPPSADDNIKTPAERLRGAASTLSG

SEQ ID NO: 1032665 - protein, 129 aa, Homo sapiens; identical to SEQ ID NO: 1032648

SEQ ID NO: 1032666 - protein, 129 aa, Homo sapiens; identical to SEQ ID NO: 1032648

SEQ ID NO: 1032667 - protein, 129 aa, Homo sapiens; identical to SEQ ID NO: 1032648

SEQ ID NO: 1032668 - protein, 129 aa, Homo sapiens; identical to SEQ ID NO: 1032648

SEQ ID NO: 1032669 - protein, 129 aa, Homo sapiens; identical to SEQ ID NO: 1032648

SEQ ID NO: 1032670 - protein, 129 aa, Homo sapiens; identical to SEQ ID NO: 1032648

SEQ ID NO: 1032671 - protein, 129 aa, Homo sapiens; identical to SEQ ID NO: 1032648

SEQ ID NO: 1032672 - protein, 129 aa, Homo sapiens; identical to SEQ ID NO: 1032648

SEQ ID NO: 1032673 - protein, 734 aa, Homo sapiens
PFVNNNPGNLLHMGPKGRYGPAGAQRTVKDQLKPKLVEALQGHRVVDIACGSGDAQTLCLTDDDTVWSWGDGDYGKLGRGGSDGCKVPMKIDSLTGLGVVKVECGSQFSVALTKSGAVYTWGKGDYHRLGHGSDDHVRRPRQVQGLQGKKVIAIATGSLHCVCCTEDGEVYTWGDNDEGQLGDGTTNAIQRPRLVAALQGKKVNRVACGSAHTLAWSTSKPASAGKLPAQVPMEYNHLQEIPIIALRNRLLLLHHLSELFCPCIPMFDLEGSLDETGLGPSVGFDTLRGILISQGKEAAFRKVVQATMVRDRQHGPVVELNRIQVKRSRSKGGLAGPDGTKSVFGQMCAKMSSFGPDSLLLPHRVWKVKFVGESVDDCGGGYSESIAEICEELQNGLTPLLIVTPNGRDESGANRDCYLLSPAARAPVHSSMFRFLGVLLGIAIRTGSPLSLNLAEPVWKQLAGMSLTIADLSEVDKDFIPGLMYIRDNEATSEEFEAMSLPFTVPSASGQDIQLSSKHTHITLDNRAEYVRLAINYRLHEFDEQVAAVREGMARVVPVPLLSLFTGYELETMVCGSPDIPLHLLKSVATYKGIEPSASLIQWFWEVMESFSNTERSLFLRFVWGRTRLPRTIADFRGRDFVIQVLDKYNPPDHFLPESYTCFFLLKLPRYSCKQVLEEKLKYAIHFCKSIDTDDYARIALTGEPAADDSSDDSDNEDVDSFASDSTQDYLTGH

SEQ ID NO: 1032674 - protein, 576 aa, Homo sapiens
PFVNNNPGNLLHMGPKGRYGPAGAQRTVKDQLKPKLVEALQGHRVVDIACGSGDAQTLCLTDDDTVWSWGDGDYGKLGRGGSDGCKVPMKIDSLTGLGVVKVECGSQFSVALTKSGAVYTWGKGDYHRLGHGSDDHVRRPRQVQGLQGKKVIAIATGSLHCVCCTEDGEVYTWGDNDEGQLGDGTTNAIQRPRLVAALQGKKVNRVACGSAHTLAWSTSKPASAGKLPAQVPMEYNHLQEIPIIALRNRLLLLHHLSELFCPCIPMFDLEGSLDETGLGPSVGFDTLRGILISQGKEAAFRKVVQATMVRDRQHGPVVELNRIQVKRSRSKGGLAGPDGTKSVFGQMCAEDELVWSRQPPPSSPCLDNRAEYVRLAINYRLHEFDEQVAAVREGMARVVPVPLLSLFTGYELETMVCGSPDIPLHLLKSVATYKGIEPSASLIQWFWEVMESFSNTERSLFLRFVWGRTRLPRTIADFRGRDFVIQVLDKYNPPDHFLPESYTCFFLLKLPRYSCKQVLEEKLKYAIHFCKSIDTDDYARIALTGEPAADDSSDDSDNEDVDSFASDSTQDYLTGH

SEQ ID NO: 1032675 - protein, 734 aa, Homo sapiens; identical to SEQ ID NO: 1032673

SEQ ID NO: 1032676 - protein, 734 aa, Homo sapiens; identical to SEQ ID NO: 1032673

SEQ ID NO: 1032677 - protein, 95 aa, Homo sapiens
HLFMDGNVAFCSRLWLCPEQQRLPRRLVRVVSEITLPHNFHASFVCRGKGDYHRLGHGSDDHVRRPRQVQGLQGKKVIAIATGSLHCVCCTEDGR

SEQ ID NO: 1032678 - protein, 734 aa, Homo sapiens; identical to SEQ ID NO: 1032673

SEQ ID NO: 1032679 - protein, 734 aa, Homo sapiens; identical to SEQ ID NO: 1032673

SEQ ID NO: 1032680 - protein, 143 aa, Homo sapiens; identical to SEQ ID NO: 872032

SEQ ID NO: 1032681 - protein, 330 aa, Homo sapiens
MELLSTPHSIEINNITCDSFRISWAMEDSDLERVTHYFIDLNKKENKNSNKFKHRDVPTKLVAKAVPLPMTVRGHWFLSPRTEYSVAVQTAVKQSDGEYLVSGWSETVEFCTGDYAKEHLAQLQEKAEQIAGRMLRFSVFYRNHHKEYFQHARTHCGNMLQPYLKDNSGSHGSPTSGMLHGVFFSCNTEFNTGQPPQDSPYGRWRFQIPAQRLFNPSTNLYFADFYCMYTAYHYAILVLAPKGSLGDRFCRDRLPLLDIACNKFLTCSVEDGELVFRHAQDLILEIIYTEPVDLSLGTLGEISGHQLMSLSTADAKKDPSCKTCNISVGR

SEQ ID NO: 1032682 - protein, 199 aa, Homo sapiens
GLSPAHQPHLLFPLVCLPGVGRTHCGNMLQPYLKDNSGSHGSPTSGMLHGVFFSCNTEFNTGQPPQDSPYGRWRFQIPAQRLFNPSTNLYFADFYCMYTAYHYAILVLAPKGSLGDRFCRDRLPLLDIACNKFLTCSVEDGELVFRHAQDLILEIIYTEPVDLSLGTLGEISGHQLMSLSTADAKKDPSCKTCNISVGR

SEQ ID NO: 1032683 - protein, 330 aa, Homo sapiens; identical to SEQ ID NO: 1032681

SEQ ID NO: 1032684 - protein, 158 aa, Homo sapiens
MLEEVQKMQGCGIPGSSPSPGTFVTCFHSFLEQVSSSGNQQAIGAIRTLRSKRTPLPRKRQLMHSLFGDYRAQMEAEWREALRALRAAAYSAQVQPVDGATRKKSRVLPARPAEPGFQAQFPAPGILPLSVSAQSNLRAVTLTPERTPWAMKAAQRRK

SEQ ID NO: 1032685 - protein, 229 aa, Homo sapiens
MAALGHLAGEAAAAPGPGTPCASRGARLPGPVSSARNPSTVCLCPEQPTCSNADSRAHPLGDEGGTASKKQKNKKKTRNRASVANGGEKASEKLAPEEVPLSAEAQAQQLAQELAWCVEQLELGLKRQKPTPKQKEQAIGAIRTLRSKRTPLPRKRQLMHSLFGDYRAQMEAEWREALRALRAAAYSAQVQPVDGATRKKSQRVCRPRSIWRAKATLDMPDEEFRFNFF

SEQ ID NO: 1032686 - protein, 229 aa, Homo sapiens; identical to SEQ ID NO: 1032685

SEQ ID NO: 1032687 - protein, 126 aa, Homo sapiens
MPRAQQLAQELAWCVEQLELGLKRQKPTPKQKEQAIGAIRTLRSKRTPLPRKRQLMHSLFGDYRAQMEAEWREALRALRAAAYSAQVQPVDGATRKKSQRVCRPRSIWRAKATLDMPDEEFRFNFF

SEQ ID NO: 1032688 - protein, 229 aa, Homo sapiens; identical to SEQ ID NO: 1032685

SEQ ID NO: 1032689 - protein, 208 aa, Homo sapiens
MGSRGSRFHRTGGPSLFGGPGGEREEAAYAIVSAFRRLLVLLLILLLLSGGRGRVYRVEQEGEMGAWPLKHSIAGSRLGLRITAGQLGWCRAFHKRWRSRVFSGLPRGRGDSLSWSAGWRVFFLDTGAAAGPWSTWRRASSRMLALPLDQGALLLALSGHDRGLALLSCGHFSLCLLGSYLCVAWFFLGCGCGARIIVVLGWRVVAAD

SEQ ID NO: 1032690 - protein, 208 aa, Homo sapiens; identical to SEQ ID NO: 1032689

SEQ ID NO: 1032691 - protein, 110 aa, Homo sapiens
MGTCDLGSAELRRGGAWDGAGGYGFPVPSHSHFPKSITGTTVGPGIGLVCGATGAGPQEAETHPETERDPSVELGDVNSGTAWPCRCWAEYGVGGALRRGGTEVRNRGCP

SEQ ID NO: 1032692 - protein, 208 aa, Homo sapiens; identical to SEQ ID NO: 1032689

SEQ ID NO: 1032693 - protein, 208 aa, Homo sapiens; identical to SEQ ID NO: 1032689

SEQ ID NO: 1032694 - protein, 229 aa, Homo sapiens; identical to SEQ ID NO: 1032685

SEQ ID NO: 1032695 - protein, 126 aa, Homo sapiens; identical to SEQ ID NO: 1032687

SEQ ID NO: 1032696 - protein, 229 aa, Homo sapiens; identical to SEQ ID NO: 1032685

SEQ ID NO: 1032697 - protein, 134 aa, Homo sapiens
KKRRKKAGEAGGGRGENDPRTDQSPRAAASRVQHLRPAAVAAATMPKRKAEGDAKGDKAKVKDEPQRRSARLSAKPAPPKPEPKPKKAPAKKGEKVPKGKKGKADAGKEGNNPAENGDAKTDQAQKAEGAGDAK

SEQ ID NO: 1032698 - protein, 90 aa, Homo sapiens
MPKRKAEGDAKGDKAKVKDEPQRRSARLSAKPAPPKPEPKPKKAPAKKGEKVPKGKKGKADAGKEGNNPAENGDAKTDQAQKAEGAGDAK

SEQ ID NO: 1032699 - protein, 90 aa, Homo sapiens; identical to SEQ ID NO: 1032698

SEQ ID NO: 1032700 - protein, 90 aa, Homo sapiens; identical to SEQ ID NO: 1032698

SEQ ID NO: 1032701 - protein, 123 aa, Homo sapiens
RYKNFYKTPRSPSSVKKRRERPPDRPKPVAAATMPKRKAEGDAKGDKAKVKDEPQRRSARLSAKPAPPKPEPKPKKAPAKKGEKVPKGKKGKADAGKEGNNPAENGDAKTDQAQKAEGAGDAK

SEQ ID NO: 1032702 - protein, 166 aa, Homo sapiens
MTAARPAQNTPRQQTRQPQESTTQNQAARPPTRHATTRAERKTHDQPHNDTTPPTHSARRQNTTNRQYTHTQTVASTAQQPPPRRRHTHTLSAASRHTKRPPRRNTRDRTQHRSAPRRHTEQATQAKTAKRTNTATRDKQQTQTTTTDNNQHREQHTRRAYEPVYS

SEQ ID NO: 1032703 - protein, 123 aa, Homo sapiens; identical to SEQ ID NO: 1032701

SEQ ID NO: 1032704 - protein, 138 aa, Homo sapiens
  misc_feature (6)..(6): Xaa can be any naturally occurring amino acid
  misc_feature (10)..(10): Xaa can be any naturally occurring amino acid
  misc_feature (14)..(14): Xaa can be any naturally occurring amino acid
  misc_feature (21)..(21): Xaa can be any naturally occurring amino acid
  misc_feature (23)..(23): Xaa can be any naturally occurring amino acid
  misc_feature (30)..(30): Xaa can be any naturally occurring amino acid
PWVFPXRNPXPEPXWDIEWAXGXPNILEEXHPTKTFGGGGENFLLPLVPFGWLWVVFLPVPLYLMFHLFPSSFPAQKKKPAPPKPEPKPKKAPAKKGEKVPKGKKGKADAGKEGNNPAENGDAKTDQAQKAEGAGDAK

SEQ ID NO: 1032705 - protein, 134 aa, Homo sapiens; identical to SEQ ID NO: 1032697

SEQ ID NO: 1032706 - protein, 102 aa, Homo sapiens
MPKRKAEGDAKGDKAKVKDEPQRRSARLSAKPAPPKPEPKPKKAPAKKGEKVPKGKKGKADAGPGGGIPVTLTHYGHLGTKALWYRKTNLFLCPLLPFHLSA

SEQ ID NO: 1032707 - protein, 90 aa, Homo sapiens; identical to SEQ ID NO: 1032698

SEQ ID NO: 1032708 - protein, 90 aa, Homo sapiens; identical to SEQ ID NO: 1032698

SEQ ID NO: 1032709 - protein, 90 aa, Homo sapiens; identical to SEQ ID NO: 1032698

SEQ ID NO: 1032710 - protein, 883 aa, Homo sapiens
MPAVSKGDGMRGLAVFISDIRNCKSKEAEIKRINKELANIRSKFKGDKALDGYSKKKYVCKLLFIFLLGHDIDFGHMEAVNLLSSNRYTEKQIGYLFISVLVNSNSELIRLINNAIKNDLASRNPTFMGLALHCIASVGSREMAEAFAGEIPKVLVAGDTMDSVKQSAALCLLRLYRTSPDLVPMGDWTSRVVHLLNDQHLGVVTAATSLITTLAQKNPEEFKTSVSLAVSRLSRIVTSASTDLQDYTYYFVPAPWLSVKLLRLLQCYPPPDPAVRGRLTECLETILNKAQEPPKSKKVQHSNAKNAVLFEAISLIIHHDSEPNLLVRACNQLGQFLQHRETNLRYLALESMCTLASSEFSHEAVKTHIETVINALKTERDVSVRQRAVDLLYAMCDRSNAPQIVAEMLSYLETADYSIREEIVLKVAILAEKYAVDYTWYVDTILNLIRIAGDYVSEEVWYRVIQIVINRDDVQGYAAKTVFEALQAPACHENLVKVGGYILGEFGNLIAGDPRSSPLIQFHLLHSKFHLCSVPTRALLLSTYIKFVNLFPEVKPTIQDVLRSDSQLRNADVELQQRAVEYLRLSTVASTDILATVLEEMPPFPERESSILAKLKKKKGPSTVTDLEDTKRDRSVDVNGGPEPAPASTSAVVVCKNNGVLFENQLLQIGLKSEFRQNLGRMFIFYGNKTSTQFLNFTPTLICSDDLQPNLNLQTKPVDPTVEGGAQVQQVVNIECVSDFTEAPVLNIQFRYGGTFQNVSVQLPITLNKFFQPTEMASQDFFQRWKQLSNPQQEVQNIFKAKHPMDTEVTKAKIIGFGSALLEEVDPNPANFVGAGIIHTKTTQIGCLLRLEPNLQAQMYRLTLRTSKEAVSQRLCELLSAQF

SEQ ID NO: 1032711 - protein, 174 aa, Homo sapiens
RRRIPFRRGAASCMVVPLDRRLSDADWERALLMRRANVTGGHWPHAMCHLRLVSHLSSGLSTQAARLTPERRESGAGLGAKAGALRSVPRMVALFVLNTPSTGSGFLTCCGGREGGWPHVLEGFHPGPQLPAVRVPGAAAGAHGPIRVSTAPLQCVHPTMSAALLPACRALITA

SEQ ID NO: 1032712 - protein, 939 aa, Homo sapiens
MPAVSKGDGMRGLAVFISDIRNCKSKEAEIKRINKELANIRSKFKGDKALDGYSKKKYVCKLLFIFLLGHDIDFGHMEAVNLLSSNRYTEKQIGYLFISVLVNSNSELIRLINNAIKNDLASRNPTFMGLALHCIASVGSREMAEAFAGEIPKVLVAGDTMDSVKQSAALCLLRLYRTSPDLVPMGDWTSRVVHLLNDQHLGVVTAATSLITTLAQKNPEEFKTSVSLAVSRLSRIVTSASTDLQDYTYYFVPAPWLSVKLLRLLQCYPPPDPAVRGRLTECLETILNKAQEPPKSKKVQHSNAKNAVLFEAISLIIHHDSEPNLLVRACNQLGQFLQHRETNLRYLALESMCTLASSEFSHEAVKTHIETVINALKTERDVSVRQRAVDLLYAMCDRSNAPQIVAEMLSYLETADYSIREEIVLKVAILAEKYAVDYTWYVDTILNLIRIAGDYVSEEVWYRVIQIVINRDDVQGYAAKTVFEALQAPACHENLVKVGGYILGEFGNLIAGDPRSSPLIQFHLLHSKFHLCSVPTRALLLSTYIKFVNLFPEVKPTIQDVLRSDSQLRNADVELQQRAVEYLRLSTVASTDILATVLEEMPPFPERESSILAKLKKKKGPSTVTDLEDTKRDRSVDVNGGPEPAPASTSAVSTPSPSADLLGLGAAPPAPAGPPPSSGGSGLLVDVFSDSASVVAPLAPGSEDNFARFVCKNNGVLFENQLLQIGLKSEFRQNLGRMFIFYGNKTSTQFLNFTPTLICSDDLQPNLNLQTKPVDPTVEGGAQVQQVVNIECVSDFTEAPVLNIQFRYGGTFQNVSVQLPITLNKFFQPTEMASQDFFQRWKQLSNPQQEVQNIFKAKHPMDTEVTKAKIIGFGSALLEEVDPNPANFVGAGIIHTKTTQIGCLLRLEPNLQAQMYRLTLRTSKEAVSQRLCELLSAQF

SEQ ID NO: 1032713 - protein, 939 aa, Homo sapiens; identical to SEQ ID NO: 1032712

SEQ ID NO: 1032714 - protein, 943 aa, Homo sapiens
MSAHCNLFCRVQAILLPQPPELAGNYRKSKEAEIKRINKELANIRSKFKGDKALDGYSKKKYVCKLLFIFLLGHDIDFGHMEAVNLLSSNRYTEKQIGYLFISVLVNSNSELIRLINNAIKNDLASRNPTFMGLALHCIASVGSREMAEAFAGEIPKVLVAGDTMDSVKQSAALCLLRLYRTSPDLVPMGDWTSRVVHLLNDQHLGVVTAATSLITTLAQKNPEEFKTSVSLAVSRLSRIVTSASTDLQDYTYYFVPAPWLSVKLLRLLQCYPPPDPAVRGRLTECLETILNKAQEPPKSKKVQHSNAKNAVLFEAISLIIHHDSEPNLLVRACNQLGQFLQHRETNLRYLALESMCTLASSEFSHEAVKTHIETVINALKTERDVSVRQRAVDLLYAMCDRSNAPQIVAEMLSYLETADYSIREEIVLKVAILAEKYAVDYTWYVDTILNLIRIAGDYVSEEVWYRVIQIVINRDDVQGYAAKTVFEALQAPACHENLVKVGGYILGEFGNLIAGDPRSSPLIQFHLLHSKFHLCSVPTRALLLSTYIKFVNLFPEVKPTIQDVLRSDSQLRNADVELQQRAVEYLRLSTVASTDILATVLEEMPPFPERESSILAKLKKKKGPSTVTDLEDTKRDRSVDVNGGPEPAPASTSAVSTPSPSADLLGLGAAPPAPAGPPPSSGGSGLLVDVFSDSASVVAPLAPGSEDNFARFVCKNNGVLFENQLLQIGLKSEFRQNLGRMFIFYGNKTSTQFLNFTPTLICSDDLQPNLNLQTKPVDPTVEGGAQVQQVVNIECVSDFTEAPVLNIQFRYGGTFQNVSVQLPITLNKFFQPTEMASQDFFQRWKQLSNPQQEVQNIFKAKHPMDTEVTKAKIIGFGSALLEEVDPNPANFVGAGIIHTKTTQIGCLLRLEPNLQAQMYRLTLRTSKEAVSQRLCELLSAQF

SEQ ID NO: 1032715 - protein, 988 aa, Homo sapiens
MPAVSKGDGMRGLAVFISDIRNCKSNPTSLIIHTERNVSGWNEQDTEVVGYVKKEKNNGEDSYICQQLKDNVQVTEAEIKRINKELANIRSKFKGDKALDGYSKKKYVCKLLFIFLLGHDIDFGHMEAVNLLSSNRYTEKQIGYLFISVLVNSNSELIRLINNAIKNDLASRNPTFMGLALHCIASVGSREMAEAFAGEIPKVLVAGDTMDSVKQSAALCLLRLYRTSPDLVPMGDWTSRVVHLLNDQHLGVVTAATSLITTLAQKNPEEFKTSVSLAVSRLSRIVTSASTDLQDYTYYFVPAPWLSVKLLRLLQCYPPPDPAVRGRLTECLETILNKAQEPPKSKKVQHSNAKNAVLFEAISLIIHHDSEPNLLVRACNQLGQFLQHRETNLRYLALESMCTLASSEFSHEAVKTHIETVINALKTERDVSVRQRAVDLLYAMCDRSNAPQIVAEMLSYLETADYSIREEIVLKVAILAEKYAVDYTWYVDTILNLIRIAGDYVSEEVWYRVIQIVINRDDVQGYAAKTVFEALQAPACHENLVKVGGYILGEFGNLIAGDPRSSPLIQFHLLHSKFHLCSVPTRALLLSTYIKFVNLFPEVKPTIQDVLRSDSQLRNADVELQQRAVEYLRLSTVASTDILATVLEEMPPFPERESSILAKLKKKKGPSTVTDLEDTKRDRSVDVNGGPEPAPASTSAVSTPSPSADLLGLGAAPPAPAGPPPSSGGSGLLVDVFSDSASVVAPLAPGSEDNFARFVCKNNGVLFENQLLQIGLKSEFRQNLGRMFIFYGNKTSTQFLNFTPTLICSDDLQPNLNLQTKPVDPTVEGGAQVQQVVNIECVSDFTEAPVLNIQFRYGGTFQNVSVQLPITLNKFFQPTEMASQDFFQRWKQLSNPQQEVQNIFKAKHPMDTEVTKAKIIGFGSALLEEVDPNPANFVGAGIIHTKTTQIGCLLRLEPNLQAQMYRLTLRTSKEAVSQRLCELLSAQF

SEQ ID NO: 1032716 - protein, 939 aa, Homo sapiens; identical to SEQ ID NO: 1032712

SEQ ID NO: 1032717 - protein, 588 aa, Homo sapiens
MCTLASSEFSHEAVKTHIETVINALKTERDVSVRQRAVDLLYAMCDRSNAPQIVAEMLSYLETADYSIREEIVLKVAILAEKYAVDYTWYVDTILNLIRIAGDYVSEEVWYRVIQIVINRDDVQGYAAKTVFEALQAPACHENLVKVGGYILGEFGNLIAGDPRSSPLIQFHLLHSKFHLCSVPTRALLLSTYIKFVNLFPEVKPTIQDVLRSDSQLRNADVELQQRAVEYLRLSTVASTDILATVLEEMPPFPERESSILAKLKKKKGPSTVTDLEDTKRDRSVDVNGGPEPAPASTSAVSTPSPSADLLGLGAAPPAPAGPPPSSGGSGLLVDVFSDSASVVAPLAPGSEDNFARFVCKNNGVLFENQLLQIGLKSEFRQNLGRMFIFYGNKTSTQFLNFTPTLICSDDLQPNLNLQTKPVDPTVEGGAQVQQVVNIECVSDFTEAPVLNIQFRYGGTFQNVSVQLPITLNKFFQPTEMASQDFFQRWKQLSNPQQEVQNIFKAKHPMDTEVTKAKIIGFGSALLEEVDPNPANFVGAGIIHTKTTQIGCLLRLEPNLQAQMYRLTLRTSKEAVSQRLCELLSAQF

SEQ ID NO: 1032718 - protein, 948 aa, Homo sapiens
MPAVSKGDGMRGLAVFISDIRNCKSKEAEIKRINKELANIRSKFKGDKALDGYSKKKYVCKLLFIFLLGHDIDFGHMEAVNLLSSNRYTEKQIGYLFISVLVNSNSELIRLINNAIKNDLASRNPTFMGLALHCIASVGSREMAEAFAGEIPKVLVAGDTMDSVKQSAALCLLRLYRTSPDLVPMGDWTSRVVHLLNDQHLGVVTAATSLITTLAQKNPEEFKTSVSLAVSRLSRIVTSASTDLQDYTYYFVPAPWLSVKLLRLLQCYPPPDPAVRGRLTECLETILNKAQEPPKSKKVQHSNAKNAVLFEAISLIIHHDSEPNLLVRACNQLGQFLQHRETNLRYLALESMCTLASSEFSHEAVKTHIETVINALKTERDVSVRQRAVDLLYAMCDRSNAPQIVAEMLSYLETADYSIREEIVLKVAILAEKYAVDYTWYVDTILNLIRIAGDYVSEEVWYRVIQIVINRDDVQGYAAKTVFEALQAPACHENLVKVGGYILGEFGNLIAGDPRSSPLIQFHLLHSKFHLCSVPTRALLLSTYIKFVNLFPEVKPTIQDVLRSDSQLRNADVELQQRAVEYLRLSTVASTDILATVLEEMPPFPERESSILAKLKKKKGPSTVTDLEDTKRDRSVDVNGGPEPAPASTSAVSTPSPSADLLGLGAAPPAPAGPPPSSGGSGLLVDVFSDSASVVAPLAPGSEDNFARFVCKNNGVLFENQLLQIGLKSEFRQNLGRMFIFYGNKTSTQFLNFTPTLICSDDLQPNLNLQTKPVDPTVEGGAQVQQVVNIECVSDFTEAPVLNIQFRYGGTFQNVSVQLPITLNKFFQPTEMASQDFFQRWKQLSNPQQEVQNIFKAKHPMDTEVTKAKIIGFGSALLEEVDPNPANFVGAGIIHTKTTQIGCLLRLEPNLQAQVRPSGNGGTHWSCSLFWHNVRGEMRSSLVQFSQF

SEQ ID NO: 1032719 - protein, 685 aa, Homo sapiens
MPAVSKGDGMRGLAVFISDIRNCKSKEAEIKRINKELANIRSKFKGDKALDGYSKKKYVCKLLFIFLLGHDIDFGHMEAVNLLSSNRYTEKQIGYLFISVLVNSNSELIRLINNAIKNDLASRNPTFMGLALHCIASVGSREMAEAFAGEIPKVLVAGDTMDSVKQSAALCLLRLYRTSPDLVPMGDWTSRVVHLLNDQHLGVVTAATSLITTLAQKNPEEFKTSVSLAVSRLSRIVTSASTDLQDYTYYFVPAPWLSVKLLRLLQCYPPPDPAVRGRLTECLETILNKAQEPPKSKKVQHSNAKNAVLFEAISLIIHHDSEPNLLVRACNQLGQFLQHRETNLRYLALESMCTLASSEFSHEAVKTHIETVINALKTERDVSVRQRAVDLLYAMCDRSNAPQIVAEMLSYLETADYSIREEIVLKVAILAEKYAVDYTWYVDTILNLIRIAGDYVSEEVWYRVIQIVINRDDVQGYAAKTVFEALQAPACHENLVKVGGYILGEFGNLIAGDPRSSPLIQFHLLHSKFHLCSVPTRALLLSTYIKFVNLFPEVKPTIQDVLRSDSQLRNADVELQQRAVEYLRLSTVASTDILATVLEEMPPFPERESSILAKLKKKKGPSTVTDLEDTKRDRSVDVNGGPEPAPASTSAVSTPSPSADLLVVGGGAETMIREQRRKVEDSKTE

SEQ ID NO: 1032720 - protein, 202 aa, Homo sapiens [sequence omitted]

SEQ ID NO: 1032721 - protein, 576 aa, Homo sapiens
MPAVSKGDGMRGLAVFISDIRNCKSKEAEIKRINKELANIRSKFKGDKALDGYSKKKYVCKLLFIFLLGHDIDFGHMEAVNLLSSNRYTEKQIGYLFISVLVNSNSELIRLINNAIKNDLASRNPTFMGLALHCIASVGSREMAEAFAGEIPKVLVAGDTMDSVKQSAALCLLRLYRTSPDLVPMGDWTSRVVHLLNDQHLGVVTAATSLITTLAQKNPEEFKTSVSLAVSRLSRIVTSASTDLQDYTYYFVPAPWLSVKLLRLLQCYPPPDPAVRGRLTECLETILNKAQEPPPHTSPLWAGREHTCVAQEEKLSLDCGSHGRRWILGSIFIKIETVLWLNLQIKGKLEVGVNVAFVGVSLRWPVLPPTPPRSLWEQQCHCAWRGLSLGVWPSWWLHTWRRPGPLGGAQLTLVLLQSQLDCFPRQDFNLEFRNICICNDFWQKHVSWPDVTVLLSQLLFVKGVCYAPAVAEALDVQPGEERPAGPAGPPGLQGKVWAGGARLRGVLVSFLSEWASPGHGAGLSPSTGPVQSSLEGLWRKDASVWSGSEGAIGRMPCATCGLCLTCHLDSAPRLHV

SEQ ID NO: 1032722 - protein, 202 aa, Homo sapiens [sequence omitted]

SEQ ID NO: 1032723 - protein, 353 aa, Homo sapiens
MPAVSKGDGMRGLAVFISDIRNCKSKEAEIKRINKELANIRSKFKGDKALDGYSKKKYVCKLLFIFLLGHDIDFGHMEAVNLLSSNRYTEKQIGYLFISVLVNSNSELIRLINNAIKNDLASRNPTFMGLALHCIASVGSREMAEAFAGEIPKVLVAGDTMDSVKQSAALCLLRLYRTSPDLVPMGDWTSRVVHLLNDQHLGVVTAATSLITTLAQKNPEEFKTSVSLAVSRLSRIVTSASTDLQDYTYYFVPAPWLSVKLLRLLQCYPPPDPAVRGRLTECLETILNKAQEPPKSKKVQHSNAKNAVLFEAISLIIHHDSEPNLQAQMYRLTLRTSKEAVSQRLCELLSAQF

SEQ ID NO: 1032724 - protein, 927 aa, Homo sapiens
MPAVSKGDGMRGLAVFISDIRNCKSKEAEIKRINKELANIRSKFKGDKALDGYSKKKYVCKLLFIFLLGHDIDFGHMEAVNLLSSNRYTEKQIGYLFISVLVNSNSELIRLINNAIKNDLASRNPTFMGLALHCIASVGSREMAEAFAGEIPKVLVAGDTMDSVKQSAALCLLRLYRTSPDLVPMGDWTSRVVHLLNDQHLGVVTAATSLITTLAQKNPEEFKTSVSLAVSRLSRIVTSASTDLQDYTYYFVPAPWLSVKLLRLLQCYPPPDPAVRGRLTECLETILNKAQEPPKSKKVQHSNAKNAVLFEAISLIIHHDSEPNLLVRACNQLGQFLQHRETNLRYLALESMCTLASSEFSHEAVKTHIETVINALKTERDVSVRQRAVDLLYAMCDRSNAPQIVAEMLSYLETADYSIREEIVLKVAILAEKYAVDYTWYVDTILNLIRIAGDYVSEEVWYRVIQIVINRDDVQGYAAKTVFEALQAPACHENLVKVGGYILGEFGNLIAGDPRSSPLIQFHLLHSKFHLCSVPTRALLLSTYIKFVNLFPEVKPTIQDVLRSDSQLRNADVELQQRAVEYLRLSTVASTDILATVLEEMPPFPERESSILAKLKKKKGPSTVTDLEDTKRDRSVDVNGGPEPAPASTSAVSTPSPSADLLGLGAGAVKAWTGCCGVAGCVSDSALWSASVWLRDICSGCKRGVLENQLLQIGLKSEFRQNLGRMFIFYGNKTSTQFLNFTPTLICSDDLQPNLNLQTKPVDPTVEGGAQVQQVVNIECVSDFTEAPVLNIQFRYGGTFQNVSVQLPITLNKFFQPTEMASQDFFQRWKQLSNPQQEVQNIFKAKHPMDTEVTKAKIIGFGSALLEEVDPNPANFVGAGIIHTKTTQIGCLLRLEPNLQAQMYRLTLRTSKEAVSQRLCELLSAQF

SEQ ID NO: 1032725 - protein, 936 aa, Homo sapiens
MTRYESCCYGPGAVRPDQSGKCPEAEIKRINKELANIRSKFKGDKALDGYSKKKYVCKLLFIFLLGHDIDFGHMEAVNLLSSNRYTEKQIGYLFISVLVNSNSELIRLINNAIKNDLASRNPTFMGLALHCIASVGSREMAEAFAGEIPKVLVAGDTMDSVKQSAALCLLRLYRTSPDLVPMGDWTSRVVHLLNDQHLGVVTAATSLITTLAQKNPEEFKTSVSLAVSRLSRIVTSASTDLQDYTYYFVPAPWLSVKLLRLLQCYPPPDPAVRGRLTECLETILNKAQEPPKSKKVQHSNAKNAVLFEAISLIIHHDSEPNLLVRACNQLGQFLQHRETNLRYLALESMCTLASSEFSHEAVKTHIETVINALKTERDVSVRQRAVDLLYAMCDRSNAPQIVAEMLSYLETADYSIREEIVLKVAILAEKYAVDYTWYVDTILNLIRIAGDYVSEEVWYRVIQIVINRDDVQGYAAKTVFEALQAPACHENLVKVGGYILGEFGNLIAGDPRSSPLIQFHLLHSKFHLCSVPTRALLLSTYIKFVNLFPEVKPTIQDVLRSDSQLRNADVELQQRAVEYLRLSTVASTDILATVLEEMPPFPERESSILAKLKKKKGPSTVTDLEDTKRDRSVDVNGGPEPAPASTSAVSTPSPSADLLGLGAAPPAPAGPPPSSGGSGLLVDVFSDSASVVAPLAPGSEDNFARFVCKNNGVLFENQLLQIGLKSEFRQNLGRMFIFYGNKTSTQFLNFTPTLICSDDLQPNLNLQTKPVDPTVEGGAQVQQVVNIECVSDFTEAPVLNIQFRYGGTFQNVSVQLPITLNKFFQPTEMASQDFFQRWKQLSNPQQEVQNIFKAKHPMDTEVTKAKIIGFGSALLEEVDPNPANFVGAGIIHTKTTQIGCLLRLEPNLQAQMYRLTLRTSKEAVSQRLCELLSAQF

SEQ ID NO: 1032726 - protein, 939 aa, Homo sapiens; identical to SEQ ID NO: 1032712

SEQ ID NO: 1032727 - protein, 807 aa, Homo sapiens
MPAVSKGDGMRGLAVFISDIRNCKSKEAEIKRINKELANIRSKFKGDKALDGYSKKKYVCKLLFIFLLGHDIDFGHMEAVNLLSSNRYTEKQIGYLFISVLVNSNSELIRLINNAIKNDLASRNPTFMGLALHCIASVGSREMAEAFAGEIPKVLVAGDTMDSVKQSAALCLLRLYRTSPDLVPMGDWTSRVVHLLNDQHLGVVTAATSLITTLAQKNPEEFKTSVSLAVSRLSRIVTSASTDLQDYTYYFVPAPWLSVKLLRLLQCYPPPDPAVRGRLTECLETILNKAQEPPKSKKVQHSNAKNAVLFEAISLIIHHDSEPNLLVRACNQLGQFLQHRETNLRYLALESMCTLASSEFSHEAVKTHIETVINALKTERDVSVRQRAVDLLYAMCDRSNAPQIVAEMLSYLETADYSIREEIVLKVAILAEKYAVDYTWYVDTILNLIRIAGDYVSEEVWYRVIQIVINRDDVQGYAAKTVFEALQAPACHENLVKVGGYILGEFGNLIAGDPRSSPLIQFHLLHSKFHLCSVPTRALLLSTYIKFVNLFPEVKPTIQDVLRSDSQLRNADVELQQRAVEYLRLSTVASTDILATVLEEMPPFPERESSILAKLKKKKGPSTVTDLEDTKRDRSVDVNGGPEPAPASTSAVSTPSPSADLLGLGAAPPAPAGPPPSSGGSGLLVDVFSDSASVVAPLAPGSEDNFARFVCKNNGVLFENQLLQIGLKSEFRQNLGRMFIFYGNKTSTQFLNFTPTLICSDDLQPNLNLQTKPVDPTVEGGAQVQQVVNIECVSDFTEAPVLNIQFR

SEQ ID NO: 1032728 - protein, 527 aa, Homo sapiens
MPAVSKGDGMRGLAVFISDIRNCKSKEAEIKRINKELANIRSKFKGDKALDGYSKKKYVCKLLFIFLLGHDIDFGHMEAVNLLSSNRYTEKQIGYLFISVLVNSNSELIRLINNAIKNDLASRNPTFMGLALHCIASVGSREMAEAFAGEIPKVLVAGDTMDSVKQSAALCLLRLYRTSPDLVPMGDWTSRVVHLLNDQHLGVVTAATSLITTLAQKNPEEFKTSVSLAVSRLSRIVTSASTDLQDYTYYFVPAPWLSVKLLRLLQCYPPPDPAVRGRLTECLETILNKAQEPPKSKKVQHSNAKNAVLFEAISLIIHHDSEPNLLVRACNQLGQFLQHRETNLRYLALESMCTLASSEFSHEAVKTHIETVINALKTERDVSVRQRAVDLLYAMCDRSNAPQIVAEMLSYLETADYSIREEIVLKVAILAEKYAVDYTWYVDTILNLIRIAGDYVSEEVWYRVIQIVINRDDVQGYAAKTVFEALQAPACHENLVKVGGYILGEFGNLIAGDPRSSPLIQFHLLHK

SEQ ID NO: 1032729 - protein, 327 aa, Homo sapiens
MPPFPERESSILAKLKKKKGPSTVTDLEDTKRDRSVDVNGGPEPAPASTSAVSTPSPSADLLGLGAGAVKAWTGCCGVAGCVSDSALWSASVWLRDICSGCKRGVLENQLLQIGLKSEFRQNLGRMFIFYGNKTSTQFLNFTPTLICSDDLQPNLNLQTKPVDPTVEGGAQVQQVVNIECVSDFTEAPVLNIQFRYGGTFQNVSVQLPITLNKFFQPTEMASQDFFQRWKQLSNPQQEVQNIFKAKHPMDTEVTKAKIIGFGSALLEEVDPNPANFVGAGIIHTKTTQIGCLLRLEPNLQAQMYRLTLRTSKEAVSQRLCELLSAQF

SEQ ID NO: 1032730 - protein, 143 aa, Homo sapiens
MSLSAAAAAGRYGGTFQNVSVQLPITLNKFFQPTEMASQDFFQRWKQLSNPQQEVQNIFKAKHPMDTEVTKAKIIGFGSALLEEVDPNPANFVGAGIIHTKTTQIGCLLRLEPNLQAQMYRLTLRTSKEAVSQRLCELLSAQF

SEQ ID NO: 1032731 - protein, 939 aa, Homo sapiens; identical to SEQ ID NO: 1032712

SEQ ID NO: 1032732 - protein, 698 aa, Homo sapiens
ILGAASCILWGTARDAPLCGRGPQERSWESIDAELGPTPWLLQRAGSGFAQIDDIADGAVKPPPNKYPIFFFGTHETAFLGPKDLFPYDKCKDKYGKPNKRKGFNEGLWEIQNNPHASYSAPPPVSSSDSEAPEANPADGSDADEDDEDRGVMAVTAVTATAASDRMESDSDSDKSSDNSGLKRKTPALKMSVSKRARKASSDLDQASVSPSEEENSESSSESEKTSDQDFTPEKKAAVRAPRRGPLGGRKKKKAPSASDSDSKADSDGAKPEPVAMARSASSSSSSSSSSDSDVSVKKPPRGRKPAEKPLPKPRGRKPKPERPPSSSSSDSDSDEVDRISEWKRRDEARRRELEARRRREQEEELRRLREQEKEEKERRRERADRGEAERGSGGSSGDELREDDEPVKKRGRKGRGRGPPSSSDSEPEAELEREAKKSAKKPQSSSTEPARKPGQKEKRVRPEEKQQAKPVKVERTRKRSEGFSMDRKVEKKKEPSVEEKLQKLHSEIKFALKVDSPDVKRCLNALEELGTLQVTSQILQKNTDVVATLKKIRRYKANKDVMEKAAEVYTRLKSRVLGPKIEAVQKVNKAGMEKEKAEEKLAGEELAGEEAPQEKAEDKPSTDLSAPVNGEATSQKGESAEDKEHEEGRDSEEGPRCGSSEDLHDSVREGPDLDRPGSDRQERERARGDSEALDEES

SEQ ID NO: 1032733 - protein, 670 aa, Homo sapiens
MPHAFKPGDLVFAKMKGYPHWPARIDDIADGAVKPPPNKYPIFFFGTHETAFLGPKDLFPYDKCKDKYGKPNKRKGFNEGLWEIQNNPHASYSAPPPVSSSDSEAPEANPADGSDADEDDEDRGVMAVTAVTATAASDRMESDSDSDKSSDNSGLKRKTPALKMSVSKRARKASSDLDQASVSPSEEENSESSSESEKTSDQDFTPEKKAAVRAPRRGPLGGRKKKKAPSASDSDSKADSDGAKPEPVAMARSASSSSSSSSSSDSDVSVKKPPRGRKPAEKPLPKPRGRKPKPERPPSSSSSDSDSDEVDRISEWKRRDEARRRELEARRRREQEEELRRLREQEKEEKERRRERADRGEAERGSGGSSGDELREDDEPVKKRGRKGRGRGPPSSSDSEPEAELEREAKKSAKKPQSSSTEPARKPGQKEKRVRPEEKQQAKPVKVERTRKRSEGFSMDRKVEKKKEPSVEEKLQKLHSEIKFALKVDSPDVKRCLNALEELGTLQVTSQILQKNTDVVATLKKIRRYKANKDVMEKAAEVYTRLKSRVLGPKIEAVQKVNKAGMEKEKAEEKLAGEELAGEEAPQEKAEDKPSTDLSAPVNGEATSQKGESAEDKEHEEGRDSEEGPRCGSSEDLHDVREGPDLDRPGSDRQERERARGDSEALDEES

SEQ ID NO: 1032734 - protein, 656 aa, Homo sapiens
MPHAFKPGDLVFAKMKGYPHWPARIDDIADGAVKPPPNKYPIFFFGTHETAFLGPKDLFPYDKCKDKYGKPNKRKGFNEGLWEIQNNPHASYSAPPPVSSSDSEAPEANPADGSDADEDDEDRGVMAVTAVTATAASDRMESDSDSDKSSDNSGLKRKTPALKMSVSKRARKASSDLDQASVSPSEEENSESSSESEKTSDQDFTPEKKAAVRAPRRGPLGGRKKKKAPSASDSDSKADSDGAKPEPVAMARSASSSSSSSSSSDSDVSVKKPPRGRKPAEKPLPKPRGRKPKPERPPSSSSSDSDSDEVDRISEWKRRDEARRRELEARRRREQEEELRRLREQEKEEKERRRSGDELREDDEPVKKRGRKGRGRGPPSSSDSEPEAELEREAKKSAKKPQSSSTEPARKPGQKEKRVRPEEKQQAKPVKVERTRKRSEGFSMDRKVEKKKEPSVEEKLQKLHSEIKFALKVDSPDVKRCLNALEELGTLQVTSQILQKNTDVVATLKKIRRYKANKDVMEKAAEVYTRLKSRVLGPKIEAVQKVNKAGMEKEKAEEKLAGEELAGEEAPQEKAEDKPSTDLSAPVNGEATSQKGESAEDKEHEEGRDSEEGPRCGSSEDLHDSVREGPDLDRPGSDRQERERARGDSEALDEES

SEQ ID NO: 1032735 - protein, 639 aa, Homo sapiens [sequence omitted]

SEQ ID NO: 1032736 - protein, 639 aa, Homo sapiens [sequence omitted]

SEQ ID NO: 1032737 - protein, 508 aa, Homo sapiens
MPHAFKPGDLVFAKMKGYPHWPARIDDIADGAVKPPPNKYPIFFFGTHETAFLGPKDLFPYDKCKDKYGKPNKRKGFNEGLWEIQNNPHASYSAPPPVSSSDSEAPEANPADGSDADEDDEDRGVMAVTAVTATAASDRMESDSDSDKSSDNSGLKRKTPALKMSVSKRARKASSDLDQASVSPSEEENSESSSESEKTSDQDFTPEKKAAVRAPRRGPLGGRKKKKAPSASDSDSKADSDGAKPEPVAMARSASSSSSSSSSSDSDVSVKKPPRGRKPAEKPLPKPRGRKPKPERPPSSSSSDSDSDEVDRISEWKRRDEARRRELEARRRREQEEELRRLREQEKEEKERRRGAQAAPLLPRLAGEQSRELWGTLCCLYLFPWVFFSCLISVISNQHEMTINGFLMKKETHQKTSGLRGPVVIVGTIPARVIVGTIRARVTRRVWRRAGPHQTGIPGPNGGRGGPWPEFFGSQAGWIGSPGPVLFLRAGVWSRPVPRAGPLLTAGV

SEQ ID NO: 1032738 - protein, 81 aa, Homo sapiens
  misc_feature (8)..(8): Xaa can be any naturally occurring amino acid
QNNPHASXSAPPPVSSSDSEAPEANPADGSDADEDDEDRGVMAVTAVTATAASDRMESDSDSDKSSDNSGLKGSTTSRMAP

SEQ ID NO: 1032739 - protein, 642 aa, Homo sapiens
MPHAFKPGDLVFAKMKGYPHWPARIDDIADGAVKPPPNKYPIFFFGTHETAFLGPKDLFPYDKCKDKYGKPNKRKGFNEGLWEIQNNPHASYSAPPPVSSSDSEAPEANPADGSDADEDDEDRGVMAVTAVTATAASDRMESDSDSDKSSDNSGLKRKTPALKMSVSKRARKASSDLDQASVSPSEEENSESSSESEKTSDQDFTPEKKAAVRAPRRGPLGGRKKKKAPSASDSDSKADSDGAKPEPVAMARSASSSSSSSSSSDSDVSVKKPPRGRKPAEKPLPKPRGRKPKPERPPSSSSSDSDSDEVDRISEWKRRDEARRREGADRGEAERGSGGSSGDELREDDEPVKKRGRKGRGRGPPSSSDSEPEAELEREAKKSAKKPQSSSTEPARKPGQKEKRVRPEEKQQAKPVKVERTRKRSEGFSMDRKVEKKKEPSVEEKLQKLHSEIKFALKVDSPDVKRCLNALEELGTLQVTSQILQKNTDVVATLKKIRRYKANKDVMEKAAEVYTRLKSRVLGPKIEAVQKVNKAGMEKEKAEEKLAGEELAGEEAPQEKAEDKPSTDLSAPVNGEATSQKGESAEDKEHEEGRDSEEGPRCGSSEDLHDSVREGPDLDRPGSDRQERERARGDSEALDEES

SEQ ID NO: 1032740 - protein, 612 aa, Homo sapiens
MPHAFKPGDLVFAKMKGYPHWPARIDDIADGAVKPPPNKYPIFFFGTHETAFLGPKDLFPYDKCKDKYGKPNKRKGFNEGLWEIQNNPHASYSAPPPVSSSDSEAPEANPADGSDADEDDEDRGVMAVTAVTATAASDRMESDSDSDKSSDNSGLKRKTPALKMSVSKRARKASSDLDQASVSPSEEENSESSSESEKTSDQDFTPEKKAAVRAPRRGPLGGRKKKKAPSASDSDSKADSDGAKPEPVAMARSASSSSSSSSSSDSDVSVKKPPRGRKPAEKPLPKPRGRKPKPERPPSSSSSDSDSDEVDRISEWKRRDEARRRELEARRRREQEEELRRLREQEKEEKERRRERADRGEAERGSGGSSGDELREDDEPVKKRGRKGRGRGPPSSSDSEPEAELEREAKKSAKKPQSSSTEPARKPGQKEKRVRPEEKQQAKPVKVERTRKRSEGFSMDRKVEKKKEPSVEEVPECPRGAGNPAGDLSDPPEEHRRGGHLEEDSPLQSEQGRNGEGSRSLYPAQVAGPRPKDRGGAESEQGWDGEGEGRGEAGRGGAGRGGGPPGEGGGQAQHRSLSPSEWRGHITEGGERRGQGARGGSGLGGGAKVWLL

SEQ ID NO: 1032741 - protein, 444 aa, Homo sapiens
MPHAFKPGDLVFAKMKGYPHWPARIDDIADGAVKPPPNKYPIFFFGTHETAFLGPKDLFPYDKCKDKYGKPNKRKGFNEGLWEIQNNPHASYSAPPPVSSSDSEAPEANPADGSDADEDDEDRGVMAVTAVTATAASDRMESDSDSDKSSDNSGLKRKTPALKMSVSKRARKASSDLDQASVSPSEEENSESSSESEKTSDQDFTPEKKAAVRAPRRGPLGGRKKKKAPSASDSDSKADSDGAKPEPVAMARSASSSSSSSSSSDSDVSVKKPPRGRKPAEKPLPKPRGRKPKPERPPSSSSSDSDSDEVDRISEWKRRDEARRRELEARRRREQEEELRRLREQEKEEKERRRSGPTAGRLSGAAAAAAGTSSGRTMSPSRSGDARAGAGVPRPPLTPSPRPSWRERPRNQRRSRSPQAQSPPGNLARRRRECGPRRSNKPSP

SEQ ID NO: 1032742 - protein, 670 aa, Homo sapiens; identical to SEQ ID NO: 1032733

SEQ ID NO: 1032743 - protein, 574 aa, Homo sapiens
MLSAPCCDDRRMCVCPGPRRIGIPVRSSSLPLFSDAMPAPTQLFFPLIRNCELSRIYGTACYCHHKHLCCSSSYIPQSRLRYTPHPAYATFCRPKENWWQYTQGRRYASTPQKFYLTPPQVNSILKANEYSFKVPEFDGKMSVLSLDLTAIKLPANAPIEDRRSAATCLQTRGMLLGVFDGHAGCAWSQAVSERLFYYIAGSLVPHETLLEIENAVESGRALLPILQWHKHPNDYFSKEASKLYFNSLRTYWQELIDLNTGESTDIDVKEALINAFKRLDNDISLEAQVGDPNSFLNYLVLRVAFSGATACVAHVDGVDLHVANTGDSRAMLGVQEEDGSWSAVTLSNDHNAQNERELERLKLEHPKSEAKSVVKQDRLLGLLMPFRAFGDVKFKWSIDLQKRVIESGPDQLNDNEYTKFIPPNYHTPPYLTAEPEVTYHRLRPQDKFLVLATDGLWETMHRQDVVRIVGEYLTGMHHQQPIAVGGYKVTLGQMHGLLTERRTKMSSVFEDQNAATHLIRHAVGNNEFGTVDHERLSKMLSLPEELARMYRDDITIIVVQFNSHVVGAYQNQEK

SEQ ID NO: 1032744 - protein, 194 aa, Homo sapiens
MPAPTQLFFPLIRNCELSRIYGTACYCHHKHLCCSSSYIPQSRLRYTPHPAYATFCRPKENWWQYTQGRRYASTPQKFYLTPPQVNSILKANEYSFKVPEFDGKNVSSILGFDSNQLPANAPIEDRRSAATCLQTRGMLLGVFDGHAGCAWSQAVSERLFYYIAGSLVPHETLLEIDDSFVGGSQWALNLGLPG

SEQ ID NO: 1032745 - protein, 537 aa, Homo sapiens
MPAPTQLFFPLIRNCELSRIYGTACYCHHKHLCCSSSYIPQSRLRYTPHPAYATFCRPKENWWQYTQGRRYASTPQKFYLTPPQVNSILKANEYSFKVPEFDGKNVSSILGFDSNQLPANAPIEDRRSAATCLQTRGMLLGVFDGHAGCAWSQAVSERLFYYIAGSLVPHETLLEIENAVESGRALLPILQWHKHPNDYFSKEASKLYFNSLRTYWQELIDLNTGESTDIDVKEALINAFKRLDNDISLEAQVGDPNSFLNYLVLRVAFSGATACVAHVDGVDLHVANTGDSRAMLGVQEEDGSWSAVTLSNDHNAQNERELERLKLEHPKSEAKSVVKQDRLLGLLMPFRAFGDVKFKWSIDLQKRVIESGPDQLNDNEYTKFIPPNYHTPPYLTAEPEVTYHRLRPQDKFLVLATDGLWETMHRQDVVRIVGEYLTGMHHQQPIAVGGYKVTLGQMHGLLTERRTKMSSVFEDQNAATHLIRHAVGNNEFGTVDHERLSKMLSLPEELARMYRDDITIIVVQFNSHVVGAYQNQE

SEQ ID NO: 1032746 - protein, 537 aa, Homo sapiens; identical to SEQ ID NO: 1032745

SEQ ID NO: 1032747 - protein, 390 aa, Homo sapiens
MPAPTQLFFPLIRNCELSRIYGTACYCHHKHLCCSSSYIPQSRLRYTPHPAYATFCRPKENWWQYTQGRRYASTPQKFYLTPPQVNSILKANEYSFKVPEFDGKNVSSILGFDSNQLPANAPIEDRRSAATCLQTRGMLLGVFDGHAGCAWSQAVSERLFYYIAGSLVPHETLLEIENAVESGRALLPILQWHKHPNDYFSKEASKLYFNSLRTYWQELIDLNTGESTDIDVKEALINAFKRLDNDISLEAQVGDPNSFLNYLVLRVAFSGATACVAHVDGVDLHVANTGDSRAMLGVQEEDGSWSAVTLSNDHNAQNERELERLKLEHPKSEAKSVVKQDRLLGLLMPFRAFGDVKFKWSIDLQKRVIESGPLPGRQGPQHWCGPFSSS

SEQ ID NO: 1032748 - protein, 129 aa, Homo sapiens
MSHEKSFLVSGDNYPPPNPGYPGGPQPPMPPYAQPPYPGAPLTQQTPFFADSRRTIRVQGNTGVNTPNVAPKTPGKATRGGNRTKMKDTSEQNRLRDKSHRGERHKQQVREQKDTRENRKNEKAEMKKQ

SEQ ID NO: 1032749 - protein, 83 aa, Homo sapiens
HGAAVGSHALLRAQAPGLPTARGKGRTAEPEAMSHEKSFLVSGDNYPPPNPGYPGGPQPPMPPYAQPPYPGAPYPQPLGRPAR

SEQ ID NO: 1032750 - protein, 174 aa, Homo sapiens
MVISMGPTSPSCSGESMAISTRPSCPGNPLEVSTGPADPTGPRLMGPSCSCNPTGLRLTSPSCSRDPMGIELTCSACPRDPMGPVLREVPDCPGSWPEPVVIIPLPCTMGPVLREAPDCPGSSPEPIVTVPAPCRAVTNPPVLRRACLVALGPWVDGWSPPLVFSASSSGSRMS

SEQ ID NO: 1032751 - protein, 174 aa, Homo sapiens; identical to SEQ ID NO: 1032750

SEQ ID NO: 1032752 - protein, 174 aa, Homo sapiens; identical to SEQ ID NO: 1032750

SEQ ID NO: 1032753 - protein, 174 aa, Homo sapiens; identical to SEQ ID NO: 1032750

SEQ ID NO: 1032754 - protein, 174 aa, Homo sapiens; identical to SEQ ID NO: 1032750

SEQ ID NO: 1032755 - protein, 174 aa, Homo sapiens; identical to SEQ ID NO: 1032750

SEQ ID NO: 1032756 - protein, 174 aa, Homo sapiens; identical to SEQ ID NO: 1032750

SEQ ID NO: 1032757 - protein, 371 aa, Homo sapiens
MSHEKSFLVSGDNYPPPNPGYPGGPQPPMPPYAQPPYPGAPYPQPPFQPSPYGQPGYPHGPSPYPQGGYPQGPYPQGGYPQGPYPQEGYPQGPYPQGGYPQGPYPQSPFPPNPYGQPQVFPGQDPDSPQHGNYQEEGPPSYYDNQDFPATNWDDKSIRQAFIRKVFLVLTLQLSVTLSTVSVFTFVAEVKGFVRENVWTYYVSYAVFFISLIVLSCCGDFRRKHPWNLVALSVLTASLSYMVGMIASFYNTEAVIMAVGITTAVCFTVVIFSMQTRYDFTSCMGVLLVSMVVLFIFAILCIFIRNRILEIVYASLGALLFTCFLAVDTQLLLGNKQLSLSPEEYVFAALNLYTDIINIFLYILTIIGRAKE

SEQ ID NO: 1032758 - protein, 371 aa, Homo sapiens; identical to SEQ ID NO: 1032757

SEQ ID NO: 1032759 - protein, 131 aa, Homo sapiens
MVGMIASFYNTEAVIMAVGITTAVCFTVVIFSMQTRYDFTSCMGVLLVSMVVLFIFAILCIFIRNRILEIVYASLGALLFTCFLAVDTQLLLGNKQLSLSPEEYVFAALNLYTDIINIFLYILTIIGRAKE

SEQ ID NO: 1032760 - protein, 271 aa, Homo sapiens
RYPPDQPDSPPRLARQPQVFPGQDPDSPQHGNYQEEGPPSYYDNQDFPATNWDDKSIRQAFIRKVFLVLTLQLSVTLSTVSVFTFVAEVKGFVRENVWTYYVSYAVFFISLIVLSCCGDFRRKHPWNLVALSVLTASLSYMVGMIASFYNTEAVIMAVGITTAVCFTVVIFSMQTRYDFTSCMGVLLVSMVVLFIFAILCIFIRNRILEIVYASLGALLFTCFLAVDTQLLLGNKQLSLSPEEYVFAALNLYTDIINIFLYILTIIGRAKE

SEQ ID NO: 1032761 - protein, 174 aa, Homo sapiens; identical to SEQ ID NO: 1032750

SEQ ID NO: 1032762 - protein, 174 aa, Homo sapiens; identical to SEQ ID NO: 1032750

SEQ ID NO: 1032763 - protein, 161 aa, Homo sapiens
GTRKLAIIPTMYDRLAVRTDSCNLVPGVLSPEVPTTAEDNTEAVIMAVGITTAVCFTVVIFSMQTRYDFTSCMGVLLVSMVVLFIFAILCIFIRNRILEIVYASLGALLFTCFLAVDTQLLLGNKQLSLSPEEYVFAALNLYTDIINIFLYILTIIGRAKE

SEQ ID NO: 1032764 - protein, 125 aa, Homo sapiens
MAIGVGGRVAVLHRQGGAPGEIHALPVDRGVAAAEAAVEAVGADVRHCRCRRAVVQHLLHRAPLASLQQALPVQLILLLQQRVRHALHLRGRPGPGLNTLPTPWGRRRAELSLATRSPLLEESRV

SEQ ID NO: 1032765 - protein, 133 aa, Homo sapiens
MAIGVGGRVAVLHRQGGAPGEIHALPVDRGVAAAEAAVEAVGADVRHCRCRRAVVQHLLHRAPLASLQQALPVQLILLLQQRVRHALHTNDADAAAGSVQGVVEGPHHLLELPGVLCQTLQVVPGPLQRLPRH

SEQ ID NO: 1032766 - protein, 174 aa, Homo sapiens; identical to SEQ ID NO: 1032750

SEQ ID NO: 1032767 - protein, 174 aa, Homo sapiens; identical to SEQ ID NO: 1032750

SEQ ID NO: 1032768 - protein, 174 aa, Homo sapiens; identical to SEQ ID NO: 1032750

SEQ ID NO: 1032769 - protein, 174 aa, Homo sapiens; identical to SEQ ID NO: 1032750

SEQ ID NO: 1032770 - protein, 223 aa, Homo sapiens
MAIGVGGRVAVLHRQGGAPGEIHALPVDRGVAAAEAAVEAVGADVRHCRCRRAVVQHLLHRAPLASLQQALPVQLILLLQQRVRHALHTNDADAAAGSVQGVVEGPHHLLELPGVLCQTLQVVPGPLQRLPRQPWHRSRRARSSAGSVRRQGPTVSSWTWTSKAALSARSSSSTSCSKAECTTSWALPSVPPSGGSSASNGGCSSRERVRACRRAAASSCSAT

SEQ ID NO: 1032771 - protein, 388 aa, Homo sapiens
MRIRAWPPRGRTAEPEAMSHEKSFLVSGDNYPPPNPGYPGGPQPPMPPYAQPPYPGAPYPQPPFQPSPYGQPGYPHGPSPYPQGGYPQGPYPQGGYPQGPYPQEGYPQGPYPQGGYPQGPYPQSPFPPNPYGQPQVFPGQDPDSPQHGNYQEEGPPSYYDNQDFPATNWDDKSIRQAFIRKVFLVLTLQLSVTLSTVSVFTFVAEVKGFVRENVWTYYVSYAVFFISLIVLSCCGDFRRKHPWNLVALSVLTASLSYMVGMIASFYNTEAVIMAVGITTAVCFTVVIFSMQTRYDFTSCMGVLLVSMVVLFIFAILCIFIRNRILEIVYASLGALLFTCFLAVDTQLLLGNKQLSLSPEEYVFAALNLYTDIINIFLYILTIIGRAKE

SEQ ID NO: 1032772 - protein, 425 aa, Homo sapiens
PAAVFRAAGAGPAERPPSGCGCGRIGHHRAAAQRTPCVPACGARPPGRTAEPEAMSHEKSFLVSGDNYPPPNPGYPGGPQPPMPPYAQPPYPGAPYPQPPFQPSPYGQPGYPHGPSPYPQGGYPQGPYPQGGYPQGPYPQEGYPQGPYPQGGYPQGPYPQSPFPPNPYGQPQVFPGQDPDSPQHGNYQEEGPPSYYDNQDFPATNWDDKSIRQAFIRKVFLVLTLQLSVTLSTVSVFTFVAEVKGFVRENVWTYYVSYAVFFISLIVLSCCGDFRRKHPWNLVALSVLTASLSYMVGMIASFYNTEAVIMAVGITTAVCFTVVIFSMQTRYDFTSCMGVLLVSMVVLFIFAILCIFIRNRILEIVYASLGALLFTCFLAVDTQLLLGNKQLSLSPEEYVFAALNLYTDIINIFLYILTIIGRAKE

SEQ ID NO: 1032773 - protein, 371 aa, Homo sapiens; identical to SEQ ID NO: 1032757

SEQ ID NO: 1032774 - protein, 455 aa, Homo sapiens
PAAVFRAAGAGPAERPPSGCGCGRIGHHRAAAQRTPCVPACGARPPGRTAEPEAMSHEKSFLVSGDNYPPPNPGYPGGPQPPMPPYAQPPYPGAPYPQPPFQPSPYGQPGYPHGPSPYPQGGYPQGPYPQGGYPQGPYPQEGYPQGPYPQGGYPQGPYPQSPFPPNPYGQPQVFPGQDPDCESQEGRGGVAGRAGGGACELALTQPVCFSAPQHGNYQEEGPPSYYDNQDFPATNWDDKSIRQAFIRKVFLVLTLQLSVTLSTVSVFTFVAEVKGFVRENVWTYYVSYAVFFISLIVLSCCGDFRRKHPWNLVALSVLTASLSYMVGMIASFYNTEAVIMAVGITTAVCFTVVIFSMQTRYDFTSCMGVLLVSMVVLFIFAILCIFIRNRILEIVYASLGALLFTCFLAVDTQLLLGNKQLSLSPEEYVFAALNLYTDIINIFLYILTIIGRAKE

SEQ ID NO: 1032775 - protein, 266 aa, Homo sapiens
LRLVEAGFNRPRKVLPSYRPDSPQHGNYQEEGPPSYYDNQDFPATNWDDKSIRQAFIRKVFLVLTLQLSVTLSTVSVFTFVAEVKGFVRENVWTYYVSYAVFFISLIVLSCCGDFRRKHPWNLVALSVLTASLSYMVGMIASFYNTEAVIMAVGITTAVCFTVVIFSMQTRYDFTSCMGVLLVSMVVLFIFAILCIFIRNRILEIVYASLGALLFTCFLAVDTQLLLGNKQLSLSPEEYVFAALNLYTDIINIFLYILTIIGRAKE

SEQ ID NO: 1032776 - protein, 202 aa, Homo sapiens
GTRKLAIIPTMYDRLAVRTDSCNLVPGVLSPEVPTTAEDDERDEEDSIGDFRRKHPWNLVALSVLTASLSYMVGMIASFYNTEAVIMAVGITTAVCFTVVIFSMQTRYDFTSCMGVLLVSMVVLFIFAILCIFIRNRILEIVYASLGALLFTCFLAVDTQLLLGNKQLSLSPEEYVFAALNLYTDIINIFLYILTIIGRAKE

SEQ ID NO: 1032777 - protein, 136 aa, Homo sapiens
MAIGVGGRVAVLHRQGGAPGEIHALPVDRGVAAAEAAVEAVGADVRHCRCRRAVVQHLLHRAPLASLQQALPVQLILLLQQRVRHALHTNDADAAAGSVQGVVEGPHHLLELPGVLCQTLQVVPGPLQRLPRQGRA

SEQ ID NO: 1032778 - protein, 512 aa, Homo sapiens
MHTPDFAGPDDARAVDIMDICESILERKRHDSERSTCSILEQTDMEAVEALVCMSSWGQRSQKGDLLRIRPLTPVSDSGDVTTTVHMDAATPELPKDFHSLSTLCITPPQSPDLVEPSTRTPVSPQVTDSKACTATDVLQSSAVVARALSGGAERGLLGLEPVPSSPCRAKGTSVIRHTGESPAACFPTIQTPDCRLSDSREGEEQLLGHFETLQDTHLTDSLLSTNLVSCQPCLHKSGGLLLTDKGQQAGWPGAVQTCSPKNYENDLPRKTTPLISVSVPAPPVLCQMIPVTGQSSMLPAFLKPPPQLSVGTVRPILAQAAPAPQPVFVGPAVPQGAVMLVLPQGALPPPAPCAANVMAAGNTKLLPLAPAPVFITSSQNCVPQVDFSRRRNYVCSFPGCRKTYFKSSHLKAHLRTHTGEKPFNCSWDGCDKKFARSDELSRHRRTHTGEKKFVCPVCDRRFMRSDHLTKHARRHMTTKKIPGWQAEVGKLNRIASAESPGSPLVSMPASA

SEQ ID NO: 1032779 - protein, 136 aa, Homo sapiens
MDICESILERKRHDSERSTCSILEQTDMEAVEALVCMSSWGQRSQKGDLLRIRPLTPVSDSGDVTTTVHMDAATPELPKDFHSLSTLVRGGGREERFVHMTRVAELSVLKNLCRRFPGMLANKLRILSVWVLTEYE

SEQ ID NO: 1032780 - protein, 495 aa, Homo sapiens
MDICESILERKRHDSERSTCSILEQTDMEAVEALVCMSSWGQRSQKGDLLRIRPLTPVSDSGDVTTTVHMDAATPELPKDFHSLSTLCITPPQSPDLVEPSTRTPVSPQVTDSKACTATDVLQSSAVVARALSGGAERGLLGLEPVPSSPCRAKGTSVIRHTGESPAACFPTIQTPDCRLSDSREGEEQLLGHFETLQDTHLTDSLLSTNLVSCQPCLHKSGGLLLTDKGQQAGWPGAVQTCSPKNYENDLPRKTTPLISVSVPAPPVLCQMIPVTGQSSMLPAFLKPPPQLSVGTVRPILAQAAPAPQPVFVGPAVPQGAVMLVLPQGALPPPAPCAANVMAAGNTKLLPLAPAPVFITSSQNCVPQVDFSRRRNYVCSFPGCRKTYFKSSHLKAHLRTHTGEKPFNCSWDGCDKKFARSDELSRHRRTHTGEKKFVCPVCDRRFMRSDHLTKHARRHMTTKKIPGWQAEVGKLNRIASAESPGSPLVSMPASA

SEQ ID NO: 1032781 - protein, 414 aa, Homo sapiens
MVLFFKCITPPQSPDLVEPSTRTPVSPQVTDSKACTATDVLQSSAVVARALSGGAERGLLGLEPVPSSPCRAKGTSVIRHTGESPAACFPTIQTPDCRLSDSREGEEQLLGHFETLQDTHLTDSLLSTNLVSCQPCLHKSGGLLLTDKGQQAGWPGAVQTCSPKNYENDLPRKTTPLISVSVPAPPVLCQMIPVTGQSSMLPAFLKPPPQLSVGTVRPILAQAAPAPQPVFVGPAVPQGAVMLVLPQGALPPPAPCAANVMAAGNTKLLPLAPAPVFITSSQNCVPQVDFSRRRNYVCSFPGCRKTYFKSSHLKAHLRTHTGEKPFNCSWDGCDKKFARSDELSRHRRTHTGEKKFVCPVCDRRFMRSDHLTKHARRHMTTKKIPGWQAEVGKLNRIASAESPGSPLVSMPASA

SEQ ID NO: 1032782 - protein, 440 aa, Homo sapiens
MHTPDFAGPDDARAVDIMDICESILERKRHDSERSTCSILEQTDMEAVEALVCMSSWGQRSQKGDLLRIRPLTPVSDSGDVTTTVHMDAATPELPKDFHSLSTLCITPPQSPDLVEPSTRTPVSPQVTDSKACTATDVLQSSAVVARALSGGAERGLLGLEPVPSSPCRAKGTSVIRHTGESPAACFPTIQTPDCRLSDSREGEEQLLGHFETLQDTHLTDSLLSTNLVSCQPCLHKSGGLLLTDKGQQAGWPGAVQTCSPKNYENDLPRKTTPLISVSVPAPPVLCQMIPVTGQSSMLPAFLKPPPQLSVGTVRPILAQAAPAPQPVFVGPAVPQGAVMLVLPQGALPPPAPCAANVMAAGNTKLLPLAPAPVFITSSQNCVPQVDFSRRRNYVCSFPGCRKTYFKSSHLKAHLRTHTGEKPFNCSWDGCDKKVCVPGV

SEQ ID NO: 1032783 - protein, 512 aa, Homo sapiens; identical to SEQ ID NO: 1032778

SEQ ID NO: 1032784 - protein, 512 aa, Homo sapiens; identical to SEQ ID NO: 1032778

SEQ ID NO: 1032785 - protein, 115 aa, Homo sapiens
SGSLGPGRRRRGLRRRREAVWFEVVNMDFSRLHMYSPPQCVPENTGYTYALSSSYSSDALDFETEHKLDPVFDSPRMSRRSLRLATTACTLGDGEAVGADSGTSSAVSLKNRAAR

SEQ ID NO: 1032786 - protein, 367 aa, Homo sapiens
SGSLGPGRRRRGLRRRREAVWFEVVNMDFSRLHMYSPPQCVPENTGYTYALSSSYSSDALDFETEHKLDPVFDSPRMSRRSLRLATTACTLGDGEAVGADSGTSSAVSLKNRAARTTKQRRSTNKSAFSINHVSRQVTSSGVSHGGTVSLQDAVTRRPPVLDESWIREQTTVDHFWGLDDDGDLKGGNKAAIQGNGDVGAAAATAHNGFSCSNCSMLSERKDVLTAHPAAPGPVSRVYSRDRNQKCGASFYVNRILWLARYTASSFSSFLVQLFQVVLMKLSYESENYKLKTHESKDCESESYKSKSHESKAHASYYGRMNVREVLREDGHLSVNGEALCKYGFVFLWASVVELVPHAVMLGTSSRE

SEQ ID NO: 1032787 - protein, 942 aa, Homo sapiens
SGSLGPGRRRRGLRRRREAVWFEVVNMDFSRLHMYSPPQCVPENTGYTYALSSSYSSDALDFETEHKLDPVFDSPRMSRRSLRLATTACTLGDGEAVGADSGTSSAVSLKNRAARTTKQRRSTNKSAFSINHVSRQVTSSGVSHGGTVSLQDAVTRRPPVLDESWIREQTTVDHFWGLDDDGDLKGGNKAAIQGNGDVGAAAATAHNGFSCSNCSMLSERKDVLTAHPAAPGPVSRVYSRDRNQKCGASFYVNRILWLARYTASSFSSFLVQLFQVVLMKLSYESENYKLKTHESKDCESESYKSKSHESKAHASYYGRMNVREVLREDGHLSVNGEALCDDCKGKRHLDAHTAAHSQSPRLPGRAGTLWHIWACAGYFLLQILRRIGAVGQAVSRTAWSALWLAVVAPGKAASGVFWWLGIGWYQFVTLISWLNVFLLTRCLRNICKFLVLLIPLFLLLAGLSLRGQGNFFSFLPVLNWASMHRTQRVDDPQDVFKPTTSRLKQPLQGDSEAFPWHWMSGVEQQVASLSGQCHHHGENLRELTTLLQKLQARVDQMEGGAAGPSASVRDAVGQPPRETDFMAFHQEHEVRMSHLEDILGKLREKSEAIQKELEQTKQKTISAVGEQLLPTVEHLQLELDQLKSELSSWRHVKTGCETVDAVQERVDVQVREMVKLLFSEDQQGGSLEQLLQRFSSQFVSKGDLQTMLRDLQLQILRNVTHHVSVTKQLPTSEAVVSAVSEAGASGITEAQARAIVNSALKLYSQDKTGMVDFALESGGGSILSTRCSETYETKTALMSLFGIPLWYFSQSPRVVIQPDIYPGNCWAFKGSQGYLVVRLSMMIHPAAFTLEHIPKTLSPTGNISSAPKDFAVYGLENEYQEEGQLLGQFTYDQDGESLQMFQALKRPDDTAFQIVELRIFSNWGHPEYTCLYRFRVHGEPVK

SEQ ID NO: 1032788 - protein, 989 aa, Homo sapiens
SGSLGPGRRRRGLRRRREAVWFEVVNMDFSRLHMYSPPQCVPENTGYTYALSSSYSSDALDFETEHKLDPVFDSPRMSRRSLRLATTACTLGDGEAVGADSGTSSAVSLKNRAARTTKQRRSTNKSAFSINHVSRQVTSSGVSHGGTVSLQDAVTRRPPVLDESWIREQTTVDHFWGLDDDGDLKGGNKAAIQGNGDVGAAAATAHNGFSCSNCSMLSERKDVLTAHPAAPGPVSRVYSRDRNQKCGASFYVNRILWLARYTASSFSSFLVQLFQVVLMKLSYESENYKLKTHESKDCESESYKSKSHESKAHASYYGRMNVREVLREDGHLSVNGEALCDDCKGKRHLDAHTAAHSQSPRLPGRAGTLWHIWACAGYFLLQILRRIGAVGQAVSRTAWSALWLAVVAPGKAASGVFWWLGIGWYQFVTLISWLNVFLLTRCLRNICKFLVLLIPLFLLLGKSNLAELPPMAKRYTHMCNLVEKNERVSPCLRSVVYLCVCGGSSLLAGLSLRGQGNFFSFLPVLNWASMHRTQRVDDPQDVFKPTTSRLKQPLQGDSEAFPWHWMSGVEQQVASLSGQCHHHGENLRELTTLLQKLQARVDQMEGGAAGPSASVRDAVGQPPRETDFMAFHQEHEVRMSHLEDILGKLREKSEAIQKELEQTKQKTISAVGEQLLPTVEHLQLELDQLKSELSSWRHVKTGCETVDAVQERVDVQVREMVKLLFSEDQQGGSLEQLLQRFSSQFVSKGDLQTMLRDLQLQILRNVTHHVSVTKQLPTSEAVVSAVSEAGASGITEAQARAIVNSALKLYSQDKTGMVDFALESGGGSILSTRCSETYETKTALMSLFGIPLWYFSQSPRVVIQPDIYPGNCWAFKGSQGYLVVRLSMMIHPAAFTLEHIPKTLSPTGNISSAPKDFAVYGLENEYQEEGQLLGQFTYDQDGESLQMFQALKRPDDTAFQIVELRIFSNWGHPEYTCLYRFRVHGEPVK

SEQ ID NO: 1032789 - protein, 811 aa, Homo sapiens
SGSLGPGRRRRGLRRRREAVWFEVVNMDFSRLHMYSPPQCVPENTGYTYALSSSYSSDALDFETEHKLDPVFDSPRMSRRSLRLATTACTLGDGEAVGADSGTSSAVSLKNRAARTTKQRRSTNKSAFSINHVSRQVTSSGVSHGGTVSLQDAVTRRPPVLDESWIREQTTVDHFWGLDDDGDLKGGNKAAIQGNGDVGAAAATAHNGFSCSNCSMLSERKDVLTAHPAAPGPVSRVYSRDRNQKCYFLLQILRRIGAVGQAVSRTAWSALWLAVVAPGKAASGVFWWLGIGWYQFVTLISWLNVFLLTRCLRNICKFLVLLIPLFLLLAGLSLRGQGNFFSFLPVLNWASMHRTQRVDDPQDVFKPTTSRLKQPLQGDSEAFPWHWMSGVEQQVASLSGQCHHHGENLRELTTLLQKLQARVDQMEGGAAGPSASVRDAVGQPPRETDFMAFHQEHEVRMSHLEDILGKLREKSEAIQKELEQTKQKTISAVGEQLLPTVEHLQLELDQLKSELSSWRHVKTGCETVDAVQERVDVQVREMVKLLFSEDQQGGSLEQLLQRFSSQFVSKGDLQTMLRDLQLQILRNVTHHVSVTKQLPTSEAVVSAVSEAGASGITEAQARAIVNSALKLYSQDKTGMVDFALESGGGSILSTRCSETYETKTALMSLFGIPLWYFSQSPRVVIQPDIYPGNCWAFKGSQGYLVVRLSMMIHPAAFTLEHIPKTLSPTGNISSAPKDFAVYGLENEYQEEGQLLGQFTYDQDGESLQMFQALKRPDDTAFQIVELRIFSNWGHPEYTCLYRFRVHGEPVK

SEQ ID NO: 1032790 - protein, 752 aa, Homo sapiens
MDFSRLHMYSPPQCVPENTGYTYALSSSYSSDALDFETEHKLDPVFDSPRMSRRSLRLATTACTLGDGEAVGADSGTSSAVSLKNRAARTTKQRRSTNKSAFSINHVSRQVTSSGVSHGGTVSLQDAVTRRPPVLDESWIREQTTVDHFWGLDDDGDLKGGNKAAIQGNGDVGAAAATAHNGFSCSNCSMLSERKDVLTAHPAAPGPVSRVYSRDRNQKWKAASGVFWWLGIGWYQFVTLISWLNVFLLTRCLRNICKFLVLLIPLFLLLAGLSLRGQGNFFSFLPVLNWASMHRTQRVDDPQDVFKPTTSRLKQPLQGDSEAFPWHWMSGVEQQVASLSGQCHHHGENLRELTTLLQKLQARVDQMEGGAAGPSASVRDAVGQPPRETDFMAFHQEHEVRMSHLEDILGKLREKSEAIQKELEQTKQKTISAVGEQLLPTVEHLQLELDQLKSELSSWRHVKTGCETVDAVQERVDVQVREMVKLLFSEDQQGGSLEQLLQRFSSQFVSKGDLQTMLRDLQLQILRNVTHHVSVTKQLPTSEAVVSAVSEAGASGITEAQARAIVNSALKLYSQDKTGMVDFALESGGGSILSTRCSETYETKTALMSLFGIPLWYFSQSPRVVIQPDIYPGNCWAFKGSQGYLVVRLSMMIHPAAFTLEHIPKTLSPTGNISSAPKDFAVYGLENEYQEEGQLLGQFTYDQDGESLQMFQALKRPDDTAFQIVELRIFSNWGHPEYTCLYRFRVHGEPVK

SEQ ID NO: 1032791 - protein, 942 aa, Homo sapiens; identical to SEQ ID NO: 1032787

SEQ ID NO: 1032792 - protein, 685 aa, Homo sapiens
SGSLGPGRRRRGLRRRREAVWFEVVNMDFSRLHMYSPPQCVPENTGYTYALSSSYSSDALDFETEHKLDPVFDSPRMSRRSLRLATTACTLGDGEAVGADSGTSSAVSLKNRAARTTKQRRSTNKSAFSINHVSRQVTSSGVSHGGTVSLQDAVTRRPPVLDESWIREQTTVDHFWGLDDDGDLKGGNICKFLVLLIPLFLLLAGLSLRGQGNFFSFLPVLNWASMHRTQRVDDPQDVFKPTTSRLKQPLQGDSEAFPWHWMSGVEQQVASLSGQCHHHGENLRELTTLLQKLQARVDQMEGGAAGPSASVRDAVGQPPRETDFMAFHQEHEVRMSHLEDILGKLREKSEAIQKELEQTKQKTISAVGEQLLPTVEHLQLELDQLKSELSSWRHVKTGCETVDAVQERVDVQVREMVKLLFSEDQQGGSLEQLLQRFSSQFVSKGDLQTMLRDLQLQILRNVTHHVSVTKQLPTSEAVVSAVSEAGASGITEAQARAIVNSALKLYSQDKTGMVDFALESGGGSILSTRCSETYETKTALMSLFGIPLWYFSQSPRVVIQPDIYPGNCWAFKGSQGYLVVRLSMMIHPAAFTLEHIPKTLSPTGNISSAPKDFAVYGLENEYQEEGQLLGQFTYDQDGESLQMFQALKRPDDTAFQIVELRIFSNWGHPEYTCLYRFRVHGEPVK

SEQ ID NO: 1032793 - protein, 924 aa, Homo sapiens
SGSLGPGRRRRGLRRRREAVWFEVVNMDFSRLHMYSPPQCVPENTGYTYALSSSYSSDALDFETEHKLDPVFDSPRMSRRSLRLATTACTLGDGEAVGADSGTSSAVSLKNRAARTTKQRRSTNKSAFSINHVSRQVTSSGVSHGGTVSLQDAVTRRPPVLDESWIREQTTVDHFWGLDDDGDLKGGNKAAIQGNGDVGAAAATAHNGFSCSNCSMLSERKDVLTAHPAAPGPVSRVYSRDRNQKCGASFYVNRILWLARYTASSFSSFLVQLFQVVLMKLSYESENYKLKTHESKDCESESYKSKSHESKAHASYYGRMNVREVLREDGHLSVNGEALCDDCKGKRHLDAHTAAHSQSPRLPGRAGTLWHIWACAGYFLLQILRRIGAVGQAVSRTAWSALWLAVVAPGKAASGVFWWLGIGWYQFVTLISWLNVFLLTRCLRNICKFLVLLIPLFLLLAGLSLRGQGNFFSFLPVLNWASMHRTQRVDDPQDVFKPTTSRLKQPLQGDSEAFPWHWMSGVEQQVASLSGQCHHHGENLRELTTLLQKLQARVDQMEGGAAGPSASVRDAVGQPPRETDFMAFHQEHEVRMSHLEDILGKLREKSEAIQKELEQTKQKTISAVGEQLLPTVEHLQLELDQLKSELSSWRHVKTGCETVDAVQERVDVQVREMVKLLFSEDQQGGSLEQLLQRFSSQFVSKGDLQTMLRDLQLQILRNVTHHVSVTKQLPTSEAVVSAVSEAGASGITEAQARAIVNSALKLYSQDKTGMVDFALESGGGSILSTRCSETYETKTALMSLFGIPLWYFSQSPRVVIQPDIYPGNCWAFKGSQGYLVVRLSMMIHPAAFTLEHIPKTLSPTGNISSAPKDFAVYGLENEYQEEGQLLGQFTYDQDGESLQMFQALWGHPEYTCLYRFRVHGEPVK

SEQ ID NO: 1032794 - protein, 942 aa, Homo sapiens; identical to SEQ ID NO: 1032787

SEQ ID NO: 1032795 - protein, 920 aa, Homo sapiens
SGSLGPGRRRRGLRRRREAVWFEVVNMDFSRLHMYSPPQCVPENTGYTYALSSSYSSDALDFETEHKLDPVFDSPRMSRRSLRLATTACTLGDGEAVGADSGTSSAVSLKNRAARTTKQRRSTNKSAFSINHVSRQVTSSGVSHGGTVSLQDAVTRRPPVLDESWIREQTTVDHFWGLDDDGDLKGGNKAAIQGNGDVGAAAATAHNGFSCSNCSMLSERKDVLTAHPAAPGPVSRVYSRDRNQKCGASFYVNRILWLARYTASSFSSFLVQLFQVVLMKLSYESENYKLKTHESKDCESESYKSKSHESKAHASYYGRMNVREVLREDGHLSVNGEALCDDCKGKRHLDAHTAAHSQSPRLPGRAGTLWHIWACAGYFLLQILRRIGAVGQAVSRTAWSALWLAVVAPGKAASGVFWWLGIGWYQFVTLISWLNVFLLTRCLRNICKFLVLLIPLFLLLAGLSLRGQGNFFSFLPVLNWASMHRTQRVDDPQDVFKPTTSRLKQPLQGDSEAFPWHWMSGVEQQVASLSGQCHHHGENLRELTTLLQKLQARVDQMEGGAAGPSASVRDAVGQPPRETDFMAFHQEHEVRMSHLEDILGKLREKSEAIQKELEQTKQKTISAVGEQLLPTVEHLQLELDQLKSELSSWRHVKTGCETVDAVQERVDVQVREMVKLLFSEDQQGGSLEQLLQRFSSQFVSKGDLQTMLRDLQLQILRNVTHHVSVTKQLPTSEAVVSAVSEAGASGITEAQARAIVNSALKLYSQDKTGMVDFALESGGGSILSTRCSETYETKTALMSLFGIPLWYFSQSPRVVIQPDIYPGNCWAFKGSQGYLVVRLSMMIHPAAFTLEHIPKTLSPTGNISSAPKDFAVYGLAGEALQMLQAPEGPPHTFLGGLRFFYLGHLRYRLVGAYGDLQGDT

SEQ ID NO: 1032796 - protein, 873 aa, Homo sapiens
SGSLGPGRRRRGLRRRREAVWFEVVNMDFSRLHMYSPPQCVPENTGYTYALSSSYSSDALDFETEHKLDPVFDSPRMSRRSLRLATTACTLGDGEAVGADSGTSSAVSLKNRAARTTKQRRSTNKSAFSINHVSRQVTSSGVSHGGTVSLQDAVTRRPPVLDESWIREQTTVDHFWGLDDDGDLKGGNKAAIQGNGDVGAAAATAHNGFSCSNCSMLSERKDVLTAHPAAPGPVSRVYSRDRNQKCGASFYVNRILWLARYTASSFSSFLVQLFQVVLMKLSYESENYKLKTHESKDCESESYKSKSHESKAHASYYGRMNVREVLREDGHLSVNGEALCDDCKGKRHLDAHTAAHSQSPRLPGRAGTLWHIWACAGYFLLQILRRIGAVGQAVSRTAWSALWLAVVAPGKAASGVFWWLGIGWYQFVTLISWLNVFLLTRCLRNICKFLVLLIPLFLLLAGLSLRGQGNFFSFLPVLNWASMHRTQRVDDPQDVFKPTTSRLKQPLQGDSEAFPWHWMSGVEQQVASLSGQCHHHGENLRELTTLLQKLQARVDQMEGGAAGPSASVRDAVGQPPRETDFMAFHQEHEVRMSHLEDILGKLREKSEAIQKELEQTKQKTISAVGEQLLPTVEHLQLELDQLKSELSSWRHVKTGCETVDAVQERVDVQVREMVKLLFSEDQQGGSLEQLLQRFSSQFVSKGDLQTMLRDLQLQILRNVTHHVSVTKQLPTSEAVVSAVSEAGASGITEAQARAIVNSALKLYSQDKTGMVDFALESGGGSILSTRCSETYETKTALMSLFGIPLWYFSQSPRVVIQPDIYPGNCWAFKGSQGYLVVRLSMMIHPAAFTLEHIPKSGSAVFVKCSIFSSKLEV

SEQ ID NO: 1032797 - protein, 583 aa, Homo sapiens
SGSLGPGRRRRGLRRRREAVWFEVVNMDFSRLHMYSPPQCVPENTGYTYALSSSYSSDALDFETEHKLDPVFDSPRMSRRSLRLATTACTLGDGEAVGADSGTSSAVSLKNRAARTTKQRRSTNKSAFSINHVSRQVTSSGVSHGGTVSLQDAVTRRPPVLDESWIREQTTVDHFWGLDDDGDLKGGNKAAIQGNGDVGAAAATAHNGFSCSNCSMLSERKDVLTAHPAAPGPVSRVYSRDRNQKCGASFYVNRILWLARYTASSFSSFLVQLFQVVLMKLSYESENYKLKTHESKDCESESYKSKSHESKAHASYYGRMNVREVLREDGHLSVNGEALCDDCKGKRHLDAHTAAHSQSPRLPGRAGTLWHIWACAGYFLLQILRRIGAVGQAVSRTAWSALWLAVVAPGKAASGVFWWLGIGWYQFVTLISWLNVFLLTRCLRNICKFLVLLIPLFLLLAGLSLRGQGNFFSFLPVLNWASMHRTQRVDDPRGRERVTGALAPPVGCSLPLQVQRGQQQEKRVEHVALRHSLFLTGSSLHLHFLNKGAKQRKLRVWRVLDALVFSLALALLKDFWRADNFIC

SEQ ID NO: 1032798 - protein, 745 aa, Homo sapiens
RVSRAWAAQTRPEAAARGSSSYSSDALDFETEHKLDPVFDSPRMSRRSLRLATTACTLGDGEAVGADSGTSSAVSLKNRAARTTKQRRSTNKSAFSINHVSRQVTSSGVSHGGTVSLQDAVTRRPPVLDESWIREQTTVDHFWGLDDDGDLKGGNKAAIQGNGDVGAAAATAHNGFSCSNCSMLSERKDVLTAHPAAPGPVSRVYSRDRNQKWKAASGVFWWLGIGWYQFVTLISWLNVFLLTRCLRNICKFLVLLIPLFLLLAGLSLRGQGNFFSFLPVLNWASMHRTQRVDDPQDVFKPTTSRLKQPLQGDSEAFPWHWMSGVEQQVASLSGQCHHHGENLRELTTLLQKLQARVDQMEGGAAGPSASVRDAVGQPPRETDFMAFHQEHEVRMSHLEDILGKLREKSEAIQKELEQTKQKTISAVGEQLLPTVEHLQLELDQLKSELSSWRHVKTGCETVDAVQERVDVQVREMVKLLFSEDQQGGSLEQLLQRFSSQFVSKGDLQTMLRDLQLQILRNVTHHVSVTKQLPTSEAVVSAVSEAGASGITEAQARAIVNSALKLYSQDKTGMVDFALESGGGSILSTRCSETYETKTALMSLFGIPLWYFSQSPRVVIQPDIYPGNCWAFKGSQGYLVVRLSMMIHPAAFTLEHIPKTLSPTGNISSAPKDFAVYGLENEYQEEGQLLGQFTYDQDGESLQMFQALKRPDDTAFQIVELRIFSNWGHPEYTCLYRFRVHGEPVK

SEQ ID NO: 1032799 - protein, 139 aa, Homo sapiens
PGTVLSQILMCWDYEAEQLHPTQNYFKQANLCIVWATHTIQPEGGGPFTSLLVARALSAAFTCVVGAIGCGNSVEVASLAHPLIMLTSSGCEKHLSLASVSSLSLFCVCCSSCQLLWENECERGSQRGWPPQCKWGSAV

SEQ ID NO: 1032800 - protein, 1049 aa, Homo sapiens
SGSLGPGRRRRGLRRRREAVWFEVVNMDFSRLHMYSPPQCVPENTGYTYALSSSYSSDALDFETEHKLDPVFDSPRMSRRSLRLATTACTLGDGEAVGADSGTSSAVSLKNRAARTTKQRRSTNKSAFSINHVSRQVTSSGVSHGGTVSLQDAVTRRPPVLDESWIREQTTVDHFWGLDDDGDLKGGNKAAIQGNGDVGAAAATAHNGFSCSNCSMLSERKDVLTAHPAAPGPVSRVYSRDRNQKCGASFYVNRILWLARYTASSFSSFLVQLFQVVLMKLSYESENYKLKTHESKDCESESYKSKSHESKAHASYYGRMNVREVLREDGHLSVNGEALCKYGFVFLWASVVELVPHAVMLGTSSERMNGPCDMVVLTDDDGLLELLLKPSPQKLIATRSHLLCLLTVSCVIEFPSFYRLPLLCTAEMDRVCCVNPPHSLPVTTPAGDDCKGKRHLDAHTAAHSQSPRLPGRAGTLWHIWACAGYFLLQILRRIGAVGQAVSRTAWSALWLAVVAPGKAASGVFWWLGIGWYQFVTLISWLNVFLLTRCLRNICKFLVLLIPLFLLLAGLSLRGQGNFFSFLPVLNWASMHRTQRVDDPQDVFKPTTSRLKQPLQGDSEAFPWHWMSGVEQQVASLSGQCHHHGENLRELTTLLQKLQARVDQMEGGAAGPSASVRDAVGQPPRETDFMAFHQEHEVRMSHLEDILGKLREKSEAIQKELEQTKQKTISAVGEQLLPTVEHLQLELDQLKSELSSWRHVKTGCETVDAVQERVDVQVREMVKLLFSEDQQGGSLEQLLQRFSSQFVSKGDLQTMLRDLQLQILRNVTHHVSVTKQLPTSEAVVSAVSEAGASGITEAQARAIVNSALKLYSQDKTGMVDFALESGGGSILSTRCSETYETKTALMSLFGIPLWYFSQSPRVVIQPDIYPGNCWAFKGSQGYLVVRLSMMIHPAAFTLEHIPKTLSPTGNISSAPKDFAVYGLENEYQEEGQLLGQFTYDQDGESLQMFQALKRPDDTAFQIVELRIFSNWGHPEYTCLYRFRVHGEPVK

SEQ ID NO: 1032801 - protein, 909 aa, Homo sapiens
RVSRAWAAQTRPEAAARGSSSYSSDALDFETEHKLDPVFDSPRMSRRSLRLATTACTLGDGEAVGADSGTSSAVSLKNRAARTTKQRRSTNKSAFSINHVSRQVTSSGVSHGGTVSLQDAVTRRPPVLDESWIREQTTVDHFWGLDDDGDLKGGNKAAIQGNGDVGAAAATAHNGFSCSNCSMLSERKDVLTAHPAAPGPVSRVYSRDRNQKCGASFYVNRILWLARYTASSFSSFLVQLFQVVLMKLSYESENYKLKTHESKDCESESYKSKSHESKAHASYYGRMNVREVLREDGHLSVNGEALCDDCKGKRHLDAHTAAHSQSPRLPGRAGTLWHIWACAGYFLLQILRRIGAVGQAVSRTAWSALWLAVVAPGKAASGVFWWLGIGWYQFVTLISWLNVFLLTRCLRNICKFLVLLIPLFLLLAGLSLRGQGNFFSFLPVLNWASMHRTQRVDDPQDVFKPTTSRLKQPLQGDSEAFPWHWMSGVEQQVASLSGQCHHHGENLRELTTLLQKLQARVDQMEGGAAGPSASVRDAVGQPPRETDFMAFHQEHEVRMSHLEDILGKLREKSEAIQKELEQTKQKTISAVGEQLLPTVEHLQLELDQLKSELSSWRHVKTGCETVDAVQERVDVQVREMVKLLFSEDQQGGSLEQLLQRFSSQFVSKGDLQTMLRDLQLQILRNVTHHVSVTKQLPTSEAVVSAVSEAGASGITEAQARAIVNSALKLYSQDKTGMVDFALESGGGSILSTRCSETYETKTALMSLFGIPLWYFSQSPRVVIQPDIYPGNCWAFKGSQGYLVVRLSMMIHPAAFTLEHIPKTLSPTGNISSAPKDFAVYGLENEYQEEGQLLGQFTYDQDGESLQMFQALKRPDDTAFQIVELRIFSNWGHPEYTCLYRFRVHGEPVK

SEQ ID NO: 1032802 - protein, 806 aa, Homo sapiens
SGSLGPGRRRRGLRRRREAVWFEVVNMDFSRLHMYSPPQCVPENTGYTYALSSSYSSDALDFETEHKLDPVFDSPRMSRRSLRLATTACTLGDGEAVGADSGTSSAVSLKNRAARTTKQRRSTNKSAFSINHVSRQVTSSGVSHGGTVSLQDAVTRRPPVLDESWIREQTTVDHFWGLDDDGDLKGGNKAAIQGNGDVGAAAATAHNGFSCSNCSMLSERKDVLTAHPAAPGPVSRVYSRDRNQKSHASYYGRMNVREVLREDGHLSVNGEALWKAASGVFWWLGIGWYQFVTLISWLNVFLLTRCLRNICKFLVLLIPLFLLLAGLSLRGQGNFFSFLPVLNWASMHRTQRVDDPQDVFKPTTSRLKQPLQGDSEAFPWHWMSGVEQQVASLSGQCHHHGENLRELTTLLQKLQARVDQMEGGAAGPSASVRDAVGQPPRETDFMAFHQEHEVRMSHLEDILGKLREKSEAIQKELEQTKQKTISAVGEQLLPTVEHLQLELDQLKSELSSWRHVKTGCETVDAVQERVDVQVREMVKLLFSEDQQGGSLEQLLQRFSSQFVSKGDLQTMLRDLQLQILRNVTHHVSVTKQLPTSEAVVSAVSEAGASGITEAQARAIVNSALKLYSQDKTGMVDFALESGGGSILSTRCSETYETKTALMSLFGIPLWYFSQSPRVVIQPDIYPGNCWAFKGSQGYLVVRLSMMIHPAAFTLEHIPKTLSPTGNISSAPKDFAVYGLENEYQEEGQLLGQFTYDQDGESLQMFQALKRPDDTAFQIVELRIFSNWGHPEYTCLYRFRVHGEPVK

SEQ ID NO: 1032803 - protein, 709 aa, Homo sapiens
SGSLGPGRRRRGLRRRREAVWFEVVNMDFSRLHMYSPPQCVPENTGYTYALSSSYSSDALDFETEHKLDPVFDSPRMSRRSLRLATTACTLGDGEAVGADSGTSSAVSLKNRAARTTKQRRSTNKSAFSINHVSRQVTSSGVSHGGTVSLQDAVTRRPPVLDESWIREQTTVDHFWGKAASGVFWWLGIGWYQFVTLISWLNVFLLTRCLRNICKFLVLLIPLFLLLAGLSLRGQGNFFSFLPVLNWASMHRTQRVDDPQDVFKPTTSRLKQPLQGDSEAFPWHWMSGVEQQVASLSGQCHHHGENLRELTTLLQKLQARVDQMEGGAAGPSASVRDAVGQPPRETDFMAFHQEHEVRMSHLEDILGKLREKSEAIQKELEQTKQKTISAVGEQLLPTVEHLQLELDQLKSELSSWRHVKTGCETVDAVQERVDVQVREMVKLLFSEDQQGGSLEQLLQRFSSQFVSKGDLQTMLRDLQLQILRNVTHHVSVTKQLPTSEAVVSAVSEAGASGITEAQARAIVNSALKLYSQDKTGMVDFALESGGGSILSTRCSETYETKTALMSLFGIPLWYFSQSPRVVIQPDIYPGNCWAFKGSQGYLVVRLSMMIHPAAFTLEHIPKTLSPTGNISSAPKDFAVYGLENEYQEEGQLLGQFTYDQDGESLQMFQALKRPDDTAFQIVELRIFSNWGHPEYTCLYRFRVHGEPVK

SEQ ID NO: 1032804 - protein, 680 aa, Homo sapiens
SGSLGPGRRRRGLRRRREAVWFEVVNMDFSRLHMYSPPQCVPENTGYTYALSSSYSSDALDFETEHKLDPVFDSPRMSRRSLRLATTACTLGDGEAVGADSGTSSAVSLKNRAARTTKQRRSTNKSAFSINHVSRQVTSSGVSHGGTVSLQDAVTRRPPVLDESWIREQTTVDHFWGKAASGVFWWLGIGWYQFVTLISWLNVFLLTRCLRNICKFLVLLIPLFLLLAGLSLRGQGNFFSFLPVLNWASMHRTQRVDDPQDVFKPTTSRLKQPLQGDSEAFPWHWMSGVEQQVASLSGQCHHHGENLRELTTLLQKLQARVDQMEGGAAGPSASVRDAVGQPPREAIQKELEQTKQKTISAVGEQLLPTVEHLQLELDQLKSELSSWRHVKTGCETVDAVQERVDVQVREMVKLLFSEDQQGGSLEQLLQRFSSQFVSKGDLQTMLRDLQLQILRNVTHHVSVTKQLPTSEAVVSAVSEAGASGITEAQARAIVNSALKLYSQDKTGMVDFALESGGGSILSTRCSETYETKTALMSLFGIPLWYFSQSPRVVIQPDIYPGNCWAFKGSQGYLVVRLSMMIHPAAFTLEHIPKTLSPTGNISSAPKDFAVYGLENEYQEEGQLLGQFTYDQDGESLQMFQALKRPDDTAFQIVELRIFSNWGHPEYTCLYRFRVHGEPVK

SEQ ID NO: 1032805 - protein, 942 aa, Homo sapiens; identical to SEQ ID NO: 1032787

SEQ ID NO: 1032806 - protein, 895 aa, Homo sapiens
SGSLGPGRRRRGLRRRREAVWFEVVNMDFSRLHMYSPPQCVPENTGYTYALSSSYSSDALDFETEHKLDPVFDSPRMSRRSLRLATTACTLGDGEAVGADSGTSSAVSLKNRAARTTKQRRSTNKSAFSINHVSRQVTSSGVSHGGTVSLQDAVTRRPPVLDESWIREQTTVDHFWGLDDDGDLKGGNKAAIQGNGDVGAAAATAHNGFSCSNCSMLSERKDVLTAHPAAPGPVSRVYSRDRNQKCGASFYVNRILWLARYTASSFSSFLVQLFQVVLMKLSYESENYKLKTHESKDCESESYKSKSHESKAHASYYGRMNVREVLREDGHLSVNGEALCDDCKGKRHLDAHTAAHSQSPRLPGRAGTLWHIWACAGYFLLQILRRIGAVGQAVSRTAWSALWLAVVAPGKAASGVFWWLGIGWYQFVTLISWLNVFLLTRCLRNICKFLVLLIPLFLLLAGLSLRGQGNFFSFLPVLNWASMHRTQRVDDPQDVFKPTTSRLKQPLQGDSEAFPWHWMSGVEQQVASLSGQCHHHGENLRELTTLLQKLQARVDQMEGGAAGPSASVRDAVGQPPRETDFMAFHQEHEVRMSHLEDILGKLREKSEAIQKELEQTKQKTISAVGEQLLPTVEHLQLELDQLKSELSSWRHVKTGCETVDAVQERVDVQVREMVKLLFSEDQQGGSLEQLLQRFSSQFVSKGDLQTMLRDLQLQILRNVTHHVSVTKQLPTSEAVVSAVSEAGASGITEAQARAIVNSALKLYSQDKTGMVDFALESGGGSILSTRCSETYETKTALMSLFGIPLWYFSQSPRVVIQPDIYPGNCWAFKGSQGYLVVRLSMMIHPAAFTLEHIPKTLSPTGNISSAPKDFAVYGLALGRPSSSHTFLGVPTDESK

SEQ ID NO: 1032807 - protein, 257 aa, Homo sapiens
MDFSRLHMYSPPQCVPENTGYTYALSSSYSSDALDFETEHKLDPVFDSPRMSRRSLRLATTACTLGDGEAVGADSGTSSAVSLKNRAARTTKQRRSTNKSAFSINHVSRQVTSSGVSHGGTVSLQDAVTRRPPVLDESWIREQTTVDHFWGLDDDGDLKGGNKAAIQGNGDVGAAAATAHNGFSCSNCSMLSERKDVLTAHPAPPGPVSRVYSRDRNQKCKSQSFKTQKKVCFPNLIFPFCKSQCLHYLSWRLKIIP

SEQ ID NO: 1032808 - protein, 158 aa, Homo sapiens
FVEVAGGLCLLWNSCRKIGGDVDVIDQNRALVDGPCTQVRRQAMPFKCMQLTDFILKFPHSAHQKYVRQAWQKADINTKWAATRWAKKIEARERKAKMTDFDRFKVMKAKKMRNRIIKNEVKKLQKAALLKASPKKAPGTKGSCCCCCCCCCCCCCCC

SEQ ID NO: 1032809 - protein, 143 aa, Homo sapiens
ALRSPGVHSIDQNRALVDGPCTQVRRQAMPFKCMQLTDFILKFPHSAHQKYVRQAWQKADINTKWAATRWAKKIEARERKAKMTDFDRFKVMKAKKMRNRIIKNEVKKLQKAALLKASPKKAPGTKGSCCCCCCCCCCCCCCC

SEQ ID NO: 1032810 - protein, 135 aa, Homo sapiens
VYYILRSSWSWTLHSVRRQAMPFKCMQLTDFILKFPHSAHQKYVRQAWQKADINTKWAATRWAKKIEARERKAKMTDFDRFKVMKAKKMRNRIIKNEVKKLQKAALLKASPKKAPGTKGSCCCCCCCCCCCCCCC

SEQ ID NO: 1032811 - protein, 158 aa, Homo sapiens; identical to SEQ ID NO: 1032808

SEQ ID NO: 1032812 - protein, 73 aa, Homo sapiens
ALRSPGVHSIDQNRALVDGPCTQVRRQAMPFKCMQLTDFILKFPHSAHQKYVRQAWQKADINTHVQPGDNLGH

SEQ ID NO: 1032813 - protein, 158 aa, Homo sapiens; identical to SEQ ID NO: 1032808

SEQ ID NO: 1032814 - protein, 289 aa, Homo sapiens
MHLSSHRLDEYWDRQRNRHRMVKVDPETRYMSLAVCELDQPGLGPLVAAACSDGAVRLFLLQDSGRILQLLAETFHHKRCVLKVHSFTHEAPNQRRRLLLCSAATDGSLAFWDLTTMLDHDSTVLEPPVDPGLPYRLGTPSLTLQAHSCGINSLHTLPTREGHHLVASGSEDGSLHVFVLAVEMLQLEEAVGEAGLVPQLRVLEEYSVPCAHAAHVTGLKILSPSIMVSASIDQRLTFWRLGHGEPTFMNSTVFHVPDVADMDCWPVSPEFGHRCALGGQGLEVYNWYD

SEQ ID NO: 1032815 - protein, 158 aa, Homo sapiens
SREFSSLLSRGCLSTSRIDMDALEDYVWPRATSELILLPVTGLECVGDRLLAGEGPDVLVYSLDFGGHLRMIKRVQNLLGHYLIHGFRVRPEPNGDLDLEAMVAVFGSKGLRVVKISWGQGHFWELWRSGLWNISPRYVLWLCGALAPQVALRILSQA

SEQ ID NO: 1032816 - protein, 1121 aa, Homo sapiens
MDALEDYVWPRATSELILLPVTGLECVGDRLLAGEGPDVLVYSLDFGGHLRMIKRVQNLLGHYLIHGFRVRPEPNGDLDLEAMVAVFGSKGLRVVKISWGQGHFWELWRSGLWNMSDWIWDARWLEGNIALALGHNSVVLYDPVVGCILQEVPCTDRCTLSSACLIGDAWKELTIVAGAVSNQLLVWYPATALADNKPVAPDRRISGHVGIIFSMSYLESKGLLATASEDRSVRIWKVGDLRVPGGRVQNIGHCFGHSARVWQVKLLENYLISAGEDCVCLVWSHEGEILQAFRGHQGRGIRAIAAHERQAWVITGGDDSGIRLWHLVGRGYRGLGVSALCFKSRSRPGTLKAVTLAGSWRLLAVTDTGALYLYDVEVKCWEQLLEDKHFQSYCLLEAAPGPEGFGLCAMANGEGRVKVVPINTPTAAVDQTLFPGKVHSLSWALRGYEELLLLASGPGGVVACLEISAAPSGKAIFVKERCRYLLPPSKQRWHTCSAFLPPGDFLVCGDRRGSVLLFPSRPGLLKDPGVGGKARAGAGAPVVGSGSSGGGNAFTGLGPVSTLPSLHGKQGVTSVTCHGGYVYTTGRDGAYYQLFVRDGQLQPVLRQKSCRGMNWLAGLRIVPDGSMVILGFHANEFVVWNPRSHEKLHIVNCGGGHRSWAFSDTEAAMAFAYLKDGDVMLYRALGGCTRPHVILREGLHGREITCVKRVGTITLGPEYGVPSFMQPDDLEPGSEGPDLTDIVITCSEDTTVCVLALPTTTGSAHALTAVCNHISSVRAVAVWGIGTPGGPQDPQPGLTAHVVSAGGRAEMHCFSIMVTPDPSTPSRLACHVMHLSSHRLDEYWDRQRNRHRMVKVDPETRYMSLAVCELDQPGLGPLVAAACSDGAVRLFLLQDSGRILQLLAETFHHKRCVLKVHSFTHEAPNQRRRLLLCSAATDGSLAFWDLTTMLDHDSTVLEPPVDPGLPYRLGTPSLTLQAHSCGINSLHTLPTREGHHLVASGSEDGSLHVFVLAVEMLQLEEAVGEAGLVPQLRVLEEYSVPCAHAAHVTGLKILSPSIMVSASIDQRLTFWRLGHGEPTFMNSTVFHVPDVADMDCWPVSPEFGHRCALGGQGLEVYNWYD

SEQ ID NO: 1032817 - protein, 1121 aa, Homo sapiens; identical to SEQ ID NO: 1032816

SEQ ID NO: 1032818 - protein, 1140 aa, Homo sapiens
SREFSSLLSRGCLSTSRIDMDALEDYVWPRATSELILLPVTGLECVGDRLLAGEGPDVLVYSLDFGGHLRMIKRVQNLLGHYLIHGFRVRPEPNGDLDLEAMVAVFGSKGLRVVKISWGQGHFWELWRSGLWNMSDWIWDARWLEGNIALALGHNSVVLYDPVVGCILQEVPCTDRCTLSSACLIGDAWKELTIVAGAVSNQLLVWYPATALADNKPVAPDRRISGHVGIIFSMSYLESKGLLATASEDRSVRIWKVGDLRVPGGRVQNIGHCFGHSARVWQVKLLENYLISAGEDCVCLVWSHEGEILQAFRGHQGRGIRAIAAHERQAWVITGGDDSGIRLWHLVGRGYRGLGVSALCFKSRSRPGTLKAVTLAGSWRLLAVTDTGALYLYDVEVKCWEQLLEDKHFQSYCLLEAAPGPEGFGLCAMANGEGRVKVVPINTPTAAVDQTLFPGKVHSLSWALRGYEELLLLASGPGGVVACLEISAAPSGKAIFVKERCRYLLPPSKQRWHTCSAFLPPGDFLVCGDRRGSVLLFPSRPGLLKDPGVGGKARAGAGAPVVGSGSSGGGNAFTGLGPVSTLPSLHGKQGVTSVTCHGGYVYTTGRDGAYYQLFVRDGQLQPVLRQKSCRGMNWLAGLRIVPDGSMVILGFHANEFVVWNPRSHEKLHIVNCGGGHRSWAFSDTEAAMAFAYLKDGDVMLYRALGGCTRPHVILREGLHGREITCVKRVGTITLGPEYGVPSFMQPDDLEPGSEGPDLTDIVITCSEDTTVCVLALPTTTGSAHALTAVCNHISSVRAVAVWGIGTPGGPQDPQPGLTAHVVSAGGRAEMHCFSIMVTPDPSTPSRLACHVMHLSSHRLDEYWDRQRNRHRMVKVDPETRYMSLAVCELDQPGLGPLVAAACSDGAVRLFLLQDSGRILQLLAETFHHKRCVLKVHSFTHEAPNQRRRLLLCSAATDGSLAFWDLTTMLDHDSTVLEPPVDPGLPYRLGTPSLTLQAHSCGINSLHTLPTREGHHLVASGSEDGSLHVFVLAVEMLQLEEAVGEAGLVPQLRVLEEYSVPCAHAAHVTGLKILSPSIMVSASIDQRLTFWRLGHGEPTFMNSTVFHVPDVADMDCWPVSPEFGHRCALGGQGLEVYNWYD

SEQ ID NO: 1032819 - protein, 1140 aa, Homo sapiens; identical to SEQ ID NO: 1032818

SEQ ID NO: 1032820 - protein, 1140 aa, Homo sapiens; identical to SEQ ID NO: 1032818

SEQ ID NO: 1032821 - protein, 1121 aa, Homo sapiens; identical to SEQ ID NO: 1032816

SEQ ID NO: 1032822 - protein, 1121 aa, Homo sapiens; identical to SEQ ID NO: 1032816

SEQ ID NO: 1032823 - protein, 1140 aa, Homo sapiens; identical to SEQ ID NO: 1032818

SEQ ID NO: 1032824 - protein, 1140 aa, Homo sapiens; identical to SEQ ID NO: 1032818

SEQ ID NO: 1032825 - protein, 1121 aa, Homo sapiens; identical to SEQ ID NO: 1032816

SEQ ID NO: 1032826 - protein, 1121 aa, Homo sapiens; identical to SEQ ID NO: 1032816

SEQ ID NO: 1032827 - protein, 1121 aa, Homo sapiens; identical to SEQ ID NO: 1032816

SEQ ID NO: 1032828 - protein, 1121 aa, Homo sapiens; identical to SEQ ID NO: 1032816

SEQ ID NO: 1032829 - protein, 1140 aa, Homo sapiens; identical to SEQ ID NO: 1032818

SEQ ID NO: 1032830 - protein, 1140 aa, Homo sapiens; identical to SEQ ID NO: 1032818

SEQ ID NO: 1032831 - protein, 250 aa, Homo sapiens
SREFSSLLSRGCLSTSRIDMDALEDYVWPRATSELILLPVTGLECVGDRLLAGEGPDVLVYSLDFGGHLRMIKRVQNLLGHYLIHGFRVRPEPNGDLDLEAMVAVFGSKGLRVVKISWGQGHFWELWRSGLWNMSDWIWDARWLEGNIALALGHNSVVLYDPVVGCILQEVPCTDRCTLSSACLIGDAWKELTIVAGAVSNQLLVWYPATAFIPLCTSHPVLLCAHPQDVYPVVVGAEIHAELYQELAYQ

SEQ ID NO: 1032832 - protein, 1140 aa, Homo sapiens; identical to SEQ ID NO: 1032818

SEQ ID NO: 1032833 - protein, 1140 aa, Homo sapiens; identical to SEQ ID NO: 1032818

SEQ ID NO: 1032834 - protein, 1140 aa, Homo sapiens; identical to SEQ ID NO: 1032818

SEQ ID NO: 1032835 - protein, 1140 aa, Homo sapiens; identical to SEQ ID NO: 1032818

SEQ ID NO: 1032836 - protein, 1140 aa, Homo sapiens; identical to SEQ ID NO: 1032818

SEQ ID NO: 1032837 - protein, 1121 aa, Homo sapiens; identical to SEQ ID NO: 1032816

SEQ ID NO: 1032838 - protein, 1121 aa, Homo sapiens; identical to SEQ ID NO: 1032816

SEQ ID NO: 1032839 - protein, 1121 aa, Homo sapiens; identical to SEQ ID NO: 1032816

SEQ ID NO: 1032840 - protein, 1121 aa, Homo sapiens; identical to SEQ ID NO: 1032816

SEQ ID NO: 1032841 - protein, 1121 aa, Homo sapiens; identical to SEQ ID NO: 1032816

SEQ ID NO: 1032842 - protein, 1121 aa, Homo sapiens; identical to SEQ ID NO: 1032816

SEQ ID NO: 1032843 - protein, 1121 aa, Homo sapiens; identical to SEQ ID NO: 1032816

SEQ ID NO: 1032844 - protein, 1121 aa, Homo sapiens; identical to SEQ ID NO: 1032816

SEQ ID NO: 1032845 - protein, 379 aa, Homo sapiens
MEVKPPPGCPQPDSGSRRRRWGEEGHDPKEPEQLRKLFIGGLSFETTDDSLREHFEKWGTLTDCLVMRDPQTKRSRGFGFVTYSCVTEVDAAIGARPFKVDGRVVEPKRAVSREDSVKPGAHLTVKKIFVGSIKEDTEEYNLRDYFEKYGKIETIEVMEDRQSGKKRGFASVTFDDHDTVDKIVVQKYHTINGHNCEVKKALAKQVMQPAGSQRGRGGGSGNCMGHRGNFGGGGGNFGRDGNFGGRGGYGGGGGGSRGSYGGGDVDDNGLGGDGGNYGSGPGYSSRGGYGGGGPGYGNQGGGYGGGVGGYDGYNEGGNFGGGNYGGGGNYNDFGNYSGQQQSNYGPMKGGSFGGRSSGSPYGGGYGSGGGSGGYGSRRF

SEQ ID NO: 1032846 - protein, 379 aa, Homo sapiens; identical to SEQ ID NO: 1032845

SEQ ID NO: 1032847 - protein, 269 aa, Homo sapiens
MEVKPPPGCPQPDSGSRRRRWGEEGHDPKEPEQLRKLFIGGLSFETTDDSLREHFEKWGTLTDCLVMRDPQTKRSRGFGFVTYSCVTEVDAAIGARPFKVDGRVVEPKRAVSREDSVKPGAHLTVKKIFVGSIKEDTEEYNLRDYFEKYGKIETIEVMEDRQSGKKRGFASVTFDDHDTVDKIVVQKYHTINGHNCEVKKALAKQVMQPAGSQRGRGGGSGNCMGHRGNFGGGGGNFGRDGNFGGRGGYGGGGGGSRGSYGGGDVDIMD

SEQ ID NO: 1032848 - protein, 165 aa, Homo sapiens
MGFSRVLCFTNSRENSHRLFLLVQAFGGVDVAEFSSRYGPGQRRMILKQFEQGKIQLLISTDATARGIDVQGVELVVNYDAPQYLRTYVHRVGRTARAGKTGQAFTLLLKVQERRFLRMLTEAGAPELQRHELSSKLLQPLVPRYEEALSQLEESVKEERKQRAA

SEQ ID NO: 1032849 - protein, 165 aa, Homo sapiens; identical to SEQ ID NO: 1032848

SEQ ID NO: 1032850 - protein, 165 aa, Homo sapiens; identical to SEQ ID NO: 1032848

SEQ ID NO: 1032851 - protein, 377 aa, Homo sapiens
MHQSWLPRVVAAAFQSEDPADPCALLQRRQAQAVTAASTCCPQMPLQKLLFSATLTQNPEKLQQLGLHQPRLFSTGLAHRGLEDTDGDGDSGKYAFPVGLTHHYVPCSLSSKPLVVLHLVLEMGFSRVLCFTNSRENSHRLFLLVQAFGGVDVAEFSSRYGPGQRRMILKQFEQGKIQLLISTDATARGIDVQGVELVVNYDAPQYLRTYVHRVGRTARAASTGGSGALELLGVDVETVLTGMGWAWCGEKLSFRQTLEGSGASLEIAAFDSRVGRTARAGKTGQAFTLLLKVQVRLRGSWEFLLLVGVKGLAQEPPSTMSFLQERRFLRMLTEAGAPELQRHELSSKLLQPLVPRYEEALSQLEESVKEERKQRAA

SEQ ID NO: 1032852 - protein, 261 aa, Homo sapiens
MHQSWLPRVVAAAFQSEDPADPCALLQRRQAQAVTAASTCCPQMPLQKLLFSATLTQNPEKLQQLGLHQPRLFSTGLAHRGLEDTDGDGDSGKYAFPVGLTHHYVPCSLSSKPLVVLHLVLEMGFSRVLCFTNSRENSHRLFLLVQAFGGVDVAEFSSRYGPGQRRMILKQFEQGKIQLLISTDATARGIDVQGVELVVNYDAPQYLRTYVHRVGRTARAEQAAAAAGSSVRGGPVPAGGVCQGRAQAEGGLGWGSEGRRD

SEQ ID NO: 1032853 - protein, 165 aa, Homo sapiens; identical to SEQ ID NO: 1032848

SEQ ID NO: 1032854 - protein, 165 aa, Homo sapiens; identical to SEQ ID NO: 1032848

SEQ ID NO: 1032855 - protein, 165 aa, Homo sapiens; identical to SEQ ID NO: 1032848

SEQ ID NO: 1032856 - protein, 214 aa, Homo sapiens
TVWAEGCTGNLGPLTNPHLHPDPLPSLEHHYVPCSLSSKPLVVLHLVLEMGFSRVLCFTNSRENSHRLFLLVQAFGGVDVAEFSSRYGPGQRRMILKQFEQGKIQLLISTDATARGIDVQGVELVVNYDAPQYLRTYVHRVGRTARAGKTGQAFTLLLKVQERRFLRMLTEAGAPELQRHELSSKLLQPLVPRYEEALSQLEESVKEERKQRAA

SEQ ID NO: 1032857 - protein, 165 aa, Homo sapiens; identical to SEQ ID NO: 1032848

SEQ ID NO: 1032858 - protein, 165 aa, Homo sapiens; identical to SEQ ID NO: 1032848

SEQ ID NO: 1032859 - protein, 165 aa, Homo sapiens; identical to SEQ ID NO: 1032848

SEQ ID NO: 1032860 - protein, 165 aa, Homo sapiens; identical to SEQ ID NO: 1032848

SEQ ID NO: 1032861 - protein, 165 aa, Homo sapiens; identical to SEQ ID NO: 1032848

SEQ ID NO: 1032862 - protein, 59 aa, Homo sapiens [sequence omitted]

SEQ ID NO: 1032863 - protein, 312 aa, Homo sapiens
MDSCVIPLRHGGLSLVQTTDFFYPLVEDPYMMGRIACANVLSDLYAMGITECDNMLMLLSVSQSMSEEEREKVTPLMVKGFRDAAEEGGTAVTGGQTVVNPWIIIGGVATVVCQPNEFIMPDSAVVGDVLVLTKPLGTQVAVNAHQWLDNPERWNKVKMVVSREEVELAYQEAMFNMATLNRTAAGLMHTFNAHAATDITGFGILGHSQNLAKMAAVSKASGRFGLLQGTSAETSGGLLICLPREQAARFCSEIKSSKYGEGHQAWIVGIVEKGNRTARIIDKPRVIEVLPRGATAAVLAPDSSNASSEPSS

SEQ ID NO: 1032864 - protein, 312 aa, Homo sapiens
MDSCVIPLRHGGLSLVQTTDFFYPLVEDPYMMGRIACANVLSDLYAMGITECDNMLMLLSVSQSMSEEEREKVTPLMVKGFRDAAEEGGTAVTGGQTVVNPWIIIGGVATVVCQPNEFIMPDSAVVGDVLVLTKPLGTQVAVNAHQWLDNPERWNKVKMVVSREEVELAYQEAMFNMATLNRTAAGLMHTFNAHAATDITGFGILGHSQNLAKQQRNEVSFVIHNLPIIAKMAAVSKASGRFGLLQGTSAETSGGLLICLPREQAARFCSEIKSSKYGEGHQAWIVGIVVPRGATAAVLAPDSSNASSEPSS

SEQ ID NO: 1032865 - protein, 356 aa, Homo sapiens
  misc_feature (232)..(232): Xaa can be any naturally occurring amino acid
  misc_feature (234)..(235): Xaa can be any naturally occurring amino acid
MDSCVIPLRHGGLSLVQTTDFFYPLVEDPYMMGRIACANVLSDLYAMGITECDNMLMLLSVSQSMSEEEREKVTPLMVKGFRDAAEEGGTAVTGGQTVVNPWIIIGGVATVVCQPNEFIMPDSAVVGDVLVLTKPLGTQVAVNAHQWLDNPERWNKVKMVVSREEVELAYQEAMFNMATLNRTAAGLMHTFNAHAATDITGFGILGHSQNLAKQQRNEVSFVIHNLPIIPFXKXXLAKMAAVSKASGRFGLLQGTSAETSGGLLICLPREQAARFCSEIKSSKYGEGHQAWIVGIVEKGNRTARIIDKPRVIEVPFVGPPFPGCLVGPQLLFLLLTVQMPPLSLAREMKEQKLFGP

SEQ ID NO: 1032866 - protein, 312 aa, Homo sapiens
MDSCVIPLRHGGLSLVQTTDFFYPLVEDPYMMGRIACANVLSDLYAMGITECDNMLMLLSVSQSMSEEERGTAVTGGQTVVNPWIIIGGVATVVCQPNEFIMPDSAVVGDVLVLTKPLGTQVAVNAHQWLDNPERWNKVKMVVSREEVELAYQEAMFNMATLNRTAAGLMHTFNAHAATDITGFGILGHSQNLAKQQRNEVSFVIHNLPIIAKMAAVSKASGRFGLLQGTSAETSGGLLICLPREQAARFCSEIKSSKYGEGHQAWIVGIVEKGNRTARIIDKPRVIEVLPRGATAAVLAPDSSNASSEPSS

SEQ ID NO: 1032867 - protein, 290 aa, Homo sapiens
HLGTSYAPHHVGIFYQGVKVVLVCTSDRPPCLRGMTQESIPMPRAGKGGTAVTGGQTVVNPWIIIGGVATVVCQPNEFIMPDSAVVGDVLVLTKPLGTQVAVNAHQWLDNPERWNKVKMVVSREEVELAYQEAMFNMATLNRTAAGLMHTFNAHAATDITGFGILGHSQNLAKQQRNEVSFVIHNLPIIAKMAAVSKASGRFGLLQGTSAETSGGLLICLPREQAARFCSEIKSSKYGEGHQAWIVGIVEKGNRTARIIDKPRVIEVLPRGATAAVLAPDSSNASSEPSS

SEQ ID NO: 1032868 - protein, 330 aa, Homo sapiens
MDSCVIPLRHGGLSLVQTTDFFYPLVEDPYMMGRIACANVLSDLYAMGITECDNMLMLLSVSQSMSEEEREKVTPLMVKGFRDAAEEGGTAVTGGQTVVNPWIIIGGVATVVCQPNEFIMPDSAVVGDVLVLTKPLGTQVAVNAHQWLDNPERWNKVKMVVSREEVELAYQEAMFNMATLNRTAAGLMHTFNAHAATDITGFGILGHSQNLAKQQRNEVSFVIHNLPIIAKMAAVSKASGRFGLLQGTSAETSGGLLICLKSNPPSTERVTKRGSLALWKRETERPGSLTSRELLKSCLVGPQLLFLLLTVQMPPLSLAREMKEQKLFGP

SEQ ID NO: 1032869 - protein, 330 aa, Homo sapiens
MDSCVIPLRHGGLSLVQTTDFFYPLVEDPYMMGRIACANVLSDLYAMGITECDNMLMLLSVSQSMSEEEREKVTPLMVKGFRDAAEEGGTAVTGGQTVVNPWIIIGGVATVVCQPNEFIMPDSAVVGDVLVLTKPLGTQVAVNAHQWLDNPERWNKVKMVVSREEVELAYQEAMFNMATLNRTAAGLMHTFNAHAATDITGFGILGHSQNLAKQQRNEVSFVIHNLPIIAKMAAVSKASGRFGLLQGTSAETSGGLLICLPREQAARFCSEIKSSKYGEGHQAWIVGIVEKGNRTARIIDKPRVIEVLPRGATAAVLAPDSSNASSEPSS

SEQ ID NO: 1032870 - protein, 330 aa, Homo sapiens; identical to SEQ ID NO: 1032869

SEQ ID NO: 1032871 - protein, 59 aa, Homo sapiens [sequence omitted]

SEQ ID NO: 1032872 - protein, 102 aa, Homo sapiens
HVISHISQNNLGKYYFHPFSVSNRTQQETRVREGLVQGGPLKSGPPAAAHAGASLVFWVHAMTVLIGHTGGPEPLTTSRQREMHAVASAQKVGTGWKVLLYK

SEQ ID NO: 1032873 - protein, 3078 aa, Homo sapiens
AGRRRGFHPPALLTRPERSPEAQGERHIGYRREVIMHHGTGPQNVQHQLQRSRACPGSEGEEQPAHPNPPPSPAAPFAPSASPSAPQSPSYQIQQLMNRSPATGQNVNITLQSVGPVVGGNQQITLAPLPLPSPTSPGFQFSAQPRRFEHGSPSYIQVTSPLSQQVQTQSPTQPSPGPGQALQNVRAGAPGPGLGLCSSSPTGDFVDASVLVRQISLSPSSGGHFVFQDGSGLTQIAQGAQVQLQHPGTPITVRERRPSQPHTQSGGTIHHLGPQSPAAAGGAGLQPLASPSHITTANLPPQISSIIQGQLVQQQQVLQGPPLPRPLGFERTPGVLLPGAGGAAGFGMTSPPPPTSPSRTAVPPGLSSLPLTSVGNTGMKKVPKKLEEIPPASPEMAQMRKQCLDYHYQEMQALKEVFKEYLIELFFLQHFQGNMMDFLAFKERLYGPLQAYLRQNDLDIEEEEEEEEEEEEKSEVINDEQQALAGSLVAGAGSTVETDLFKRQQAMPSTGMAEQSKRPRLEVGHQGVVFQHPGADAGVPLQQLMPTAQGGMPPTPQAAQLAGQRQSQQQYDPSTGPPVQNAASLHTPLPQLPGRLPPAGVPTAALSSALQFAQQPQVVEAQTQLQIPVKTQQPNVPIPAPPSSQLPIPPSQPAQLALHVPTPGKVQVQASQLSSLPQMVASTRLPVDPAPPCPRPLPTSSTSSLAPVSGSGPGPSPARSSPVNRPSSATNKALSPVTSRTPGVVASAPTKPQSPAQNATSSQDSSQDTLTEQITLENQVHQRIAELRKAGLWSQRRLPKLQEAPRPKSHWDYLLEEMQWMATDFAQERRWKVAAAKKLVRTVVRHHEEKQLREERGKKEEQSRLRRIAASTAREIECFWSNIEQVVEIKLRVELEEKRKKALNLQKVSRRGKELRPKGFDALQESSLDSGMSGRKRKASISLTDDEVDDEEETIEEEEANEGVVDHQTELSNLAKEAELPLLDLMKLYEGAFLPSSQWPRPKPDGEDTSGEEDADDCPGDRESRKDLVLIDSLFIMDQFKAAERMNIGKPNAKDIADVTAVAEAILPKGSARVTTSVKFNAPSLLYGALRDYQKIGLDWLAKLYRKNLNGILADEAGLGKTVQIIAFFAHLACNEGNWGPHLVVVRSCNILKWELELKRWCPGLKILSYIGSHRELKAKRQEWAEPNSFHVCITSYTQFFRGLTAFTRVRWKCLVIDEMQRVKGMTERHWEAVFTLQSQQRLLLIDSPLHNTFLELWTMVHFLVPGISRPYLSSPLRAPSEESQDYYHKVVIRLHRVTQPFILRRTKRDVEKQLTKKYEHVLKCRLSNRQKALYEDVILQPGTQEALKSGHFVNVLSILVRLQRICNHPGLVEPRHPGSSYVAGPLEYPSASLILKALERDFWKEADLSMFDLIGLENKITRHEAELLSKKKIPRKLMEEISTSAAPAARPAAAKLKASRLFQPVQYGQKPEGRTVAFPSTHPPRTAAPTTASAAPQGPLRGRPPIATFSANPEAKGGEVVKIAQLASITGPQSRVAQPETPVTLQFQGSKFTLSHSQLRQLTAGQPLQLQGSVLQIVSAPGQPYLRAPGPVVMQTVSQAGAVHGALGSKPPAGGPSPAPLTPQVGVPGRVAVNALAVGEPGTASKPASPIGGPTQEEKTRLLKERLDQIYLVNERRCSQAPVYGRDLLRICALPSHGRVQWRGSLDGRRGKEAGPAHSYTSSSESPSELMLTLCRCGESLQDVIDRVAFVIPPVVAAPPSLRVPRPPPLYSHRMRILRQGLREHAAPYFQQLRQTTAPRLLQFPELRLVQFDSGKLEALAILLQKLKSEGRRVLILSQMILMLDILEMFLNFHYLTYVRIDENASSEQRQELMRSFNRDRRIFCAILSTHSRTTGINLVEADTVVFYDNDLNPVMDAKAQEWCDRIGRCKDIHIYRLVSGNSIEEKLLKNGTKDLIREVAAQGNDYSMAFLTQRTIQELFEVYSPMDDAGFPVKAEEFVVLSQEPSVTETIAPKIARPFIEALKSIEYLEEDAQKSAQEGVLGPHTDALSSDSENMPCDEEPSQLEELADFMEQLTPIEKYALNYLELFHTSIEQEKERNSEDAVMTAVRAWEFWNLKTLQEREARLRLEQEEAELLTYTREDAYSMEYVYEDVDGQTEVMPLWTPPTPPQDDSDIYLDSVMCLMYEATPIPEAKLPPVYVRKERKRHKTDPSAAGRKKKQRHGEAVVPPRSLFDRATPGLLKIRREGKEQKKNILLKQQVPFAKPLPTFAKPTAEPGQDNPEWLISEDWALLQAVKQLLELPLNLTIVSPAHTPNWDLVSDVVNSCSRIYRSSKQCRNRYENVIIPREEGKSKNNRPLRTSQIYAQDENATHTQLYTSHFDLMKMTAGKRSPPIKPLLGMNPFQKNPKHASVLAESGINYDKPLPPIQVASLRAERIAKEKKALADQQKAQQPAVAQPPPPQPQPPPPPQQPPPPLPQPQAAGSQPPAGPPAVQPQPQPQPQTQPQPVQAPAKAQPAITTGGSAAVLAGTIKTSVTGTSMPTGAVSGNVIVNTIAGVPAATFQSINKRLASPVAPGALTTPGGSAPAQVVHTQPPPRAVGSPATATPDLVSMATTQGVRAVTSVTASAVVTTNLTPVQTPARSLVPQVSQATGVQLPGKTITPAHFQLLRQQQQQQQQQQQQQQQQQQQQQQQQQQQQQQTTTTSQVQVPQIQGQAQSPAQIKAVGKLTPEHLIKMQKQKLQMPPQPPPPQAQSAPPQPAAQVQVQTSQPPQQQSPQLTTVTAPRPGALLTGTTVANLQVARLTRVPTSQLQSQGQMQTQAPQPAQVPLAKPPVVSVPAAVVSSPGVTTLPMNVAGISVAIGQPQKAAGQTVVAQPVHMQQLLKLKQQAVQQQKAIQPQAAQGPAAVQQKITAQQITTPGAQQKVAYAAQPALKTQFLTTPISQAQKLAGAQQVQTQIQVAKLPQVVQQQTPVASIQQVASASQQASPQTVALTQATAAGQQVQMIPAVTATAQVVQQKLIQQQVVTTASAPLQTPGAPNPAQVPASSDSPSQQPKLQMRVPAVRLKTPTKPPCQ

SEQ ID NO: 1032874 - protein, 3090 aa, Homo sapiens
LAPRRPVGLVGCSGLAARSAVAALIRAGSPWLRRPAAAGAFPEDVVMQHVSSSQSSQRHVQWPGACPGAGEEQPACSQPSLPLTLPSPSHQLQQLMVQTQSPTQPSPGPGQALQNVRAGAPGPGLGLCSSSPTGDFVDASVLVRQISLSPSSGGHFVFQDGSGLTQIAQGAQVQLQHPGTPITVRERRPSQPHTQSGGTIHHLGPQSPAAAGGAGLQPLASPSHITTANLPPQISSIIQGQLVQQQQVLQGPPLPRPLGFERTPGVLLPGAGGAAGFGMTSPPPPTSPSRTAVPPGLSSLPLTSVGNTGMKKVPKKLEEIPPASPEMAQMRKQCLDYHYQEMQALKEVFKEYLIELFFLQHFQGNMMDFLAFKERLYGPLQAYLRQNDLDIEEEEEEEEEEEEKSEVINDEVKVVTGKDGQTGTPVAIATQLPPKVSAAFSSQQQPFQQALAGSLVAGAGSTVETDLFKRQQAMPSTGMAGGMPPTPQAAQLAGQRQSQQQYDPSTGPPVQNAASLHTPLPQLPGRLPPAGVPTAALSSALQFAQQPQVVEAQTQLQIPVKTQQPNVPIPAPPSSQLPIPPSQPAQLALHVPTPGKVQVQASQLSSLPQMVASTRLPVDPAPPCPRPLPTSSTSSLAPVSGSGPGPSPARSSPVNRPSSATNKALSPVTSRTPGVVASAPTKPQSPAQNATSSQDSSQDTLTEQITLENQVHQRIAELRKAGLWSQRRLPKLQEAPRPKSHWDYLLEEMQWMATDFAQERRWKVAAAKKLVRTVVRHHEEKQLREERGKKEEQSRLRRIAASTAREIECFWSNIEQVVEIKLRVELEEKRKKALNLQKVSRRGKELRPKGFDALQESSLDSGMSGRKRKASISLTDDEVDDEEETIEEEEANEGVVDHQTELSNLAKEAELPLLDLMKLYEGAFLPSSQWPRPKPDGEDTSGEEDADDCPGDRESRKDLVLIDSLFIMDQFKAAERMNIGKPNAKDIADVTAVAEAILPKGSARVTTSVKFNAPSLLYGALRDYQKIGLDWLAKLYRKNLNGILADEAGLGKTVQIIAFFAHLACNEGNWGPHLVVVRSCNILKWELELKRWCPGLKILSYIGSHRELKAKRQEWAEPNSFHVCITSYTQFFRGLTAFTRVRWKCLVIDEMQRVKGMTERHWEAVFTLQSQQRLLLIDSPLHNTFLELWTMVHFLVPGISRPYLSSPLRAPSEESQDYYHKVVIRLHRVTQPFILRRTKRDVEKQLTKKYEHVLKCRLSNRQKALYEDVILQPGTQEALKSGHFVNVLSILVRLQRICNHPGLVEPRHPGSSYVAGPLEYPSASLILKALERDFWKEADLSMFDLIGLENKITRHEAELLSKKKIPRKLMEEISTSAAPAARPAAAKLKASRLFQPVQYGQKPEGRTVAFPSTHPPRTAAPTTASAAPQGPLRGRPPIATFSANPEAKAAAAPFQTSQASASAPRHQPASASSTAASPAHPAKLRAQTTAQAFTPGQPPPQPQAPSHAAGQSALPQRLVLPSQAQARLPSGEVVKIAQLASITGPQSRVAQPETPVTLQFQGSKFTLSHSQLRQLTAGQPLQLQGSVLQIVSAPGQPYLRAPGPVVMQTVSQAGAVHGALGSKPPAGGPSPAPLTPQVGVPGRVAVNALAVGEPGTASKPASPIGGPTQEEKTRLLKERLDQIYLVNERRCSQAPVYGRDLLRICALPSHGRVQWRGSLDGRRGKEAGPAHSYTSSSESPSELMLTLCRCGESLQDVIDRVAFVIPPVVAAPPSLRVPRPPPLYSHRMRILRQGLREHAAPYFQQLRQTTAPRLLQFPELRLVQFDSGKLEALAILLQKLKSEGRRVLILSQMILMLDILEMFLNFHYLTYVRIDENASSEQRQELMRSFNRDRRIFCAILSTHSRTTGINLVEADTVVFYDNDLNPVMDAKAQEWCDRIGRCKDIHIYRLVSGNSIEEKLLKNGTKDLIREVAAQGNDYSMAFLTQRTIQELFEVYSPMDDAGFPVKAEEFVVLSQEPSVTETIAPKIARPFIEALKSIEYLEEDAQKSAQEGVLGPHTDALSSDSENMPCDEEPSQLEELADFMEQLTPIEKYALNYLELFHTSIEQEKERNSEDAVMTAVRAWEFWNLKTLQEREARLRLEQEEAELLTYTREDAYSMEYVYEDVDGQTEVMPLWTPPTPPQDDSDIYLDSVMCLMYEATPIPEAKLPPVYVRKERKRHKTDPSAAGRKKKQRHGEAVVPPRSLFDRATPGLLKIRREGKEQKKNILLKQQVPFAKPLPTFAKPTAEPGQDNPEWLISEDWALLQAVKQLLELPLNLTIVSPAHTPNWDLVSDVVNSCSRIYRSSKQCRNRYENVIIPREEGKSKNNRPLRTSQIYAQDENATHTQLYTSHFDLMKMTAGKRSPPIKPLLGMNPFQKNPKHASVLAESGINYDKPLPPIQVASLRAERIAKEKKALADQQKAQQPAVAQPPPPQPQPPPPPQQPPPPLPQPQAAGSQPPAGPPAVQPQPQPQPQTQPQPVQAPAKAQPAITTGGSAAVLAGTIKTSVTGTSMPTGAVSGNVIVNTIAGVPAATFQSINKRLASPVAPGALTTPGGSAPAQVVHTQPPPRAVGSPATATPDLVSMATTQGVRAVTSVTASAVVTTNLTPVQTPARSLVPQVSQATGVQLPGKTITPAHFQLLRQQQQQQQQQQQQQQQQQQQQQQQQQQQQQQTTTTSQVQVPQIQGQAQSPAQIKAVGKLTPEHLIKMQKQKLQMPPQPPPPQAQSAPPQPAAQVQVQTSQPPQQQSPQLTTVTAPRPGALLTGTTVANLQVARLTRVPTSQLQSQGQMQTQAPQPAQVPLAKPPVVSVPAAVVSSPGVTTLPMNVAGISVAIGQPQKAAGQTVVAQPVHMQQLLKLKQQAVQQQKAIQPQAAQGPAAVQQKITAQQITTPGAQQKVAYAAQPALKTQFLTTPISQAQKLAGAQQVQTQIQVAKLPQVVQQQTPVASIQQVASASQQASPQTVALTQATAAGQQVQMIPAVTATAQVVQQKLIQQQVVTTASAPLQTPGAPNPAQVPASSDSPSQQPKLQMRVPAVRLKTPTKPPCQ

SEQ ID NO: 1032875 - protein, 3054 aa, Homo sapiens
LAPRRPVGLVGCSGLAARSAVAALIRAGSPWLRRPAAAGAFPEDVVMQHVSSSQSSQRHVQWPGACPGAGEEQPACSQPSLPLTLPSPSHQLQQLMVQTQSPTQPSPGPGQALQNVRAGAPGPGLGLCSSSPTGDFVDASVLVRQISLSPSSGGHFVFQDGSGLTQIAQGAQVQLQHPGTPITVRERRPSQPHTQSGGTIHHLGPQSPAAAGGAGLQPLASPSHITTANLPPQISSIIQGQLVQQQQVLQGPPLPRPLGFERTPGVLLPGAGGAAGFGMTSPPPPTSPSRTAVPPGLSSLPLTSVGNTGMKKVPKKLEEIPPASPEMAQMRKQCLDYHYQEMQALKEVFKEYLIELFFLQHFQGNMMDFLAFKERLYGPLQAYLRQNDLDIEEEEEEEEEEEEKSEVINDEQQALAGSLVAGAGSTVETDLFKRQQAMPSTGMAGGMPPTPQAAQLAGQRQSQQQYDPSTGPPVQNAASLHTPLPQLPGRLPPAGVPTAALSSALQFAQQPQVVEAQTQLQIPVKTQQPNVPIPAPPSSQLPIPPSQPAQLALHVPTPGKVQVQASQLSSLPQMVASTRLPVDPAPPCPRPLPTSSTSSLAPVSGSGPGPSPARSSPVNRPSSATNKALSPVTSRTPGVVASAPTKPQSPAQNATSSQDSSQDTLTEQITLENQVHQRIAELRKAGLWSQRRLPKLQEAPRPKSHWDYLLEEMQWMATDFAQERRWKVAAAKKLVRTVVRHHEEKQLREERGKKEEQSRLRRIAASTAREIECFWSNIEQVVEIKLRVELEEKRKKALNLQKVSRRGKELRPKGFDALQESSLDSGMSGRKRKASISLTDDEVDDEEETIEEEEANEGVVDHQTELSNLAKEAELPLLDLMKLYEGAFLPSSQWPRPKPDGEDTSGEEDADDCPGDRESRKDLVLIDSLFIMDQFKAAERMNIGKPNAKDIADVTAVAEAILPKGSARVTTSVKFNAPSLLYGALRDYQKIGLDWLAKLYRKNLNGILADEAGLGKTVQIIAFFAHLACNEGNWGPHLVVVRSCNILKWELELKRWCPGLKILSYIGSHRELKAKRQEWAEPNSFHVCITSYTQFFRGLTAFTRVRWKCLVIDEMQRVKGMTERHWEAVFTLQSQQRLLLIDSPLHNTFLELWTMVHFLVPGISRPYLSSPLRAPSEESQDYYHKVVIRLHRVTQPFILRRTKRDVEKQLTKKYEHVLKCRLSNRQKALYEDVILQPGTQEALKSGHFVNVLSILVRLQRICNHPGLVEPRHPGSSYVAGPLEYPSASLILKALERDFWKEADLSMFDLIGLENKITRHEAELLSKKKIPRKLMEEISTSAAPAARPAAAKLKASRLFQPVQYGQKPEGRTVAFPSTHPPRTAAPTTASAAPQGPLRGRPPIATFSANPEAKAAAAPFQTSQASASAPRHQPASASSTAASPAHPAKLRAQTTAQAFTPGQPPPQPQAPSHAAGQSALPQRLVLPSQAQARLPSGEVVKIAQLASITGPQSRVAQPETPVTLQFQGSKFTLSHSQLRQLTAGQPLQLQGSVLQIVSAPGQPYLRAPGPVVMQTVSQAGAVHGALGSKPPAGGPSPAPLTPQVGVPGRVAVNALAVGEPGTASKPASPIGGPTQEEKTRLLKERLDQIYLVNERRCSQAPVYGRDLLRICALPSHGRVQWRGSLDGRRGKEAGPAHSYTSSSESPSELMLTLCRCGESLQDVIDRVAFVIPPVVAAPPSLRVPRPPPLYSHRMRILRQGLREHAAPYFQQLRQTTAPRLLQFPELRLVQFDSGKLEALAILLQKLKSEGRRVLILSQMILMLDILEMFLNFHYLTYVRIDENASSEQRQELMRSFNRDRRIFCAILSTHSRTTGINLVEADTVVFYDNDLNPVMDAKAQEWCDRIGRCKDIHIYRLVSGNSIEEKLLKNGTKDLIREVAAQGNDYSMAFLTQRTIQELFEVYSPMDDAGFPVKAEEFVVLSQEPSVTETIAPKIARPFIEALKSIEYLEEDAQKSAQEGVLGPHTDALSSDSENMPCDEEPSQLEELADFMEQLTPIEKYALNYLELFHTSIEQEKERNSEDAVMTAVRAWEFWNLKTLQEREARLRLEQEEAELLTYTREDAYSMEYVYEDVDGQTEVMPLWTPPTPPQDDSDIYLDSVMCLMYEATPIPEAKLPPVYVRKERKRHKTDPSAAGRKKKQRHGEAVVPPRSLFDRATPGLLKIRREGKEQKKNILLKQQVPFAKPLPTFAKPTAEPGQDNPEWLISEDWALLQAVKQLLELPLNLTIVSPAHTPNWDLVSDVVNSCSRIYRSSKQCRNRYENVIIPREEGKSKNNRPLRTSQIYAQDENATHTQLYTSHFDLMKMTAGKRSPPIKPLLGMNPFQKNPKHASVLAESGINYDKPLPPIQVASLRAERIAKEKKALADQQKAQQPAVAQPPPPQPQPPPPPQQPPPPLPQPQAAGSQPPAGPPAVQPQPQPQPQTQPQPVQAPAKAQPAITTGGSAAVLAGTIKTSVTGTSMPTGAVSGNVIVNTIAGVPAATFQSINKRLASPVAPGALTTPGGSAPAQVVHTQPPPRAVGSPATATPDLVSMATTQGVRAVTSVTASAVVTTNLTPVQTPARSLVPQVSQATGVQLPGKTITPAHFQLLRQQQQQQQQQQQQQQQQQQQQQQQQQQQQQQTTTTSQVQVPQIQGQAQSPAQIKAVGKLTPEHLIKMQKQKLQMPPQPPPPQAQSAPPQPAAQVQVQTSQPPQQQSPQLTTVTAPRPGALLTGTTVANLQVARLTRVPTSQLQSQGQMQTQAPQPAQVPLAKPPVVSVPAAVVSSPGVTTLPMNVAGISVAIGQPQKAAGQTVVAQPVHMQQLLKLKQQAVQQQKAIQPQAAQGPAAVQQKITAQQITTPGAQQKVAYAAQPALKTQFLTTPISQAQKLAGAQQVQTQIQVAKLPQVVQQQTPVASIQQVASASQQASPQTVALTQATAAGQQVQMIPAVTATAQVVQQKLIQQQVVTTASAPLQTPGAPNPAQVPASSDSPSQQPKLQMRVPAVRLKTPTKPPCQ

SEQ ID NO: 1032876 - protein, 3124 aa, Homo sapiens
MHHGTGPQNVQHQLQRSRACPGSEGEEQPAHPNPPPSPAAPFAPSASPSAPQSPSYQIQQLMNRSPATGQNVNITLQSVGPVVGGNQQITLAPLPLPSPTSPGFQFSAQPRRFEHGSPSYIQVTSPLSQQVQTQSPTQPSPGPGQALQNVRAGAPGPGLGLCSSSPTGGFVDASVLVRQISLSPSSGGHFVFQDGSGLTQIAQGAQVQLQHPGTPITVRERRPSQPHTQSGGTIHHLGPQSPAAAGGAGLQPLASPSHITTANLPPQISSIIQGQLVQQQQVLQGPPLPRPLGFERTPGVLLPGAGGAAGFGMTSPPPPTSPSRTAVPPGLSSLPLTSVGNTGMKKVPKKLEEIPPASPEMAQMRKQCLDYHYQEMQALKEVFKEYLIELFFLQHFQGNMMDFLAFKKKHYAPLQAYLRQNDLDIEEEEEEEEEEEEKSEVINDEQQALAGSLVAGAGSTVETDLFKRQQAMPSTGMAEQSKRPRLEVGHQGVVFQHPGADAGVPLQQLMPTAQGGMPPTPQAAQLAGQRQSQQQYDPSTGPPVQNAASLHTPLPQLPGRLPPAGVPTAALSSALQFAQQPQVVEAQTQLQIPVKTQQPNVPIPAPPSSQLPIPPSQPAQLALHVPTPGKVQVQASQLSSLPQMVASTRLPVDPAPPCPRPLPTSSTSSLAPVSGSGPGPSPARSSPVNRPSSATNKALSPVTSRTPGVVASAPTKPQSPAQNATSSQDSSQDTLTEQITLENQVHQRIAELRKAGLWSQRRLPKLQEAPRPKSHWDYLLEEMQWMATDFAQERRWKVAAAKKLVRTVVRHHEEKQLREERGKKEEQSRLRRIAASTAREIECFWSNIEQVVEIKLRVELEEKRKKALNLQKVSRRGKELRPKGFDALQESSLDSGMSGRKRKASISLTDDEVDDEEETIEEEEANEGVVDHQTELSNLAKEAELPLLDLMKLYEGAFLPSSQWPRPKPDGEDTSGEEDADDCPGDRESRKDLVLIDSLFIMDQFKAAERMNIGKPNAKDIADVTAVAEAILPKGSARVTTSVKFNAPSLLYGALRDYQKIGLDWLAKLYRKNLNGILADEAGLGKTVQIIAFFAHLACNEGNWGPHLVVVRSCNILKWELELKRWCPGLKILSYIGSHRELKAKRQEWAEPNSFHVCITSYTQFFRGLTAFTRVRWKCLVIDEMQRVKGMTERHWEAVFTLQSQQRLLLIDSPLHNTFLELWTMVHFLVPGISRPYLSSPLRAPSEESQDYYHKVVIRLHRVTQPFILRRTKRDVEKQLTKKYEHVLKCRLSNRQKALYEDVILQPGTQEALKSGHFVNVLSILVRLQRICNHPGLVEPRHPGSSYVAGPLEYPSASLILKALERDFWKEADLSMFDLIGLENKITRHEAELLSKKKIPRKLMEEISTSAAPAARPAAAKLKASRLFQPVQYGQKPEGRTVAFPSTHPPRTAAPTTASAAPQGPLRGRPPIATFSANPEAKAAAAPFQTSQASASAPRHQPASASSTAASPAHPAKLRAQTTAQAFTPGQPPPQPQAPSHAAGQSALPQRLVLPSQAQARLPSGEVVKIAQLASITGPQSRVAQPETPVTLQFQGSKFTLSHSQFRQFTAGQPLQLQGSVLQIVSAPGQPYLRAPGPVVMQTVSQAGAVHGALGSKPPAGGPSPAPLTPQVGVPGRVAVNALAVGEPGTASKPASPIGGPTQEEKTRLLKERLDQIYLVNERRCSQAPVYGRDLLRICALPSHGRVQWRGSLDGRRGKEAGPAHSYTSSSESPSELMLTLCRCGESLQDVIDRVAFVIPPVVAAPPSLRVPRPPPLYSHRMRILRQGLREHAAPYFQQLRQTTAPRLLQFPELRLVQFDSGKLEALAILLQKLKSEGRRVLILSQMILMLDILEMFLNFHYLTYVRIDENASSEQRQELMRSFNRDRRIFCAILSTHSRTTGINLVEADTVVFYDNDLNPVMDAKAQEWCDRIGRCKDIHIYRLVSGNSIEEKLLKNGTKDLIREVAAQGNDYSMAFLTQRTIQELFEVYSPMDDAGFPVKAEEFVVLSQEPSVTETIAPKIARPFIEALKSIEYLEEDAQKSAQEGVLGPHTDALSSDSENMPCDEEPSQLEELADFMEQLTPIEKYALNYLELFHTSIEQEKERNSEDAVMTAVRAWEFWNLKTLQEREARLRLEQEEAELLTYTREDAYSMEYVYEDVDGQTEVMPLWTPPTPPQDDSDIYLDSVMCLMYEATPIPEAKLPPVYVRKERKRHKTDPSAAGRKKKQRHGEAVVPPRSLFDRATPGLLKIRREGKEQKKNILLKQQVPFAKPLPTFAKPTAEPGQDNPEWLISEDWALLQAVKQLLELPLNLTIVSPAHTPNWDLVSDVVNSCSRIYRSSKQCRNRYENVIIPREEGKSKNNRPLRTSQIYAQDENATHTQLYTSHFDLMKMTAGKRSPPIKPLLGMNPFQKNPKHASVLAESGINYDKPLPPIQVASLRAERIAKEKKALADQQKAQQPAVAQPPPPQPQPPPPPQQPPPPLPQPQAAGSQPPAGPPAVQPQPQPQPQTQPQPVQAPAKAQPAITTGGSAAVLAGTIKTSVTGTSMPTGAVSGNVIVNTIAGVPAATFQSINKRLASPVAPGALTTPGGSAPAQVVHTQPPPRAVGSPATATPDLVSMATTQGVRAVTSVTASAVVTTNLTPVQTPARSLVPQVSQATGVQLPGKTITPAHFQLLRQQQQQQQQQQQQQQQQQQQQQQQQQQQQQQTTTTSQVQVPQIQGQAQSPAQIKAVGKLTPEHLIKMQKQKLQMPPQPPPPQAQSAPPQPAAQVQVQTSQPPQQQSPQLTTVTAPRPGALLTGTTVANLQVARLTRVPTSQLQSQGQMQTQAPQPAQVPLPKPPVVSVPAAVVSSPGVTTLPMNVAGISVAIGQPQKAAGQTVVAQPVHMQQLLKLKQQAVQQQKAIQPQAAQGPATVQQKITAQQITTPGAQQKVAYAAQPALKTQFLTTPISQAQKLAGAQQVQTQIQVAKLPQVVQQQTPVASIQQVASASQQASPQTVALTQATAAGQQVQMIPAVTATAQVVQQKLIQQQVVTTASAPLQTPGAPNPAQVPASSDSPSQQPKLQMRVPAVRLKTPTKPPCQ

SEQ ID NO: 1032877 - protein, 3078 aa, Homo sapiens
MSAYCNLCLPGSSILLPQPPEYLGLQGAFPEDVVMQHVSSSQSSQRHVQWPGACPGAGEEQPACSQPSLPLTLPSPSHQLQQLMVQTQSPTQPSPGPGQALQNVRAGAPGPGLGLCSSSPTGDFVDASVLVRQISLSPSSGGHFVFQDGSGLTQIAQGAQVQLQHPGTPITVRERRPSQPHTQSGGTIHHLGPQSPAAAGGAGLQPLASPSHITTANLPPQISSIIQGQLVQQQQVLQGPPLPRPLGFERTPGVLLPGAGGAAGFGMTSPPPPTSPSRTAVPPGLSSLPLTSVGNTGMKKVPKKLEEIPPASPEMAQMRKQCLDYHYQEMQALKEVFKEYLIELFFLQHFQGNMMDFLAFKERLYGPLQAYLRQNDLDIEEEEEEEEEEEEKSEVINDEVKVVTGKDGQTGTPVAIATQLPPKVSAAFSSQQQPFQQALAGSLVAGAGSTVETDLFKRQQAMPSTGMAGGMPPTPQAAQLAGQRQSQQQYDPSTGPPVQNAASLHTPLPQLPGRLPPAGVPTAALSSALQFAQQPQVVEAQTQLQIPVKTQQPNVPIPAPPSSQLPIPPSQPAQLALHVPTPGKVQVQASQLSSLPQMVASTRLPVDPAPPCPRPLPTSSTSSLAPVSGSGPGPSPARSSPVNRPSSATNKALSPVTSRTPGVVASAPTKPQSPAQNATSSQDSSQDTLTEQITLENQVHQRIAELRKAGLWSQRRLPKLQEAPRPKSHWDYLLEEMQWMATDFAQERRWKVAAAKKLVRTVVRHHEEKQLREERGKKEEQSRLRRIAASTAREIECFWSNIEQVVEIKLRVELEEKRKKALNLQKVSRRGKELRPKGFDALQESSLDSGMSGRKRKASISLTDDEVDDEEETIEEEEANEGVVDHQTELSNLAKEAELPLLDLMKLYEGAFLPSSQWPRPKPDGEDTSGEEDADDCPGDRESRKDLVLIDSLFIMDQFKAAERMNIGKPNAKDIADVTAVAEAILPKGSARVTTSVKFNAPSLLYGALRDYQKIGLDWLAKLYRKNLNGILADEAGLGKTVQIIAFFAHLACNEGNWGPHLVVVRSCNILKWELELKRWCPGLKILSYIGSHRELKAKRQEWAEPNSFHVCITSYTQFFRGLTAFTRVRWKCLVIDEMQRVKGMTERHWEAVFTLQSQQRLLLIDSPLHNTFLELWTMVHFLVPGISRPYLSSPLRAPSEESQDYYHKVVIRLHRVTQPFILRRTKRDVEKQLTKKYEHVLKCRLSNRQKALYEDVILQPGTQEALKSGHFVNVLSILVRLQRICNHPGLVEPRHPGSSYVAGPLEYPSASLILKALERDFWKEADLSMFDLIGLENKITRHEAELLSKKKIPRKLMEEISTSAAPAARPAAAKLKASRLFQPVQYGQKPEGRTVAFPSTHPPRTAAPTTASAAPQGPLRGRPPIATFSANPEAKAAAAPFQTSQASASAPRHQPASASSTAASPAHPAKLRAQTTAQAFTPGQPPPQPQAPSHAAGQSALPQRLVLPSQAQARLPSGEVVKIAQLASITGPQSRVAQPETPVTLQFQGSKFTLSHSQLRQLTAGQPLQLQGSVLQIVSAPGQPYLRAPGPVVMQTVSQAGAVHGALGSKPPAGGPSPAPLTPQVGVPGRVAVNALAVGEPGTASKPASPIGGPTQEEKTRLLKERLDQIYLVNERRCSQAPVYGRDLLRICALPSHGRVQWRGSLDGRRGKEAGPAHSYTSSSESPSELMLTLCRCGESLQDVIDRVAFVIPPVVAAPPSLRVPRPPPLYSHRMRILRQGLREHAAPYFQQLRQTTAPRLLQFPELRLVQFDSGKLEALAILLQKLKSEGRRVLILSQMILMLDILEMFLNFHYLTYVRIDENASSEQRQELMRSFNRDRRIFCAILSTHSRTTGINLVEADTVVFYDNDLNPVMDAKAQEWCDRIGRCKDIHIYRLVSGNSIEEKLLKNGTKDLIREVAAQGNDYSMAFLTQRTIQELFEVYSPMDDAGFPVKAEEFVVLSQEPSVTETIAPKIARPFIEALKSIEYLEEDAQKSAQEGVLGPHTDALSSDSENMPCDEEPSQLEELADFMEQLTPIEKYALNYLELFHTSIEQEKERNSEDAVMTAVRAWEFWNLKTLQEREARLRLEQEEAELLTYTREDAYSMEYVYEDVDGQTEVMPLWTPPTPPQDDSDIYLDSVMCLMYEATPIPEAKLPPVYVRKERKRHKTDPSAAGRKKKQRHGEAVVPPRSLFDRATPGLLKIRREGKEQKKNILLKQQVPFAKPLPTFAKPTAEPGQDNPEWLISEDWALLQAVKQLLELPLNLTIVSPAHTPNWDLVSDVVNSCSRIYRSSKQCRNRYENVIIPREEGKSKNNRPLRTSQIYAQDENATHTQLYTSHFDLMKMTAGKRSPPIKPLLGMNPFQKNPKHASVLAESGINYDKPLPPIQVASLRAERIAKEKKALADQQKAQQPAVAQPPPPQPQPPPPPQQPPPPLPQPQAAGSQPPAGPPAVQPQPQPQPQTQPQPVQAPAKAQPAITTGGSAAVLAGTIKTSVTGTSMPTGAVSGNVIVNTIAGVPAATFQSINKRLASPVAPGALTTPGGSAPAQVVHTQPPPRAVGSPATATPDLVSMATTQGVRAVTSVTASAVVTTNLTPVQTPARSLVPQVSQATGVQLPGKTITPAHFQLLRQQQQQQQQQQQQQQQQQQQQQQQQQQQQQQTTTTSQVQVPQIQGQAQSPAQIKAVGKLTPEHLIKMQKQKLQMPPQPPPPQAQSAPPQPAAQVQVQTSQPPQQQSPQLTTVTAPRPGALLTGTTVANLQVARLTRVPTSQLQSQGQMQTQAPQPAQVPLAKPPVVSVPAAVVSSPGVTTLPMNVAGISVAIGQPQKAAGQTVVAQPVHMQQLLKLKQQAVQQQKAIQPQAAQGPAAVQQKITAQQITTPGAQQKVAYAAQPALKTQFLTTPISQAQKLAGAQQVQTQIQVAKLPQVVQQQTPVASIQQVASASQQASPQTVALTQATAAGQQVQMIPAVTATAQVVQQKLIQQQVVTTASAPLQTPGAPNPAQVPASSDSPSQQPKLQMRVPAVRLKTPTKPPCQ

SEQ ID NO: 1032878 - protein, 2854 aa, Homo sapiens
MAPRRPVGLVGCSGLAARSAVAALIRAGSPWLRRPAAAGAFPEDVVMQHVSSSQSSQRHVQWPGACPGAGEEQPACSQPSLPLTLPSPSHQLQQLMVQTQSPTQPSPGPGQALQNVRAGAPGPGLGLCSSSPTGDFVDASVLVRQISLSPSSGGHFVFQDGSGLTQIAQGAQVQLQHPGTPITVRERRPSQPHTQSGGTIHHLGPQSPAAAGGAGLQPLASPSHITTANLPPQISSIIQGQLVQQQQVLQGPPLPRPLGFERTPGVLLPGAGGAAGFGMTSPPPPTSPSRTAVPPGLSSLPLTSVGNTGMKKVPKKLEEIPPASPEMAQMRKQCLDYHYQEMQALKEVFKEYLIELFFLQHFQGNMMDFLAFKERLYGPLQAYLRQNDLDIEEEEEEHFEVINDEVKVVARKHGQPGTPVAIATQLPPRTSAAFPAQQQPLQQIHMVTPVPGDVNAIKMEASKGSEHWRPQENQVHQRIAELRKAGLWSQRRLPKLQEAPRPKSHWDYLLEEMQWMATDFAQERRWKVAAAKKLVRTVVRHHEEKQLREERGKKEEQSRLRRIAASTAREIECFWSNIEQVVEIKLRVELEEKRKKALNLQKVSRRGKELRPKGFDALQESSLDSGMSGRKRKASISLTDDEVDDEEETIEEEEANEGVVDHQTELSNLAKEAELPLLDLMKLYEGAFLPSSQWPRPKPDGEDTSGEEDADDCPGDRESRKDLVLIDSLFIMDQFKAAERMNIGKPNAKDIADVTAVAEAILPKGSARVTTSVKFNAPSLLYGALRDYQKIGLDWLAKLYRKNLNGILADEAGLGKTVQIIAFFAHLACNEGNWGPHLVVVRSCNILKWELELKRWCPGLKILSYIGSHRELKAKRQEWAEPNSFHVCITSYTQFFRGLTAFTRVRWKCLVIDEMQRVKGMTERHWEAVFTLQSQQRLLLIDSPLHNTFLELWTMVHFLVPGISRPYLSSPLRAPSEESQDYYHKVVIRLHRVTQPFILRRTKRDVEKQLTKKYEHVLKCRLSNRQKALYEDVILQPGTQEALKSGHFVNVLSILVRLQRICNHPGLVEPRHPGSSYVAGPLEYPSASLILKALERDFWKEADLSMFDLIGLENKITRHEAELLSKKKIPRKLMEEISTSAAPAARPAAAKLKASRLFQPVQYGQKPEGRTVAFPSTHPPRTAAPTTASAAPQGPLRGRPPIATFSANPEAKAAAAPFQTSQASASAPRHQPASASSTAASPAHPAKLRAQTTAQAFTPGQPPPQPQAPSHAAGQSALPQRLVLPSQAQARLPSGEVVKIAQLASITGPQSRVAQPETPVTLQFQGSKFTLSHSQLRQLTAGQPLQLQGSVLQIVSAPGQPYLRAPGPVVMQTVSQAGAVHGALGSKPPAGGPSPAPLTPQVGVPGRVAVNALAVGEPGTASKPASPIGGPTQEEKTRLLKERLDQIYLVNERRCSQAPVYGRDLLRICALPSHGRVQWRGSLDGRRGKEAGPAHSYTSSSESPSELMLTLCRCGESLQDVIDRVAFVIPPVVAAPPSLRVPRPPPLYSHRMRILRQGLREHAAPYFQQLRQTTAPRLLQFPELRLVQFDSGKLEALAILLQKLKSEGRRVLILSQMILMLDILEMFLNFHYLTYVRIDENASSEQRQELMRSFNRDRRIFCAILSTHSRTTGINLVEADTVVFYDNDLNPVMDAKAQEWCDRIGRCKDIHIYRLVSGNSIEEKLLKNGTKDLIREVAAQGNDYSMAFLTQRTIQELFEVYSPMDDAGFPVKAEEFVVLSQEPSVTETIAPKIARPFIEALKSIEYLEEDAQKSAQEGVLGPHTDALSSDSENMPCDEEPSQLEELADFMEQLTPIEKYALNYLELFHTSIEQEKERNSEDAVMTAVRAWEFWNLKTLQEREARLRLEQEEAELLTYTREDAYSMEYVYEDVDGQTEVMPLWTPPTPPQDDSDIYLDSVMCLMYEATPIPEAKLPPVYVRKERKRHKTDPSAAGRKKKQRHGEAVVPPRSLFDRATPGLLKIRREGKEQKKNILLKQQVPFAKPLPTFAKPTAEPGQDNPEWLISEDWALLQAVKQLLELPLNLTIVSPAHTPNWDLVSDVVNSCSRIYRSSKQCRNRYENVIIPREEGKSKNNRPLRTSQIYAQDENATHTQLYTSHFDLMKMTAGKRSPPIKPLLGMNPFQKNPKHASVLAESGINYDKPLPPIQVASLRAERIAKEKKALADQQKAQQPAVAQPPPPQPQPPPPPQQPPPPLPQPQAAGSQPPAGPPAVQPQPQPQPQTQPQPVQAPAKAQPAITTGGSAAVLAGTIKTSVTGTSMPTGAVSGNVIVNTIAGVPAATFQSINKRLASPVAPGALTTPGGSAPAQVVHTQPPPRAVGSPATATPDLVSMATTQGVRAVTSVTASAVVTTNLTPVQTPARSLVPQVSQATGVQLPGKTITPAHFQLLRQQQQQQQQQQQQQQQQQQQQQQQQQQQQQQTTTTSQVQVPQIQGQAQSPAQIKAVGKLTPEHLIKMQKQKLQMPPQPPPPQAQSAPPQPAAQVQVQTSQPPQQQSPQLTTVTAPRPGALLTGTTVANLQVARLTRVPTSQLQSQGQMQTQAPQPAQVPLAKPPVVSVPAAVVSSPGVTTLPMNVAGISVAIGQPQKAAGQTVVAQPVHMQQLLKLKQQAVQQQKAIQPQAAQGPAAVQQKITAQQITTPGAQQKVAYAAQPALKTQFLTTPISQAQKLAGAQQVQTQIQVAKLPQVVQQQTPVASIQQVASASQQASPQTVALTQATAAGQQVQMIPAVTATAQVVQQKLIQQQVVTTASAPLQTPGAPNPAQVPASSDSPSQQPKLQMRVPAVRLKTPTKPPCQ

SEQ ID NO: 1032879 - protein, 275 aa, Homo sapiens
  misc_feature (76)..(76): Xaa can be any naturally occurring amino acid
MSRRGRDPARRLAKPPVVSVPAAVVSSPGVTTLPMNVAGISVAIGQPQKAAGQERVCWTPKTAVRAIAGQDMALYXLVRRDRAQFASSQTWHITAPEELSTWGPAAVQQKITAQQITTPGAQQKVAYAAQPALKTQFLTTPISQAQKLAGAQQVQTQIQVAKLPQVVQQQTPVASIQQVASASQQASPQTVALTQATAAGQQVQMIPAVTATAQVVQQKLIQQQVVTTASAPLQTPGAPNPAQVPASSDSPSQQPKLQMRVPAVRLKTPTKPPCQ

SEQ ID NO: 1032880 - protein, 3078 aa, Homo sapiens; identical to SEQ ID NO: 1032873

SEQ ID NO: 1032881 - protein, 2195 aa, Homo sapiens
AGRRRGFHPPALLTRPERSPEAQGERHIGYRREVIMHHGTGPQNVQHQLQRSRACPGSEGEEQPAHPNPPPSPAAPFAPSASPSAPQSPSYQIQQLMNRSPATGQNVNITLQSVGPVVGGNQQITLAPLPLPSPTSPGFQFSAQPRRFEHGSPSYIQVTSPLSQQVQTQSPTQPSPGPGQALQNVRAGAPGPGLGLCSSSPTGDFVDASVLVRQISLSPSSGGHFVFQDGSGLTQIAQGAQVQLQHPGTPITVRERRPSQPHTQSGGTIHHLGPQSPAAAGGAGLQPLASPSHITTANLPPQISSIIQGQLVQQQQVLQGPPLPRPLGFERTPGVLLPGAGGAAGFGMTSPPPPTSPSRTAVPPGLSSLPLTSVGNTGMKKVPKKLEEIPPASPEMAQMRKQCLDYHYQEMQALKEVFKEYLIELFFLQHFQGNMMDFLAFKERLYGPLQAYLRQNDLDIEEEEEEEEEEEEKSEVINDEQQALAGSLVAGAGSTVETDLFKRQQAMPSTGMAEQSKRPRLEVGHQGVVFQHPGADAGVPLQQLMPTAQGGMPPTPQAAQLAGQRQSQQQYDPSTGPPVQNAASLHTPLPQLPGRLPPAGVPTAALSSALQFAQQPQVVEAQTQLQIPVKTQQPNVPIPAPPSSQLPIPPSQPAQLALHVPTPGKVQVQASQLSSLPQMVASTRLPVDPAPPCPRPLPTSSTSSLAPVSGSGPGPSPARSSPVNRPSSATNKALSPVTSRTPGVVASAPTKPQSPAQNATSSQDSSQDTLTEQITLENQVHQRIAELRKAGLWSQRRLPKLQEAPRPKSHWDYLLEEMQWMATDFAQERRWKVAAAKKLVRTVVRHHEEKQLREERGKKEEQSRLRRIAASTAREIECFWSNIEQVVEIKLRVELEEKRKKALNLQKVSRRGKELRPKGFDALQESSLDSGMSGRKRKASISLTDDEVDDEEETIEEEEANEGVVDHQTELSNLAKEAELPLLDLMKLYEGAFLPSSQWPRPKPDGEDTSGEEDADDCPGDRESRKDLVLIDSLFIMDQFKAAERMNIGKPNAKDIADVTAVAEAILPKGSARVTTSVKFNAPSLLYGALRDYQKIGLDWLAKLYRKNLNGILADEAGLGKTVQIIAFFAHLACNEGNWGPHLVVVRSCNILKWELELKRWCPGLKILSYIGSHRELKAKRQEWAEPNSFHVCITSYTQFFRGLTAFTRVRWKCLVIDEMQRVKGMTERHWEAVFTLQSQQRLLLIDSPLHNTFLELWTMVHFLVPGISRPYLSSPLRAPSEESQDYYHKVVIRLHRVTQPFILRRTKRDVEKQLTKKYEHVLKCRLSNRQKALYEDVILQPGTQEALKSGHFVNVLSILVRLQRICNHPGLVEPRHPGSSYVAGPLEYPSASLILKALERDFWKEADLSMFDLIGLENKITRHEAELLSKKKIPRKLMEEISTSAAPAARPAAAKLKASRLFQPVQYGQKPEGRTVAFPSTHPPRTAAPTTASAAPQGPLRGRPPIATFSANPEAKGGEVVKIAQLASITGPQSRVAQPETPVTLQFQGSKFTLSHSQLRQLTAGQPLQLQGSVLQIVSAPGQPYLRAPGPVVMQTVSQAGAVHGALGSKPPAGGPSPAPLTPQVGVPGRVAVNALAVGEPGTASKPASPIGGPTQEEKTRLLKERLDQIYLVNERRCSQAPVYGRDLLRICALPSHGRVQWRGSLDGRRGKEAGPAHSYTSSSESPSELMLTLCRCGESLQDVIDRVAFVIPPVVAAPPSLRVPRPPPLYSHRMRILRQGLREHAAPYFQQLRQTTAPRLLQFPELRLVQFDSGKLEALAILLQKLKSEGRRVLILSQMILMLDILEMFLNFHYLTYVRIDENASSEQRQELMRSFNRDRRIFCAILSTHSRTTGINLVEADTVVFYDNDLNPVMDAKAQEWCDRIGRCKDIHIYRLVSGNSIEEKLLKNGTKDLIREVAAQGNDYSMAFLTQRTIQELFEVYSPMDDAGFPVKAEEFVVLSQEPSVTETIAPKIARPFIEALKSIEYLEEDAQKSAQEGVLGPHTDALSSDSENMPCDEEPSQLEELADFMEQLTPIEKYALNYLELFHTSIEQEKERNSEDAVMTAVRAWEFWNLKTLQEREARLRLEQEEAELLTYTREDAYSMVPGPGPSCPLAPLLRGTCAAMFGLFKAVYIDMRKCLGIFTSHINTT

SEQ ID NO: 1032882 - protein, 967 aa, Homo sapiens
MAPRRPVGLVGCSGLAARSAVAALIRAGSPWLRRPAAAGAFPEDVVMQHVSSSQSSQRHVQWPGACPGAGEEQPACSQPSLPLTLPSPSHQLQQLMVQTQSPTQPSPGPGQALQNVRAGAPGPGLGLCSSSPTGDFVDASVLVRQISLSPSSGGHFVFQDGSGLTQIAQGAQVQLQHPGTPITVRERRPSQPHTQSGGTIHHLGPQSPAAAGGAGLQPLASPSHITTANLPPQISSIIQGQLVQQQQVLQGPPLPRPLGFERTPGVLLPGAGGAAGFGMTSPPPPTSPSRTAVPPGLSSLPLTSVGNTGMKKVPKKLEEIPPASPEMAQMRKQCLDYHYQEMQALKEVFKEYLIELFFLQHFQGNMMDFLAFKERLYGPLQAYLRQNDLDIEEEEEEEEEEEEKSEVINDEVKVVTGKDGQTGTPVAIATQLPPKVSAAFSSQQQPFQQALAGSLVAGAGSTVETDLFKRQQAMPSTGMAGGMPPTPQAAQLAGQRQSQQQYDPSTGPPVQNAASLHTPLPQLPGRLPPAGVPTAALSSALQFAQQPQVVEAQTQLQIPVKTQQPNVPIPAPPSSQLPIPPSQPAQLALHVPTPGKVQVQASQLSSLPQMVASTRLPVDPAPPCPRPLPTSSTSSLAPVSGSGPGPSPARSSPVNRPSSATNKALSPVTSRTPGVVASAPTKPQSPAQNATSSQDSSQDTLTEQITLENQVHQRIAELRKAGLWSQRRLPKLQEAPRPKSHWDYLLEEMQWMATDFAQERRWKVAAAKKLVRTVARQLQDRRRKEAGGRKEEPTRLRQRSPGLPEKSRVPGLDCAGKDSSILEASAPLENKSHVEHLIRLQKQKLQLLPPPPPPPGPARGTANHTSASAAVTRLPQQSPQLTTVTAPRPRALLMGTTMANLQTRVSTSHLQGPRLTSALTYQMAQVAVATPPVVSVLAVVVLSARVTVLPSTQRDQCCDKAAAKSGR

SEQ ID NO: 1032883 - protein, 974 aa, Homo sapiens
MAPRRPVGLVGCSGLAARSAVAALIRAGSPWLRRPAAAGAFPEDVVMQHVSSSQSSQRHVQWPGACPGAGEEQPACSQPSLPLTLPSPSHQLQQLMVQTQSPTQPSPGPGQALQNVRAGAPGPGLGLCSSSPTGDFVDASVLVRQISLSPSSGGHFVFQDGSGLTQIAQGAQVQLQHPGTPITVRERRPSQPHTQSGGTIHHLGPQSPAAAGGAGLQPLASPSHITTANLPPQISSIIQGQLVQQQQVLQGPPLPRPLGFERTPGVLLPGAGGAAGFGMTSPPPPTSPSRTAVPPGLSSLPLTSVGNTGMKKVPKKLEEIPPASPEMAQMRKQCLDYHYQEMQALKEVFKEYLIELFFLQHFQGNMMDFLAFKERLYGPLQAYLRQNDLDIEEEEEEEEEEEEKSEVINDEVKVVTGKDGQTGTPVAIATQLPPKVSAAFSSQQQPFQQALAGSLVAGAGSTVETDLFKRQQAMPSTGMAGGMPPTPQAAQLAGQRQSQQQYDPSTGPPVQNAASLHTPLPQLPGRLPPAGVPTAALSSALQFAQQPQVVEAQTQLQIPVKTQQPNVPIPAPPSSQLPIPPSQPAQLALHVPTPGKVQVQASQLSSLPQMVASTRLPVDPAPPCPRPLPTSSTSSLAPVSGSGPGPSPARSSPVNRPSSATNKALSPVTSRTPGVVASAPTKPQSPAQNATSSQDSSQDTLTEQITLENQVHQRIAELRKAGLWSQRRLPKLQEAPRPKSHWDYLLEEMQWMATDFAQERRWKVAAAKKLVRTVARQLQDRRRKEAGGRKEEPTRLRQRSPGLPEKSRVPGLDCAGKDSSILEASAPLENKSHVEHLIRLQKQKLQLLPPPPPPPGPARGTANHTSASAAVTRLPQQSPQLTTVTAPRPRALLMGTTMANLQTRVSTSHLQGPRLTSALTYQMAQVAVATPPVVSVLAVVVLSARVTVLPSTQRDQCVGSRVMAQIDRPHRAFV

SEQ ID NO: 1032884 - protein, 103 aa, Homo sapiens
MCALHVSSEVDSTLLRCSAAVPELTTDPSAGPAPDKGLPALGVLCSVARKHGQPGTPVAIATQLPPRTSAAFPAQQQPLQVLSDGSTVQLPRLSSLGFEDSMC

SEQ ID NO: 1032885 - protein, 416 aa, Homo sapiens
MAPRRPVGLVGCSGLAARSAVAALIRAGSPWLRRPAAAGAFPEDVVMQHVSSSQSSQRHVQWPGACPGAGEEQPACSQPSLPLTLPSPSHQLQQLMVQTQSPTQPSPGPGQALQNVRAGAPGPGLGLCSSSPTGDFVDASVLVRQISLSPSSGGHFVFQDGSGLTQIAQGAQVQLQHPGTPITVRERRPSQPHTQSGGTIHHLGPQSPAAAGGAGLQPLASPSHITTANLPPQISSIIQGQLVQQQQVLQGPPLPRPLGFERTPGVLLPGAGGAAGFGMTSPPPPTSPSRTAVPPGLSSLPLTSVGNTGMKKVPKKLEEIPPASPEMAQMRKQCLDYHYQEMQALKEVFKEYLIELFFLQHFQGNMMDFLAFKERLYGPLQAYLRQNDLDIEEEEEEEEEEEEKSEVINDEVRKRS

SEQ ID NO: 1032886 - protein, 534 aa, Homo sapiens
AGRRRGFHPPALLTRPERSPEAQGERHIGYRREVIMHHGTGPQNVQHQLQRSRACPGSEGEEQPAHPNPPPSPAAPFAPSASPSAPQSPSYQIQQLMNRSPATGQNVNITLQSVGPVVGGNQQITLAPLPLPSPTSPGFQFSAQPRRFEHGSPSYIQVTSPLSQQVQTQSPTQPSPGPGQALQNVRAGAPGPGLGLCSSSPTGDFVDASVLVRQISLSPSSGGHFVFQDGSGLTQIAQGAQVQLQHPGTPITVRERRPSQPHTQSGGTIHHLGPQSPAAAGGAGLQPLASPSHITTANLPPQISSIIQGQLVQQQQVLQGPPLPRPLGFERTPGVLLPGAGGAAGFGMTSPPPPTSPSRTAVPPGLSSLPLTSVGNTGMKKVPKKLEEIPPASPEMAQMRKQCLDYHYQEMQALKEVFKEYLIELFFLQHFQGNMMDFLAFKERLYGPLQAYLRQNDLDIEEEEEEHFEVINDEVKVVARKHGQPGTPVAIATQLPPRTSAAFPAQQQPLQVLSDGSTVQLPRLSSLGFEDSMC

SEQ ID NO: 1032887 - protein, 3106 aa, Homo sapiens
AGRRRGFHPPALLTRPERSPEAQGERHIGYRREVIMHHGTGPQNVQHQLQRSRACPGSEGEEQPAHPNPPPSPAAPFAPSASPSAPQSPSYQIQQLMNRSPATGQNVNITLQSVGPVVGGNQQITLAPLPLPSPTSPGFQFSAQPRRFEHGSPSYIQVTSPLSQQVQTQSPTQPSPGPGQALQNVRAGAPGPGLGLCSSSPTGDFVDASVLVRQISLSPSSGGHFVFQDGSGLTQIAQGAQVQLQHPGTPITVRERRPSQPHTQSGGTIHHLGPQSPAAAGGAGLQPLASPSHITTANLPPQISSIIQGQLVQQQQVLQGPPLPRPLGFERTPGVLLPGAGGAAGFGMTSPPPPTSPSRTAVPPGLSSLPLTSVGNTGMKKVPKKLEEIPPASPEMAQMRKQCLDYHYQEMQALKEVFKEYLIELFFLQHFQGNMMDFLAFKERLYGPLQAYLRQNDLDIEEEEEEEEEEEEKSEVINDEQQALAGSLVAGAGSTVETDLFKRQQAMPSTGMAEQSKRPRLEVGHQGVVFQHPGADAGVPLQQLMPTAQGGMPPTPQAAQLAGQRQSQQQYDPSTGPPVQNAASLHTPLPQLPGRLPPAGVPTAALSSALQFAQQPQVVEAQTQLQIPVKTQQPNVPIPAPPSSQLPIPPSQPAQLALHVPTPGKVQVQASQLSSLPQMVASTRLPVDPAPPCPRPLPTSSTSSLAPVSGSGPGPSPARSSPVNRPSSATNKALSPVTSRTPGVVASAPTKPQSPAQNATSSQDSSQDTLTEQITLENQVHQRIAELRKAGLWSQRRLPKLQEAPRPKSHWDYLLEEMQWMATDFAQERRWKVAAAKKLVRTVVRHHEEKQLREERGKKEEQSRLRRIAASTAREIECFWSNIEQVVEIKLRVELEEKRKKALNLQKVSRRGKELRPKGFDALQESSLDSGMSGRKRKASISLTDDEVDDEEETIEEEEANEGVVDHQTELSNLAKEAELPLLDLMKLYEGAFLPSSQWPRPKPDGEDTSGEEDADDCPGDRESRKDLVLIDSLFIMDQFKAAERMNIGKPNAKDIADVTAVAEAILPKGSARVTTSVKFNAPSLLYGALRDYQKIGLDWLAKLYRKNLNGILADEAGLGKTVQIIAFFAHLACNEGNWGPHLVVVRSCNILKWELELKRWCPGLKILSYIGSHRELKAKRQEWAEPNSFHVCITSYTQFFRGLTAFTRVRWKCLVIDEMQRVKGMTERHWEAVFTLQSQQRLLLIDSPLHNTFLELWTMVHFLVPGISRPYLSSPLRAPSEESQDYYHKVVIRLHRVTQPFILRRTKRDVEKQLTKKYEHVLKCRLSNRQKALYEDVILQPGTQEALKSGHFVNVLSILVRLQRICNHPGLVEPRHPGSSYVAGPLEYPSASLILKALERDFWKEADLSMFDLIGLENKITRHEAELLSKKKIPRKLMEEISTSAAPAARPAAAKLKASRLFQPVQYGQKPEGRTVAFPSTHPPRTAAPTTASAAPQGPLRGRPPIATFSANPEAKGGEVVKIAQLASITGPQSRVAQPETPVTLQFQGSKFTLSHSQLRQLTAGQPLQLQGSVLQIVSAPGQPYLRAPGPVVMQTVSQAGAVHGALGSKPPAGGPSPAPLTPQVGVPGRVAVNALAVGEPGTASKPASPIGGPTQEEKTRLLKERLDQIYLVNERRCSQAPVYGRDLLRICALPSHGRVQWRGSLDGRRGKEAGPAHSYTSSSESPSELMLTLCRCGESLQDVIDRVAFVIPPVVAAPPSLRVPRPPPLYSHRMRILRQGLREHAAPYFQQLRQTTAPRLLQFPELRLVQFDSGMRQLGAWPVRELHRPWMMRRSDVIRFPGKLEALAILLQKLKSEGRRVLILSQMILMLDILEMFLNFHYLTYVRIDENASSEQRQELMRSFNRDRRIFCAILSTHSRTTGINLVEADTVVFYDNDLNPVMDAKAQEWCDRIGRCKDIHIYRLVSGNSIEEKLLKNGTKDLIREVAAQGNDYSMAFLTQRTIQELFEVYSPMDDAGFPVKAEEFVVLSQEPSVTETIAPKIARPFIEALKSIEYLEEDAQKSAQEGVLGPHTDALSSDSENMPCDEEPSQLEELADFMEQLTPIEKYALNYLELFHTSIEQEKERNSEDAVMTAVRAWEFWNLKTLQEREARLRLEQEEAELLTYTREDAYSMEYVYEDVDGQTEVMPLWTPPTPPQDDSDIYLDSVMCLMYEATPIPEAKLPPVYVRKERKRHKTDPSAAGRKKKQRHGEAVVPPRSLFDRATPGLLKIRREGKEQKKNILLKQQVPFAKPLPTFAKPTAEPGQDNPEWLISEDWALLQAVKQLLELPLNLTIVSPAHTPNWDLVSDVVNSCSRIYRSSKQCRNRYENVIIPREEGKSKNNRPLRTSQIYAQDENATHTQLYTSHFDLMKMTAGKRSPPIKPLLGMNPFQKNPKHASVLAESGINYDKPLPPIQVASLRAERIAKEKKALADQQKAQQPAVAQPPPPQPQPPPPPQQPPPPLPQPQAAGSQPPAGPPAVQPQPQPQPQTQPQPVQAPAKAQPAITTGGSAAVLAGTIKTSVTGTSMPTGAVSGNVIVNTIAGVPAATFQSINKRLASPVAPGALTTPGGSAPAQVVHTQPPPRAVGSPATATPDLVSMATTQGVRAVTSVTASAVVTTNLTPVQTPARSLVPQVSQATGVQLPGKTITPAHFQLLRQQQQQQQQQQQQQQQQQQQQQQQQQQQQQQTTTTSQVQVPQIQGQAQSPAQIKAVGKLTPEHLIKMQKQKLQMPPQPPPPQAQSAPPQPAAQVQVQTSQPPQQQSPQLTTVTAPRPGALLTGTTVANLQVARLTRVPTSQLQSQGQMQTQAPQPAQVPLAKPPVVSVPAAVVSSPGVTTLPMNVAGISVAIGQPQKAAGQTVVAQPVHMQQLLKLKQQAVQQQKAIQPQAAQGPAAVQQKITAQQITTPGAQQKVAYAAQPALKTQFLTTPISQAQKLAGAQQVQTQIQVAKLPQVVQQQTPVASIQQVASASQQASPQTVALTQATAAGQQVQMIPAVTATAQVVQQKLIQQQVVTTASAPLQTPGAPNPAQVPASSDSPSQQPKLQMRVPAVRLKTPTKPPCQ

SEQ ID NO: 1032888 - protein, 2981 aa, Homo sapiens
MQHVSSSQSSQRHVQWPGACPGAGEEQPACSQPSLPLTLPSPSHQLQQLMDGSGLTQIAQGAQVQLQHPGTPITVRERRPSQPHTQSGGTIHHLGPQSPAAAGGAGLQPLASPSHITTANLPPQISSIIQGQLVQQQQVLQGPPLPRPLGFERTPGVLLPGAGGAAGFGMTSPPPPTSPSRTAVPPGLSSLPLTSVGNTGMKKVPKKLEEIPPASPEMAQMRKQCLDYHYQEMQALKEVFKEYLIELFFLQHFQGNMMDFLAFKERLYGPLQAYLRQNDLDIEEEEEEEEEEEEKSEVINDEVKVVTGKDGQTGTPVAIATQLPPKVSAAFSSQQQPFQQALAGSLVAGAGSTVETDLFKRQQAMPSTGMAGGMPPTPQAAQLAGQRQSQQQYDPSTGPPVQNAASLHTPLPQLPGRLPPAGVPTAALSSALQFAQQPQVVEAQTQLQIPVKTQQPNVPIPAPPSSQLPIPPSQPAQLALHVPTPGKVQVQASQLSSLPQMVASTRLPVDPAPPCPRPLPTSSTSSLAPVSGSGPGPSPARSSPVNRPSSATNKALSPVTSRTPGVVASAPTKPQSPAQNATSSQDSSQDTLTEQITLENQVHQRIAELRKAGLWSQRRLPKLQEAPRPKSHWDYLLEEMQWMATDFAQERRWKVAAAKKLVRTVVRHHEEKQLREERGKKEEQSRLRRIAASTAREIECFWSNIEQVVEIKLRVELEEKRKKALNLQKVSRRGKELRPKGFDALQESSLDSGMSGRKRKASISLTDDEVDDEEETIEEEEANEGVVDHQTELSNLAKEAELPLLDLMKLYEGAFLPSSQWPRPKPDGEDTSGEEDADDCPGDRESRKDLVLIDSLFIMDQFKAAERMNIGKPNAKDIADVTAVAEAILPKGSARVTTSVKFNAPSLLYGALRDYQKIGLDWLAKLYRKNLNGILADEAGLGKTVQIIAFFAHLACNEGNWGPHLVVVRSCNILKWELELKRWCPGLKILSYIGSHRELKAKRQEWAEPNSFHVCITSYTQFFRGLTAFTRVRWKCLVIDEMQRVKGMTERHWEAVFTLQSQQRLLLIDSPLHNTFLELWTMVHFLVPGISRPYLSSPLRAPSEESQDYYHKVVIRLHRVTQPFILRRTKRDVEKQLTKKYEHVLKCRLSNRQKALYEDVILQPGTQEALKSGHFVNVLSILVRLQRICNHPGLVEPRHPGSSYVAGPLEYPSASLILKALERDFWKEADLSMFDLIGLENKITRHEAELLSKKKIPRKLMEEISTSAAPAARPAAAKLKASRLFQPVQYGQKPEGRTVAFPSTHPPRTAAPTTASAAPQGPLRGRPPIATFSANPEAKAAAAPFQTSQASASAPRHQPASASSTAASPAHPAKLRAQTTAQAFTPGQPPPQPQAPSHAAGQSALPQRLVLPSQAQARLPSGEVVKIAQLASITGPQSRVAQPETPVTLQFQGSKFTLSHSQLRQLTAGQPLQLQGSVLQIVSAPGQPYLRAPGPVVMQTVSQAGAVHGALGSKPPAGGPSPAPLTPQVGVPGRVAVNALAVGEPGTASKPASPIGGPTQEEKTRLLKERLDQIYLVNERRCSQAPVYGRDLLRICALPSHGRVQWRGSLDGRRGKEAGPAHSYTSSSESPSELMLTLCRCGESLQDVIDRVAFVIPPVVAAPPSLRVPRPPPLYSHRMRILRQGLREHAAPYFQQLRQTTAPRLLQFPELRLVQFDSGKLEALAILLQKLKSEGRRVLILSQMILMLDILEMFLNFHYLTYVRIDENASSEQRQELMRSFNRDRRIFCAILSTHSRTTGINLVEADTVVFYDNDLNPVMDAKAQEWCDRIGRCKDIHIYRLVSGNSIEEKLLKNGTKDLIREVAAQGNDYSMAFLTQRTIQELFEVYSPMDDAGFPVKAEEFVVLSQEPSVTETIAPKIARPFIEALKSIEYLEEDAQKSAQEGVLGPHTDALSSDSENMPCDEEPSQLEELADFMEQLTPIEKYALNYLELFHTSIEQEKERNSEDAVMTAVRAWEFWNLKTLQEREARLRLEQEEAELLTYTREDAYSMEYVYEDVDGQTEVMPLWTPPTPPQDDSDIYLDSVMCLMYEATPIPEAKLPPVYVRKERKRHKTDPSAAGRKKKQRHGEAVVPPRSLFDRATPGLLKIRREGKEQKKNILLKQQVPFAKPLPTFAKPTAEPGQDNPEWLISEDWALLQAVKQLLELPLNLTIVSPAHTPNWDLVSDVVNSCSRIYRSSKQCRNRYENVIIPREEGKSKNNRPLRTSQIYAQDENATHTQLYTSHFDLMKMTAGKRSPPIKPLLGMNPFQKNPKHASVLAESGINYDKPLPPIQVASLRAERIAKEKKALADQQKAQQPAVAQPPPPQPQPPPPPQQPPPPLPQPQAAGSQPPAGPPAVQPQPQPQPQTQPQPVQAPAKAQPAITTGGSAAVLAGTIKTSVTGTSMPTGAVSGNVIVNTIAGVPAATFQSINKRLASPVAPGALTTPGGSAPAQVVHTQPPPRAVGSPATATPDLVSMATTQGVRAVTSVTASAVVTTNLTPVQTPARSLVPQVSQATGVQLPGKTITPAHFQLLRQQQQQQQQQQQQQQQQQQQQQQQQQQQQQQTTTTSQVQVPQIQGQAQSPAQIKAVGKLTPEHLIKMQKQKLQMPPQPPPPQAQSAPPQPAAQVQVQTSQPPQQQSPQLTTVTAPRPGALLTGTTVANLQVARLTRVPTSQLQSQGQMQTQAPQPAQVPLAKPPVVSVPAAVVSSPGVTTLPMNVAGISVAIGQPQKAAGQTVVAQPVHMQQLLKLKQQAVQQQKAIQPQAAQGPAAVQQKITAQQITTPGAQQKVAYAAQPALKTQFLTTPISQAQKLAGAQQVQTQIQVAKLPQVVQQQTPVASIQQVASASQQASPQTVALTQATAAGQQVQMIPAVTATAQVVQQKLIQQQVVTTASAPLQTPGAPNPAQVPASSDSPSQQPKLQMRVPAVRLKTPTKPPCQ

SEQ ID NO: 1032889 - protein, 3044 aa, Homo sapiens
MQHVSSSQSSQRHVQWPGACPGAGEEQPACSQPSLPLTLPSPSHQLQQLMVQTQSPTQPSPGPGQALQNVRAGAPGPGLGLCSSSPTGDFVDASVLVRQISLSPSSGGHFVFQDGSGLTQIAQGAQVQLQHPGTPITVRERRPSQPHTQSGGTIHHLGPQSPAAAGGAGLQPLASPSHITTANLPPQISSIIQGQLVQQQQVLQGPPLPRPLGFERTPGVLLPGAGGAAGFGMTSPPPPTSPSRTAVPPGLSSLPLTSVGNTGMKKVPKKLEEIPPASPEMAQMRKQCLDYHYQEMQALKEVFKEYLIELFFLQHFQGNMMDFLAFKERLYGPLQAYLRQNDLDIEEEEEEEEEEEEKSEVINDEVKVVTGKDGQTGTPVAIATQLPPKVSAAFSSQQQPFQQALAGSLVAGAGSTVETDLFKRQQAMPSTGMAGGMPPTPQAAQLAGQRQSQQQYDPSTGPPVQNAASLHTPLPQLPGRLPPAGVPTAALSSALQFAQQPQVVEAQTQLQIPVKTQQPNVPIPAPPSSQLPIPPSQPAQLALHVPTPGKVQVQASQLSSLPQMVASTRLPVDPAPPCPRPLPTSSTSSLAPVSGSGPGPSPARSSPVNRPSSATNKALSPVTSRTPGVVASAPTKPQSPAQNATSSQDSSQDTLTEQITLENQVHQRIAELRKAGLWSQRRLPKLQEAPRPKSHWDYLLEEMQWMATDFAQERRWKVAAAKKLVRTVVRHHEEKQLREERGKKEEQSRLRRIAASTAREIECFWSNIEQVVEIKLRVELEEKRKKALNLQKVSRRGKELRPKGFDALQESSLDSGMSGRKRKASISLTDDEVDDEEETIEEEEANEGVVDHQTELSNLAKEAELPLLDLMKLYEGAFLPSSQWPRPKPDGEDTSGEEDADDCPGDRESRKDLVLIDSLFIMDQFKAAERMNIGKPNAKDIADVTAVAEAILPKGSARVTTSVKFNAPSLLYGALRDYQKIGLDWLAKLYRKNLNGILADEAGLGKTVQIIAFFAHLACNEGNWGPHLVVVRSCNILKWELELKRWCPGLKILSYIGSHRELKAKRQEWAEPNSFHVCITSYTQFFRGLTAFTRVRWKCLVIDEMQRVKGMTERHWEAVFTLQSQQRLLLIDSPLHNTFLELWTMVHFLVPGISRPYLSSPLRAPSEESQDYYHKVVIRLHRVTQPFILRRTKRDVEKQLTKKYEHVLKCRLSNRQKALYEDVILQPGTQEALKSGHFVNVLSILVRLQRICNHPGLVEPRHPGSSYVAGPLEYPSASLILKALERDFWKEADLSMFDLIGLENKITRHEAELLSKKKIPRKLMEEISTSAAPAARPAAAKLKASRLFQPVQYGQKPEGRTVAFPSTHPPRTAAPTTASAAPQGPLRGRPPIATFSANPEAKAAAAPFQTSQASASAPRHQPASASSTAASPAHPAKLRAQTTAQAFTPGQPPPQPQAPSHAAGQSALPQRLVLPSQAQARLPSGEVVKIAQLASITGPQSRVAQPETPVTLQFQGSKFTLSHSQLRQLTAGQPLQLQGSVLQIVSAPGQPYLRAPGPVVMQTVSQAGAVHGALGSKPPAGGPSPAPLTPQVGVPGRVAVNALAVGEPGTASKPASPIGGPTQEEKTRLLKERLDQIYLVNERRCSQAPVYGRDLLRICALPSHGRVQWRGSLDGRRGKEAGPAHSYTSSSESPSELMLTLCRCGESLQDVIDRVAFVIPPVVAAPPSLRVPRPPPLYSHRMRILRQGLREHAAPYFQQLRQTTAPRLLQFPELRLVQFDSGKLEALAILLQKLKSEGRRVLILSQMILMLDILEMFLNFHYLTYVRIDENASSEQRQELMRSFNRDRRIFCAILSTHSRTTGINLVEADTVVFYDNDLNPVMDAKAQEWCDRIGRCKDIHIYRLVSGNSIEEKLLKNGTKDLIREVAAQGNDYSMAFLTQRTIQELFEVYSPMDDAGFPVKAEEFVVLSQEPSVTETIAPKIARPFIEALKSIEYLEEDAQKSAQEGVLGPHTDALSSDSENMPCDEEPSQLEELADFMEQLTPIEKYALNYLELFHTSIEQEKERNSEDAVMTAVRAWEFWNLKTLQEREARLRLEQEEAELLTYTREDAYSMEYVYEDVDGQTEVMPLWTPPTPPQDDSDIYLDSVMCLMYEATPIPEAKLPPVYVRKERKRHKTDPSAAGRKKKQRHGEAVVPPRSLFDRATPGLLKIRREGKEQKKNILLKQQVPFAKPLPTFAKPTAEPGQDNPEWLISEDWALLQAVKQLLELPLNLTIVSPAHTPNWDLVSDVVNSCSRIYRSSKQCRNRYENVIIPREEGKSKNNRPLRTSQIYAQDENATHTQLYTSHFDLMKMTAGKRSPPIKPLLGMNPFQKNPKHASVLAESGINYDKPLPPIQVASLRAERIAKEKKALADQQKAQQPAVAQPPPPQPQPPPPPQQPPPPLPQPQAAGSQPPAGPPAVQPQPQPQPQTQPQPVQAPAKAQPAITTGGSAAVLAGTIKTSVTGTSMPTGAVSGNVIVNTIAGVPAATFQSINKRLASPVAPGALTTPGGSAPAQVVHTQPPPRAVGSPATATPDLVSMATTQGVRAVTSVTASAVVTTNLTPVQTPARSLVPQVSQATGVQLPGKTITPAHFQLLRQQQQQQQQQQQQQQQQQQQQQQQQQQQQQQTTTTSQVQVPQIQGQAQSPAQIKAVGKLTPEHLIKMQKQKLQMPPQPPPPQAQSAPPQPAAQVQVQTSQPPQQQSPQLTTVTAPRPGALLTGTTVANLQVARLTRVPTSQLQSQGQMQTQAPQPAQVPLAKPPVVSVPAAVVSSPGVTTLPMNVAGISVAIGQPQKAAGQTVVAQPVHMQQLLKLKQQAVQQQKAIQPQAAQGPAAVQQKITAQQITTPGAQQKVAYAAQPALKTQFLTTPISQAQKLAGAQQVQTQIQVAKLPQVVQQQTPVASIQQVASASQQASPQTVALTQATAAGQQVQMIPAVTATAQVVQQKLIQQQVVTTASAPLQTPGAPNPAQVPASSDSPSQQPKLQMRVPAVRLKTPTKPPCQ

SEQ ID NO: 1032890 - protein, 1826 aa, Homo sapiens
MLRVSFSTGSTQEALKSGHFVNVLSILVRLQRICNHPGLVEPRHPGSSYVAGPLEYPSASLILKALERDFWKEADLSMFDLIGLENKITRHEAELLSKKKIPRKLMEEISTSAAPAARPAAAKLKASRLFQPVQYGQKPEGRTVAFPSTHPPRTAAPTTASAAPQGPLRGRPPIATFSANPEAKAAAAPFQTSQASASAPRHQPASASSTAASPAHPAKLRAQTTAQAFTPGQPPPQPQAPSHAAGQSALPQRLVLPSQAQARLPSGEVVKIAQLASITGPQSRVAQPETPVTLQFQGSKFTLSHSQLRQLTAGQPLQLQGSVLQIVSAPGQPYLRAPGPVVMQTVSQAGAVHGALGSKPPAGGPSPAPLTPQVGVPGRVAVNALAVGEPGTASKPASPIGGPTQEEKTRLLKERLDQIYLVNERRCSQAPVYGRDLLRICALPSHGRVQWRGSLDGRRGKEAGPAHSYTSSSESPSELMLTLCRCGESLQDVIDRVAFVIPPVVAAPPSLRVPRPPPLYSHRMRILRQGLREHAAPYFQQLRQTTAPRLLQFPELRLVQFDSGKLEALAILLQKLKSEGRRVLILSQMILMLDILEMFLNFHYLTYVRIDENASSEQRQELMRSFNRDRRIFCAILSTHSRTTGINLVEADTVVFYDNDLNPVMDAKAQEWCDRIGRCKDIHIYRLVSGNSIEEKLLKNGTKDLIREVAAQGNDYSMAFLTQRTIQELFEVYSPMDDAGFPVKAEEFVVLSQEPSVTETIAPKIARPFIEALKSIEYLEEDAQKSAQEGVLGPHTDALSSDSENMPCDEEPSQLEELADFMEQLTPIEKYALNYLELFHTSIEQEKERNSEDAVMTAVRAWEFWNLKTLQEREARLRLEQEEAELLTYTREDAYSMEYVYEDVDGQTEVMPLWTPPTPPQDDSDIYLDSVMCLMYEATPIPEAKLPPVYVRKERKRHKTDPSAAGRKKKQRHGEAVVPPRSLFDRATPGLLKIRREGKEQKKNILLKQQVPFAKPLPTFAKPTAEPGQDNPEWLISEDWALLQAVKQLLELPLNLTIVSPAHTPNWDLVSDVVNSCSRIYRSSKQCRNRYENVIIPREEGKSKNNRPLRTSQIYAQDENATHTQLYTSHFDLMKMTAGKRSPPIKPLLGMNPFQKNPKHASVLAESGINYDKPLPPIQVASLRAERIAKEKKALADQQKAQQPAVAQPPPPQPQPPPPPQQPPPPLPQPQAAGSQPPAGPPAVQPQPQPQPQTQPQPVQAPAKAQPAITTGGSAAVLAGTIKTSVTGTSMPTGAVSGNVIVNTIAGVPAATFQSINKRLASPVAPGALTTPGGSAPAQVVHTQPPPRAVGSPATATPDLVSMATTQGVRAVTSVTASAVVTTNLTPVQTPARSLVPQVSQATGVQLPGKTITPAHFQLLRQQQQQQQQQQQQQQQQQQQQQQQQQQQQQQTTTTSQVQVPQIQGQAQSPAQIKAVGKLTPEHLIKMQKQKLQMPPQPPPPQAQSAPPQPAAQVQVQTSQPPQQQSPQLTTVTAPRPGALLTGTTVANLQVARLTRVPTSQLQSQGQMQTQAPQPAQVPLAKPPVVSVPAAVVSSPGVTTLPMNVAGISVAIGQPQKAAGQTVVAQPVHMQQLLKLKQQAVQQQKAIQPQAAQGPAAVQQKITAQQITTPGAQQKVAYAAQPALKTQFLTTPISQAQKLAGAQQVQTQIQVAKLPQVVQQQTPVASIQQVASASQQASPQTVALTQATAAGQQVQMIPAVTATAQVVQQKLIQQQVVTTASAPLQTPGAPNPAQVPASSDSPSQQPKLQMRVPAVRLKTPTKPPCQ

SEQ ID NO: 1032891 - protein, 2216 aa, Homo sapiens
AGRRRGFHPPALLTRPERSPEAQGERHIGYRREVIMHHGTGPQNVQHQLQRSRACPGSEGEEQPAHPNPPPSPAAPFAPSASPSAPQSPSYQIQQLMNRSPATGQNVNITLQSVGPVVGGNQQITLAPLPLPSPTSPGFQFSAQPRRFEHGSPSYIQVTSPLSQQVQTQSPTQPSPGPGQALQNVRAGAPGPGLGLCSSSPTGDFVDASVLVRQISLSPSSGGHFVFQDGSGLTQIAQGAQVQLQHPGTPITVRERRPSQPHTQSGGTIHHLGPQSPAAAGGAGLQPLASPSHITTANLPPQISSIIQGQLVQQQQVLQGPPLPRPLGFERTPGVLLPGAGGAAGFGMTSPPPPTSPSRTAVPPGLSSLPLTSVGNTGMKKVPKKLEEIPPASPEMAQMRKQCLDYHYQEMQALKEVFKEYLIELFFLQHFQGNMMDFLAFKERLYGPLQAYLRQNDLDIEEEEEEEEEEEEKSEVINDEQQALAGSLVAGAGSTVETDLFKRQQAMPSTGMAEQSKRPRLEVGHQGVVFQHPGADAGVPLQQLMPTAQGGMPPTPQAAQLAGQRQSQQQYDPSTGPPVQNAASLHTPLPQLPGRLPPAGVPTAALSSALQFAQQPQVVEAQTQLQIPVKTQQPNVPIPAPPSSQLPIPPSQPAQLALHVPTPGKVQVQASQLSSLPQMVASTRLPVDPAPPCPRPLPTSSTSSLAPVSGSGPGPSPARSSPVNRPSSATNKALSPVTSRTPGVVASAPTKPQSPAQNATSSQDSSQDTLTEQITLENQVHQRIAELRKAGLWSQRRLPKLQEAPRPKSHWDYLLEEMQWMATDFAQERRWKVAAAKKLVRTVVRHHEEKQLREERGKKEEQSRLRRIAASTAREIECFWSNIEQVVEIKLRVELEEKRKKALNLQKVSRRGKELRPKGFDALQESSLDSGMSGRKRKASISLTDDEVDDEEETIEEEEANEGVVDHQTELSNLAKEAELPLLDLMKLYEGAFLPSSQWPRPKPDGEDTSGEEDADDCPGDRESRKDLVLIDSLFIMDQFKAAERMNIGKPNAKDIADVTAVAEAILPKGSARVTTSVKFNAPSLLYGALRDYQKIGLDWLAKLYRKNLNGILADEAGLGKTVQIIAFFAHLACNEGNWGPHLVVVRSCNILKWELELKRWCPGLKILSYIGSHRELKAKRQEWAEPNSFHVCITSYTQFFRGLTAFTRVRWKCLVIDEMQRVKGMTERHWEAVFTLQSQQRLLLIDSPLHNTFLELWTMVHFLVPGISRPYLSSPLRAPSEESQDYYHKVVIRLHRVTQPFILRRTKRDVEKQLTKKYEHVLKCRLSNRQKALYEDVILQPGTQEALKSGHFVNVLSILVRLQRICNHPGLVEPRHPGSSYVAGPLEYPSASLILKALERDFWKEADLSMFDLIGLENKITRHEAELLSKKKIPRKLMEEISTSAAPAARPAAAKLKASRLFQPVQYGQKPEGRTVAFPSTHPPRTAAPTTASAAPQGPLRGRPPIATFSANPEAKGGEVVKIAQLASITGPQSRVAQPETPVTLQFQGSKFTLSHSQLRQLTAGQPLQLQGSVLQIVSAPGQPYLRAPGPVVMQTVSQAGAVHGALGSKPPAGGPSPAPLTPQVGVPGRVAVNALAVGEPGTASKPASPIGGPTQEEKTRLLKERLDQIYLVNERRCSQAPVYGRDLLRICALPSHGRVQWRGSLDGRRGKEAGPAHSYTSSSESPSELMLTLCRCGESLQDVIDRVAFVIPPVVAAPPSLRVPRPPPLYSHRMRILRQGLREHAAPYFQQLRQTTAPRLLQFPELRLVQFDSGKLEALAILLQKLKSEGRRVLILSQMILMLDILEMFLNFHYLTYVRIDENASSEQRQELMRSFNRDRRIFCAILSTHSRTTGINLVEADTVVFYDNDLNPVMDAKAQEWCDRIGRCKDIHIYRLVSGNSIEEKLLKNGTKDLIREVAAQGNDYSMAFLTQRTIQELFEVYSPMDDAGFPVKAEEFVVLSQEPSVTETIAPKIARPFIEALKSIEYLEEDAQKSAQEGVLGPHTDALSSDSENMPCDEEPSQLEELADFMEQLTPIEKYALNYLELFHTSIEQEKERNSEDAVMTAVRAWEFWNLKTLQEREARLRLEQEEAELLTYTREDGVTPYMIFFKDGLENGKMLQCGIIWIYHPSSYWFCVITHTDLDNGGVICTLIMNGYGGELFKKTVVCPISF

SEQ ID NO: 1032892 - protein, 1960 aa, Homo sapiens
AGRRRGFHPPALLTRPERSPEAQGERHIGYRREVIMHHGTGPQNVQHQLQRSRACPGSEGEEQPAHPNPPPSPAAPFAPSASPSAPQSPSYQIQQLMNRSPATGQNVNITLQSVGPVVGGNQQITLAPLPLPSPTSPGFQFSAQPRRFEHGSPSYIQVTSPLSQQVQTQSPTQPSPGPGQALQNVRAGAPGPGLGLCSSSPTGDFVDASVLVRQISLSPSSGGHFVFQDGSGLTQIAQGAQVQLQHPGTPITVRERRPSQPHTQSGGTIHHLGPQSPAAAGGAGLQPLASPSHITTANLPPQISSIIQGQLVQQQQVLQGPPLPRPLGFERTPGVLLPGAGGAAGFGMTSPPPPTSPSRTAVPPGLSSLPLTSVGNTGMKKVPKKLEEIPPASPEMAQMRKQCLDYHYQEMQALKEVFKEYLIELFFLQHFQGNMMDFLAFKERLYGPLQAYLRQNDLDIEEEEEEEEEEEEKSEVINDEQQALAGSLVAGAGSTVETDLFKRQQAMPSTGMAEQSKRPRLEVGHQGVVFQHPGADAGVPLQQLMPTAQGGMPPTPQAAQLAGQRQSQQQYDPSTGPPVQNAASLHTPLPQLPGRLPPAGVPTAALSSALQFAQQPQVVEAQTQLQIPVKTQQPNVPIPAPPSSQLPIPPSQPAQLALHVPTPGKVQVQASQLSSLPQMVASTRLPVDPAPPCPRPLPTSSTSSLAPVSGSGPGPSPARSSPVNRPSSATNKALSPVTSRTPGVVASAPTKPQSPAQNATSSQDSSQDTLTEQITLENQVHQRIAELRKAGLWSQRRLPKLQEAPRPKSHWDYLLEEMQWMATDFAQERRWKVAAAKKLVRTVVRHHEEKQLREERGKKEEQSRLRRIAASTAREIECFWSNIEQVVEIKLRVELEEKRKKALNLQKVSRRGKELRPKGFDALQESSLDSGMSGRKRKASISLTDDEVDDEEETIEEEEANEGVVDHQTELSNLAKEAELPLLDLMKLYEGAFLPSSQWPRPKPDGEDTSGEEDADDCPGDRESRKDLVLIDSLFIMDQFKAAERMNIGKPNAKDIADVTAVAEAILPKGSARVTTSVKFNAPSLLYGALRDYQKIGLDWLAKLYRKNLNGILADEAGLGKTVQIIAFFAHLACNEGNWGPHLVVVRSCNILKWELELKRWCPGLKILSYIGSHRELKAKRQEWAEPNSFHVCITSYTQFFRGLTAFTRVRWKCLVIDEMQRVKGMTERHWEAVFTLQSQQRLLLIDSPLHNTFLELWTMVHFLVPGISRPYLSSPLRAPSEESQDYYHKVVIRLHRVTQPFILRRTKRDVEKQLTKKYEHVLKCRLSNRQKALYEDVILQPGTQEALKSGHFVNVLSILVRLQRICNHPGLVEPRHPGSSYVAGPLEYPSASLILKALERDFWKEADLSMFDLIGLENKITRHEAELLSKKKIPRKLMEEISTSAAPAARPAAAKLKASRLFQPVQYGQKPEGRTVAFPSTHPPRTAAPTTASAAPQGPLRGRPPIATFSANPEAKGGEVVKIAQLASITGPQSRVAQPETPVTLQFQGSKFTLSHSQLRQLTAGQPLQLQGSVLQIVSAPGQPYLRAPGPVVMQTVSQAGAVHGALGSKPPAGGPSPAPLTPQVGVPGRVAVNALAVGEPGTASKPASPIGGPTQEEKTRLLKERLDQIYLVNERRCSQAPVYGRDLLRICALPSHGRVQWRGSLDGRRGKEAGPAHSYTSSSESPSELMLTLCRCGESLQDVIDRVAFVIPPVVAAPPSLRVPRPPPLYSHRMRILRQGLREHAAPYFQQLRQTTAPRLLQFPELRLVQFDSGKLEALAILLQKLKSEGRRVLILSQMILMLDILEMFLNFHYLTYVRIDENASSEQRQELMRSFNRDRRIFCAILSTHSRTTGINLVEADTVVFYDNDLNPVMDAKAQEWCDRIGRCKDIHIYRVKACGGMDQEMQRHPHIQVKGL

SEQ ID NO: 1032893 - protein, 971 aa, Homo sapiens
MAPRRPVGLVGCSGLAARSAVAALIRAGSPWLRRPAAAGAFPEDVVMQHVSSSQSSQRHVQWPGACPGAGEEQPACSQPSLPLTLPSPSHQLQQLMVQTQSPTQPSPGPGQALQNVRAGAPGPGLGLCSSSPTGDFVDASVLVRQISLSPSSGGHFVFQDGSGLTQIAQGAQVQLQHPGTPITVRERRPSQPHTQSGGTIHHLGPQSPAAAGGAGLQPLASPSHITTANLPPQISSIIQGQLVQQQQVLQGPPLPRPLGFERTPGVLLPGAGGAAGFGMTSPPPPTSPSRTAVPPGLSSLPLTSVGNTGMKKVPKKLEEIPPASPEMAQMRKQCLDYHYQEMQALKEVFKEYLIELFFLQHFQGNMMDFLAFKERLYGPLQAYLRQNDLDIEEEEEEEEEEEEKSEVINDEVKVVTGKDGQTGTPVAIATQLPPKVSAAFSSQQQPFQQALAGSLVAGAGSTVETDLFKRQQAMPSTGMAGGMPPTPQAAQLAGQRQSQQQYDPSTGPPVQNAASLHTPLPQLPGRLPPAGVPTAALSSALQFAQQPQVVEAQTQLQIPVKTQQPNVPIPAPPSSQLPIPPSQPAQLALHVPTPGKVQVQASQLSSLPQMVASTRLPVDPAPPCPRPLPTSSTSSLAPVSGSGPGPSPARSSPVNRPSSATNKALSPVTSRTPGVVASAPTKPQSPAQNATSSQDSSQDTLTEQITLENQVHQRIAELRKAGLWSQRRLPKLQEAPRPKSHWDYLLEEMQWMATDFAQERRWKVAAAKKLVRTVARQLQDRRRKEAGGRKEEPTRLRQRSPGLPEKSRVPGLDCAGKDSSILEASAPLENKSHVEHLIRLQKQKLQLLPPPPPPPGPARGTANHTSASAAVTRLPQQSPQLTTVTAPRPRALLMGTTMANLQTRVSTSHLQGPRLTSALTYQMAQVAVATPPVVSVLAVVVLSARVTVLPSTQRDQCCDKAAAKSGSGQQI

SEQ ID NO: 1032894 - protein, 533 aa, Homo sapiens
MAPRRPVGLVGCSGLAARSAVAALIRAGSPWLRRPAAAGAFPEDVVMQHVSSSQSSQRHVQWPGACPGAGEEQPACSQPSLPLTLPSPSHQLQQLMVQTQSPTQPSPGPGQALQNVRAGAPGPGLGLCSSSPTGDFVDASVLVRQISLSPSSGGHFVFQDGSGLTQIAQGAQVQLQHPGTPITVRERRPSQPHTQSGGTIHHLGPQSPAAAGGAGLQPLASPSHITTANLPPQISSIIQGQLVQQQQVLQGPPLPRPLGFERTPGVLLPGAGGAAGFGMTSPPPPTSPSRTAVPPGLSSLPLTSVGNTGMKKVPKKLEEIPPASPEMAQMRKQCLDYHYQEMQALKEVFKEYLIELFFLQHFQGNMMDFLAFKERLYGPLQAYLRQNDLDIEEEEEEEEEEEEKSEVINDEQQALAGSLVAGAGSTVETDLFKRQQAMPSTGMAEQSKRPRLEVGHQGVVFQHPGADAGVPLQQLMPTAQGGMPPTPQAAQLAGQRQSQQQYDPSTGPPVQNAASLHTPLPQLPLSTCSSPLS

SEQ ID NO: 1032895 - protein, 3124 aa, Homo sapiens; identical to SEQ ID NO: 1032876

SEQ ID NO: 1032896 - protein, 3124 aa, Homo sapiens; identical to SEQ ID NO: 1032876

SEQ ID NO: 1032897 - protein, 103 aa, Homo sapiens
  misc_feature (2)..(2): Xaa can be any naturally occurring amino acid
  misc_feature (8)..(8): Xaa can be any naturally occurring amino acid
QXPRAEHXPKTVPQGKFGDPSVKLRGPRGAFPPGKLVKKIEISQHAKYTCSFCGKTKMKRRAVGIWHCGSCMKTVAGGAWTYNTTSAVTVKSAIRRLKELKDQ

SEQ ID NO: 1032898 - protein, 511 aa, Homo sapiens
VTLARSLQSRPVAMSADVTSSLAAFGEGWGVREALGSQQPPPSPRPGPAEPPEWTPQRLGSSLRKMVKKIEISQHAKYTCSFCFSPLLPPSGLMRQRGGCGACLGRTELSLGKTYFVNKWNTWLYSKKKQKKQKKTKKQKQNKTKKTTTTQHRKHNNTTQQTNNNINNKNNNKKRHDDERAAGGERGRATVKLHDKDVVSGAAGDGARRREKNGVRESQQQGMSAHIVTDEEHEARREGGRETTNKTRIQRRAGREPEREYSERGETIRDEEKAEESSVDDETLMALEETNRDKERPDRNNKNNKNTHEGSGERRGEDSTEDARTEAGGRGEREKRKREDSAGREGKRAQRKKEEEGGGDKETKRRRERKQGRERGTETGRKDEEGAGGGEERGGGRGPEGERGGRRGGEGQRRREQRGTRREKGAEAGGTTRRQGREKSEERRSGRGRGEETRARERRGRERQGAGRREEGDEGRDSQRNRRSADTAKHVRDRIGARQKQAGGEEEERRR

SEQ ID NO: 1032899 - protein, 107 aa, Homo sapiens
HALSVCLGSDLGRGDMAKRTKKVGIVGKYGTRYGASLRKMVKKIEISQHAKYTCSFCGKTKMKRRAVGIWHCGSCMKTVAGGAWTYNTTSAVTVKSAIRRLKELKDQ

SEQ ID NO: 1032900 - protein, 107 aa, Homo sapiens; identical to SEQ ID NO: 1032899

SEQ ID NO: 1032901 - protein, 107 aa, Homo sapiens; identical to SEQ ID NO: 1032899

SEQ ID NO: 1032902 - protein, 90 aa, Homo sapiens
  misc_feature (80)..(80): Xaa can be any naturally occurring amino acid
HALSVCLGSDLGRGDMAKRTKKVGIVGKYGTRYGASLRKMVKKIEISQHAKYTCSFCGKTKMKRRAVGIWHCLHAGTTVXDPHSSSLSSW

SEQ ID NO: 1032903 - protein, 153 aa, Homo sapiens
MAFHPAMALLLGLLYALLLGPGLGSNCLGLRAGGGGELRGTRLPFGPGVRFLFSLGLACGDMAKRTKKVGIVGKYGTRYGASLRKMVKKIEISQHAKYTCSFCGKTKMKRRAVGIWHCGSCMKTVAGGAWTYNTTSAVTVKSAIRRLKELKDQ

SEQ ID NO: 1032904 - protein, 418 aa, Homo sapiens
MRQRGGCGACLGRTELSLGKTYFVNKWNTWLYSKKKQKKQKKTKKQKQNKTKENNNNTAQKTQQHNTTNQQQHNNKNNNKKRHDDERAAGGERGRATVKLHDKDVVSGAAGDGARRREKNGVRESQQQGMSAHIVSHEEHEARREGGRETTNKTRIQRRAGREPEREYSERGETSATRKRLRISVDDETLMALEETNRDKERPDRNNKNNKNTHEGSGERRGEDSTEDARTEAGGRGEREKRKREDSAGREGKRAQRKKEEEGGGDKETKRRRERKQGRERGTETGRKDEEGAGGGEERGGGRGPEGERGGRRGGEGQRRREQRGTRREKGAEAGGTTRRQGREKSEERRSGRGRGEETRARERRGRERQGAGRREEGDEGRDSQRNRRSADTAKHVRDRIGARQKQAGGEEEERRRA

SEQ ID NO: 1032905 - protein, 107 aa, Homo sapiens; identical to SEQ ID NO: 1032899

SEQ ID NO: 1032906 - protein, 108 aa, Homo sapiens
MRCRCVWARTYVAATWPNVPRKSGSSVNTGPAMGPPSRAKVVKKIEISQHAKYTCSFCGKTKMKRRAVGIWHCGSCMKTVAGGAWTYNTTSAVTVKSAIRRLKELKDQ

SEQ ID NO: 1032907 - protein, 129 aa, Homo sapiens
HALSVCLGSDLGRGDMAKRTKKVGIVGKYGTRYGASLRKMVKKIEISQHAKYTCSFCGKTKMKRRAVGIWHCGSCMKTVAGGAWTYKKPKQDPNGTESATLMESKCSRPMERRLEITVDSHMAMDPKSD

SEQ ID NO: 1032908 - protein, 276 aa, Homo sapiens
MIHSLFLINSSGDIFLEKHWKSVVSRSVCDYFFEAQERATEAENVPPVIPTPHHYLLSVYRHKIFFVAVIQTEVPPLFVIEFLHRVVDTFQDYFGVCSEPVIKDNVVVVYEVLEEMLDNGFPLATESNILKELIKPPTILRTVVNTITGSTNVGDQLPTGQLSVVPWRRTGVKYTNNEAYFDVIEEIDAIIDKSGSTITAEIQGVIDACVKLTWHAQNLHFPFMNPKVVGGCQLPSWWSVQNAGDLESILSFIPPIANSPVVLHVMAHTSEAFSEM

SEQ ID NO: 1032909 - protein, 258 aa, Homo sapiens
MIHSLFLINSSGDIFLEKHWKSVVSRSVCDYFFEAQERATEAGHKIFFVAVIQTEVPPLFVIEFLHRVVDTFQDYFGVCSEPVIKDNVVVVYEVLEEMLDNGFPLATESNILKELIKPPTILRTVVNTITGSTNVGDQLPTGQLSVVPWRRTGVKYTNNEAYFDVIEEIDAIIDKSGSTITAEIQGVIDACVKLTWHAQNLHFPFMNPKVVGGCQLPSWWSVQNAGDLESILSFIPPIANSPVVLHVMAHTSEAFSEM

SEQ ID NO: 1032910 - protein, 276 aa, Homo sapiens
MIHSLFLINSSGDIFLEKHWKSVVSRSVCDYFFEAQERATEAENVPPVIPTPHHYLLSVYRHKIFFVAVIQTEVPPLFVIEFLHRVVDTFQDYFGVCSEPVIKDNVVVVYEVLEEMLDNGFPLATESNILKELIKPPTILRTVVNTITGSTNVGDQLPTGQLSVVPWRRTGVKYTNNEAYFDVIEEIDAIIDKSGSTITAEIQGVIDACVKLTWHAQNLHFPFMNPKVVGGCQVPSWWSVQNAGDLESILSFIPPIANSPVVLHVMAHTSEAFSEM

SEQ ID NO: 1032911 - protein, 296 aa, Homo sapiens
MIHSLFLINSSGDIFLEKHWKSVVSRSVCDYFFEAQERATEAENVPPVIPTPHHYLLSVYRHKIFFVAVIQTEVPPLFVIEFLHRVVDTFQDYCSGISVLMQHTGPFASENDYFGVCSEPVIKDNVVVVYEVLEEMLDNGFPLATESNILKELIKPPTILRTVVNTITGSTNVGDQLPTGQLSVVPWRRTGVKYTNNEAYFDVIEEIDAIIDKSGSTITAEIQGVIDACVKLTWHAQNLHFPFMNPKVVGGCQVPSWWSVQNAGDLESILSFIPPIANSPVVLHVMAHTSEAFSEM

SEQ ID NO: 1032912 - protein, 103 aa, Homo sapiens
MIHSLFLINSSGDIFLEKHWKSVVSRSVCDYFFEAQERATEAENVPPVIPTPHHYLLSVYRHKIFFVAVIQTEVPPLFVIEFLHRVVDTFQVRECGKVHICKP

SEQ ID NO: 1032913 - protein, 393 aa, Homo sapiens [sequence omitted]

SEQ ID NO: 1032914 - protein, 393 aa, Homo sapiens [sequence omitted]

SEQ ID NO: 1032915 - protein, 393 aa, Homo sapiens [sequence omitted]

SEQ ID NO: 1032916 - protein, 186 aa, Homo sapiens
MSRGLEEWDLHIGAVRSDAVSGGFRDFTGVRKVTFGNRLCLLPAKPAASGLELPPEPLPEVYQLTFGVAPASVEQAGSGFPAAAPQLRKARWHYSLRDSGIEGAEGAGLEEGSSLGPGPAPDTDTLSLLSLRTVASDLQKCDSVEHLRGLSDHVSLDGQELGTRSGGRRGSDGGARGGRHQRSVSL

SEQ ID NO: 1032917 - protein, 393 aa, Homo sapiens [sequence omitted]

SEQ ID NO: 1032918 - protein, 393 aa, Homo sapiens [sequence omitted]

SEQ ID NO: 1032919 - protein, 655 aa, Homo sapiens
MVTTLGPKMAAEWGGGVGYSGSGPGRSRWRWSGSVWVRSVLLLLGGLRASATSTPVSLGSSPPCRHHVPSDTEVINKVHLKANHVVKRDVDEHLRIKTVYDKSVEELLPEKKNLVKNKLFPQAISYLEKTFQVRRPAGTILLSRQCATNQYLRKENDPHRYCTGECAAHTKCGPVIVPEEHLQQCRVYRGGKWPHGAVGVPDQEGISDADFVLYVGALATERCSHENIISYAAYCQQEANMDRPIAGYANLCPNMISTQPQEFVGMLSTVKHEVIHALGFSAGLFAFYHDKDGNPLTSRFADGLPPFNYSLGLYQWSDKVVRKVERLWDVRDNKIVRHTVYLLVTPRVVEEARKHFDCPVLEGMELENQGGVGTELNHWEKRLLENEAMTGSHTQNRVLSRITLALMEDTGRQMLSPYCDTLRSNPLQLTCRQDQRAVAVCNLQKFPKPLPQEYQYFDELSGIPAEDLPYYGGSVEIADYCPFSQEFSWHLSGEYQRSSDCRILENQPEIFKNYGAEKYGPHSVCLIQKSAFVMEKCEKKLSYPDWGSGCYQVSCSPQGLKVWVQDTSYLCSRAGQVLPVSIQMNGWIHDGNLLCPSCWDFCELCPPETDPPATNLTRALPLDLCSCSSSLVVTLWLLLGNLFPLLAGFLLCIWH

SEQ ID NO: 1032920 - protein, 655 aa, Homo sapiens; identical to SEQ ID NO: 1032919

SEQ ID NO: 1032921 - protein, 640 aa, Homo sapiens [sequence omitted]

SEQ ID NO: 1032922 - protein, 600 aa, Homo sapiens
MMEERANLMHMMKLSIKVLLQSALSLGRSLDADHAPLQQFFVVMEHCLKHGLKVKKSFIGQNKSFFGPLELVEKLCPEASDIATSVRNLPELKTAVGRGRAWLYLALMQKKLADYLKVLIDNKHLLSEFYEPEALMMEEEGMVIVGLLVGLNVLDANLCLKGEDLDSQVGVIDFSLYLKDVQDLDGGKEHERITDVLDQKNYVEELNRHLSCTVGDLQTKIDGLEKTNSKLQEELSAATDRICSLQEEQQQLREQNELIRERSEKSVEITKQDTKVELETYKQTRQGLDEMYSDVWKQLKEEKKVRLELEKELELQIGMKTEMEIAMKLLEKDTHEKQDTLVALRQQLEEVKAINLQMFHKAQNAESSLQQKNEAITSFEGKTNQVMSSMKQMEERLQHSERARQGAEERSHKLQQELGGRIGALQLQLSQLHEQCSSLEKELKSEKEQRQALQRELQHEKDTSSLLRMELQQVEGLKKELRELQDEKAELQKICEEQEQALQEMGLHLSQSKLKMEDIKEVNQALKGHAWLKDDEATHCRQCEKEFSISRRKHHCRNCGHIFCNTCSSNELALPSYPKPVRVCDSCHTLLLQRCSSTAS

SEQ ID NO: 1032923 - protein, 625 aa, Homo sapiens
GRGLWSRRPSGSSDPRPRRPASKCQMMEERANLMHMMKLSIKVLLQSALSLGRSLDADHAPLQQFFVVMEHCLKHGLKVKKSFIGQNKSFFGPLELVEKLCPEASDIATSVRNLPELKTAVGRGRAWLYLALMQKKLADYLKVLIDNKHLLSEFYEPEALMMEEEGMVIVGLLVGLNVLDANLCLKGEDLDSQVGVIDFSLYLKDVQDLDGGKEHERITDVLDQKNYVEELNRHLSCTVGDLQTKIDGLEKTNSKLQEELSAATDRICSLQEEQQQLREQNELIRERSEKSVEITKQDTKVELETYKQTRQGLDEMYSDVWKQLKEEKKVRLELEKELELQIGMKTEMEIAMKLLEKDTHEKQDTLVALRQQLEEVKAINLQMFHKAQNAESSLQQKNEAITSFEGKTNQVMSSMKQMEERLQHSERARQGAEERSHKLQQELGGRIGALQLQLSQLHEQCSSLEKELKSEKEQRQALQRELQHEKDTSSLLRMELQQVEGLKKELRELQDEKAELQKICEEQEQALQEMGLHLSQSKLKMEDIKEVNQALKGHAWLKDDEATHCRQCEKEFSISRRKHHCRNCGHIFCNTCSSNELALPSYPKPVRVCDSCHTLLLQRCSSTAS

SEQ ID NO: 1032924 - protein, 555 aa, Homo sapiens
KLAAAGLGGGDSGDGTARAASKCQMMEERANLMHMMKLSIKVLLQSALSLGRSLDADHAPLQQFFVVMEHCLKHGLKVKKSFIGQNKSFFGPLELVEKLCPEASDIATSVRNLPELKTAVGRGRAWLYLALMQKKLADYLKVLIDNKHLLSEFYEPEALMMEEEGMVIVGLLVGLNVLDANLCLKGEDLDSQVGVIDFSLYLKDVQDLDGGKEHERITDVLDQKNYVEELNRHLSCTVGDLQTKIDGLEKTNSKLQEELSAATDRICSLQEEQQQLREQNELIRERSEKSVEITKQDTKVELETYKQTRQGLDEMYSDVWKQLKEEKKVRLELEKELELQIGMKTEMEIAMKLLEKDTHEKQDTLVALRQQLEEVKAINLQMFHKAQNAESSLQQKNEAITSFEGKTNQVMSSMKQMEERLQHSERARQGAEERSHKLQQELGGRIGALQLQLSQLHEQCSSLEKELKSEKEQRQALQRELQHEKDTSSLLRMELQQVEGLKKELRELQDEKAELQKICEEQEQALQEMGLHLSQSKLKMEDIKEVNQALKVLPC

SEQ ID NO: 1032925 - protein, 533 aa, Homo sapiens
KLAAAGLGGGDSGDGTARAASKCQMMEERANLMHMMKLSIKVLLQSALSLGRSLDADHAPLQQFFVVMEHCLKHGLKVKKSFIGQNKSFFGPLELVEKLCPEASDIATSVRNLPELKTAVGRGRAWLYLALMQKKLADYLKVLIDNKHLLSEFYEPEALMMEEEGMVIVGLLVGLNVLDANLCLKGEDLDSQVGVIDFSLYLKDVQDLDGGKDCTVGDLQTKIDGLEKTNSKLQEELSAATDRICSLQEEQQQLREQNELIRERSEKSVEITKQDTKVELETYKQTRQGLDEMYSDVWKQLKEEKKVRLELEKELELQIGMKTEMEIAMKLLEKDTHEKQDTLVALRQQLEEVKAINLQMFHKAQNAESSLQQKNEAITSFEGKTNQVMSSMKQMEERLQHSERARQGAEERSHKLQQELGGRIGALQLQLSQLHEQCSSLEKELKSEKEQRQALQRELQHEKDTSSLLRMELQQVEGLKKELRELQDEKAELQKICEEQEQALQEMGLHLSQSKLKMEDIKEVNQALKVLPC

SEQ ID NO: 1032926 - protein, 555 aa, Homo sapiens; identical to SEQ ID NO: 1032924

SEQ ID NO: 1032927 - protein, 600 aa, Homo sapiens; identical to SEQ ID NO: 1032922

SEQ ID NO: 1032928 - protein, 555 aa, Homo sapiens; identical to SEQ ID NO: 1032924

SEQ ID NO: 1032929 - protein, 600 aa, Homo sapiens; identical to SEQ ID NO: 1032922

SEQ ID NO: 1032930 - protein, 555 aa, Homo sapiens; identical to SEQ ID NO: 1032924

SEQ ID NO: 1032931 - protein, 555 aa, Homo sapiens; identical to SEQ ID NO: 1032924

SEQ ID NO: 1032932 - protein, 123 aa, Homo sapiens
KLAAAGLGGGDSGDGTARAASKCQMMEERANLMHMMKLSIKVLLQSALSLGRSLDADHAPLQQFFVVMEHCLKHGLKVKKSFIGQNKSFFGPLELVEKLCPEASDIRYNFMILLLSFFTFQRI

SEQ ID NO: 1032933 - protein, 275 aa, Homo sapiens
GTRGPHSGPLSGPLAPVGWQQSVARHGGGRGWRWRLGRAGGKPGGRGGEAAALPGAPLHYLAPLLSNLSQRPAARAFLLDPDRCVVQRLLPLTQYPDSSVRRGGVVGTLRNCCFEHRHHEWLLGPEVDILPFLLLPLAGPEDFSEEEMERLPVDLQYLPPDKQREPDADIRKMLVEAIMLLTATAPGRQQVRDQGAYLILRELHSWEPEPDVRTACEKLIQVLIGDEPERGMENLLEVQVPEDVEQQLQQLDCREQEQLERELAPEPWVERATPT

SEQ ID NO: 1032934 - protein, 103 aa, Homo sapiens
MLVEAIMLVTATAPGRQQVRDQGAYLILRELHSWEPEPDVRTACEKLIQVLIGDEPERGMENLLEVQVPEDVEQQLQQLDCREQEQLERELAPEPWVERATPT

SEQ ID NO: 1032935 - protein, 103 aa, Homo sapiens; identical to SEQ ID NO: 1032934

SEQ ID NO: 1032936 - protein, 293 aa, Homo sapiens [sequence omitted]

SEQ ID NO: 1032937 - protein, 258 aa, Homo sapiens
MGEAGAGAGASGGPEASPEAEVVKLLPFLAPGARADLQAAAVRHVLALTGCGPGRALLAGQAALLQALMELAPASAPARDAARALVNLAADPGLHETLLAADPGLPARLMGRALDPQWPWAEEAAAALANLSREPAPCAALMAALAAAEPADSGLERLVRALCTPGYNARAPLHYLAPLLSNLSQRPAARAFLLDPDRVKPRAPARAGRGRKLGGTALSDTSQQVRGPAAAAPYPVPRLLCTQGRGGGDAAELLLRAP

SEQ ID NO: 1032938 - protein, 68 aa, Homo sapiens
MGGEGHTHLRPLQPDTSSRVPFARLSQTRPSCSCLQAPWVPLFRDCALLRSRATLRLSRNDRAANITT

SEQ ID NO: 1032939 - protein, 390 aa, Homo sapiens
MGEAGAGAGASGGPEASPEAEVVKLLPFLAPGARADLQAAAVRHVLALTGCGPGRALLAGQAALLQALMELAPASAPARDAARALVNLAADPGLHETLLAADPGLPARLMGRALDPQWPWAEEAAAALANLSREPAPCAALMAALAAAEPADSGLERLVRALCTPGYNARAPLHYLAPLLSNLSQRPAARAFLLDPDRCVVQRLLPLTQYPDSSVRRGGVVGTLRNCCFEHRHHEWLLGPEVDILPFLLLPLAGPEDFSEEEMERLPVDLQYLPPDKQREPDADIRKMLVEAIMLLTATAPGRQQVRDQGAYLILRELHSWEPEPDVRTACEKLIQVLIGDEPERGMENLLEVQVPEDVEQQLQQLDCREQEQLERELAPEPWVERATPT

SEQ ID NO: 1032940 - protein, 390 aa, Homo sapiens; identical to SEQ ID NO: 1032939

SEQ ID NO: 1032941 - protein, 538 aa, Homo sapiens
RRSSLGNKVGGWLGCEKRKKKREEKEEKGRTKKETRRNEAKNKENFELQAAQEKEKLKVEDEPEVLTEPPSATTTTTIGISATWTTLAGSHGKRNNTITTTSSKRKNRKNKITPENVQIIFDDPLPISYSQPEKVNGESKSSSTSESGDSDNMRISSCSDESSNSNSSRKSDNHSPAVVTTTVSSKKQPSVLVTFPKEERKSVSGKASIKLSETISEGTSNSLSTCTKSGPSPLSSPNGKLTVASPKRGQKREEGWKEVVRRSKKVSVPSTVISRVIGRGGCNINAIREFTGAHIDIDKQKDKTGDRIITIRGGTESTRQATQLINALIKDPDKEIDELIPKNRLKSSSANSKIGSSAPTTTAANTSLMGIKMTTVALSSTSQTATALTVPAISSASTHKTIKNPVNNVRPGFPVSLPLAYPPPQFAHALLAAQTFQQIRPPRLPMTHFGGTFPPAQSTWGPFPVRPLSPARATNSPKPHMVPRHSNQNSSGSQVNSAGSLTSSPTNYNQFISFNGAGTSTNGSPVHLLSEGSFCHSC

SEQ ID NO: 1032942 - protein, 264 aa, Homo sapiens
MHVDGSAGKSEQQAKHVQTVEEDMQQKDKTGDRIITIRGGTESTRQATQLINALIKDPDKEIDELIPKNRLKSSSANSKIGSSAPTTTAANTSLMGIKMTTVALSSTSQTATALTVPAISSASTHKTIKNPVNNVRPGFPVSLPLAYPPPQFAHALLAAQTFQQIRPPRLPMTHFGGTFPPAQSTWGPFPVRPLSPARATNSPKPHMVPRHSNQNSSGSQVNSAGSLTSSPTNYNQFISFNGAGTSTNGSPVHLLSEGSFCHSC

SEQ ID NO: 1032943 - protein, 192 aa, Homo sapiens
MQAIKCVVVGDGAVGKTCLLISYTTNAFPGEYIPTVFDNYSANVMVDGKPVNLGLWDTAGQEDYDRLRPLSYPQTDVFLICFSLVSPASFENVRAKWYPEVRHHCPHTPILLVGTKLDLRDDKDTIERLRDKKLAPITYPQGLAMAREIGSVKYLECSALTQRGLKTVFDEAIRAVLCPPPVKKPGKKCTVF

SEQ ID NO: 1032944 - protein, 288 aa, Homo sapiens
SQWVGQASHLGLNPQPAPPSPAATLESGPLPGAPVWGALRPYSPPQPPEPGLPRSSSSLRSPRIWWAGSPSRPQTPLTRLWLRERGLPLLGRGSEAGPGSHVACPVRSAVGKTCLLISYTTNAFPGEYIPTVFDNYSANVMVDGKPVNLGLWDTAGQEDYDRLRPLSYPQTDVFLICFSLVSPASFENVRAKWYPEVRHHCPHTPILLVGTKLDLRDDKDTIERLRDKKLAPITYPQGLAMAREIGSVKYLECSALTQRGLKTVFDEAIRAVLCPPPVKKPGKKCTVF

SEQ ID NO: 1032945 - protein, 278 aa, Homo sapiens
LFCGGEMWYVSALEPGRGRAPPREPGMTHLSSSSLRSPRIWWAGSPSRPQTPLTRLWLRERGLPLLGRGSEAGPGSHVACPVRSAVGKTCLLISYTTNAFPGEYIPTVLSVEGFPGEHRPSVFDNYSANVMVDGKPVNLGLWDTAGQEDYDRLRPLSYPQTDVFLICFSLVSPASFENVRAKWYPEVRHHCPHTPILLVGTKLDLRDDKDTIERLRDKKLAPITYPQGLAMAREIGSVKYLECSALTQRGLKTVFDEAIRAVLCPPPVKKPGKKCTVF

SEQ ID NO: 1032946 - protein, 108 aa, Homo sapiens
LFCGGEMWYVSALEPGRGRAPPREPGMTHLSSSSLRSPRIWWAGSPSRPQTPLTRLWLRERGLPLLGRGSEAGPGSHVACPVRSAVGKTCLLISYTTNAFPGEYIPTV

SEQ ID NO: 1032947 - protein, 140 aa, Homo sapiens
RTREGAGPWGAPDHSTRSHLFPKDVFLICFSLVSPASFENVRAKWYPEVRHHCPHTPILLVGTKLDLRDDKDTIERLRDKKLAPITYPQGLAMAREIGSVKYLECSALTQRGLKTVFDEAIRAVLCPPPVKKPGKKCTVF

SEQ ID NO: 1032948 - protein, 189 aa, Homo sapiens
MLADQLHDQRLPRRVHPHRVSVEGFPGEHRPSVFDNYSANVMVDGKPVNLGLWDTAGQEDYDRLRPLSYPQTDVFLICFSLVSPASFENVRAKWYPEVRHHCPHTPILLVGTKLDLRDDKDTIERLRDKKLAPITYPQGLAMAREIGSVKYLECSALTQRGLKTVFDEAIRAVLCPPPVKKPGKKCTVF

SEQ ID NO: 1032949 - protein, 192 aa, Homo sapiens; identical to SEQ ID NO: 1032943

SEQ ID NO: 1032950 - protein, 73 aa, Homo sapiens
MSAETASGPTEDQVEILEYNFNKVDKHPDSTTLCLIAAEAGLSEEETQKWFKQRLAKWRRSEGLPSECRSVTD

SEQ ID NO: 1032951 - protein, 152 aa, Homo sapiens
SGVFEGDLKLYHPSPYLSLLTVLYVYILCPKENNLSLIGQLSRLLAWHPALRAVKSTAPDLRFEMRQHLTGNSLKRAGTMSAETASGPTEDQVEILEYNFNKVDKHPDSTTLCLIAAEAGLSEEETQKWFKQRLAKWRRSEGLPSECRSVTD

SEQ ID NO: 1032952 - protein, 117 aa, Homo sapiens
SGVFEGDLKLYHPSPYLSLLTVLYVYILCPKENNLSLIGQLSRLLAWHPALRAVKSTAPDLRFEMRQHLTGNSLKVRKWMKRLRVPFLFPVFSQPHLSYPILVKKLAWLGERSGTRR

SEQ ID NO: 1032953 - protein, 117 aa, Homo sapiens; identical to SEQ ID NO: 1032952

SEQ ID NO: 1032954 - protein, 104 aa, Homo sapiens
SGLRQKAAYRGGRLAADSGEPTLAICQRAGTMSAETASGPTEDQVEILEYNFNKVDKHPDSTTLCLIAAEAGLSEEETQKWFKQRLAKWRRSEGLPSECRSVTD

SEQ ID NO: 1032955 - protein, 152 aa, Homo sapiens
SGLRQKAAYRGGRLAADSGEPTLAICQVCPQGRSPFREEVFKGISQNHPRASFTPSLEPEVGEGPRNHLSRPRLQRAGTMSAETASGPTEDQVEILEYNFNKVDKHPDSTTLCLIAAEAGLSEEETQKWFKQRLAKWRRSEGLPSECRSVTD

SEQ ID NO: 1032956 - protein, 103 aa, Homo sapiens
ICDFTIENKTKKNCVVDDSLNPPGLHRAGTMSAETASGPTEDQVEILEYNFNKVDKHPDSTTLCLIAAEAGLSEEETQKWFKQRLAKWRRSEGLPSECRSVTD

SEQ ID NO: 1032957 - protein, 117 aa, Homo sapiens; identical to SEQ ID NO: 1032952

SEQ ID NO: 1032958 - protein, 117 aa, Homo sapiens; identical to SEQ ID NO: 1032952

SEQ ID NO: 1032959 - protein, 73 aa, Homo sapiens
MSAETASGPTEDQVEILEYNFNKVDKHPDSTTLCLIAAEAGLSEEETQKWFKQRLAKWRRSEGLPSECRSVID

SEQ ID NO: 1032960 - protein, 73 aa, Homo sapiens; identical to SEQ ID NO: 1032950

SEQ ID NO: 1032961 - protein, 73 aa, Homo sapiens; identical to SEQ ID NO: 1032950

SEQ ID NO: 1032962 - protein, 117 aa, Homo sapiens; identical to SEQ ID NO: 1032952

SEQ ID NO: 1032963 - protein, 117 aa, Homo sapiens; identical to SEQ ID NO: 1032952

SEQ ID NO: 1032964 - protein, 163 aa, Homo sapiens
LPFTPWPGTQQPYTDGVRMEEIVEGCTGALHILARDPMNRMEIFRLNTIPLFVQLLYSSVENIQRVAAGVLCELAQDKEAADAIDAEGASAPLMELLHSRNEGTATYAAAVLFRISEDKNPDYRKRVSVELTNSLFKHDPAAWEAAQSMIPINEPWINGKYRA

SEQ ID NO: 1032965 - protein, 792 aa, Homo sapiens
SWYGRRFKDQSRSSRRRPRRAQFAVRAGSHPGPTPTRPGQAPYSVATMEVMNLMEQPIKVTEWQQTYTYDSGIHSGANTCVPSVSSKGIMEEDEACGRQYTLKKTTTYTQGVPPSQGDLEYQMSTTARAKRVREAMCPGVSGEDSSLLLATQVEGQATNLQRLAEPSQLLKSAIVHLINYQDDAELATRALPELTKLLNDEDPVVVTKAAMIVNQLSKKEASRRALMGSPQLVAAVVRTMQNTSDLDTARCTTSILHNLSHHREGLLAIFKSGGIPALVRMLSSPVESVLFYAITTLHNLLLYQEGAKMAVRLADGLQKMVPLLNKNNPKFLAITTDCLQLLAYGNQESKLIILANGGPQALVQIMRNYSYEKLLWTTSRVLKVLSVCPSNKPAIVEAGGMQALGKHLTSNSPRLVQNCLWTLRNLSDVATKQEGLESVLKILVNQLSVDDVNVLTCATGTLSNLTCNNSKNKTLVTQNSGVEALIHAILRAGDKDDITEPAVCALRHLTSRHPEAEMAQNSVRLNYGIPAIVKLLNQPNQWPLVKATIGLIRNLALCPANHAPLQEAAVIPRLVQLLVKAHQDAQRHVAAGTQQPYTDGVRMEEIVEGCTGALHILARDPMNRMEIFRLNTIPLFVQLLYSSVENIQRVAAGVLCELAQDKEAADAIDAEGASAPLMELLHSRNEGTATYAAAVLFRISEDKNPDYRKRVSVELTNSLFKHDPAAWEAAQSMIPINEPYGDDLDATYRPMYSSDVPLDPLEMHMDMDGDYPIDTYSDGLRPPYPTADHMLA

SEQ ID NO: 1032966 - protein, 792 aa, Homo sapiens; identical to SEQ ID NO: 1032965

SEQ ID NO: 1032967 - protein, 218 aa, Homo sapiens
MAAELFIQCNQTQSMIIVLPGPVLDGVRMEEIVEGCTGALHILARDPMNRMEIFRLNTIPLFVQLLYSSVENIQRVAAGVLCELAQDKEAADAIDAEGASAPLMELLHSRNEGTATYAAAVLFRISEDKNPDYRKRVSVELTNSLFKHDPAAWEAAQSMIPINEPYGDDLDATYRPMYSSDVPLDPLEMHMDMDGDYPIDTYSDGLRPPYPTADHMLA

SEQ ID NO: 1032968 - protein, 792 aa, Homo sapiens; identical to SEQ ID NO: 1032965

SEQ ID NO: 1032969 - protein, 165 aa, Homo sapiens
GGSQRGGKACKEGAVLGPGRLGQHVVCSGVRGPEAVAVGVDGVVSIHVHVHLQRVKGHIAGVHGAVGGIQVISEDKNPDYRKRVSVELTNSLFKHDPAAWEAAQSMIPINEPYGDDLDATYRPMYSSDVPLDPLEMHMDMDGDYPIDTYSDGLRPPYPTADHMLA

SEQ ID NO: 1032970 - protein, 792 aa, Homo sapiens; identical to SEQ ID NO: 1032965

SEQ ID NO: 1032971 - protein, 104 aa, Homo sapiens
VLCGCVCEWGGQLQLMPIPRTCEVHSAVMGGVVAMSKAPVPCPLPPLTQDGVRMEEIVEGCTGALHILARDPMNRMEIFRLNTIPLFVQVSLGQVGRRGPPTTA

SEQ ID NO: 1032972 - protein, 759 aa, Homo sapiens
GLTHDTPNGAGKGDSTTHRLGMQPIKVTEWQQTYTYDSGIHSGANTCVPSVSSKGIMEEDEACGRQYTLKKTTTYTQGVPPSQGDLEYQMSTTARAKRVREAMCPGVSGEDSSLLLATQVEGQATNLQRLAEPSQLLKSAIVHLINYQDDAELATRALPELTKLLNDEDPVVVTKAAMIVNQLSKKEASRRALMGSPQLVAAVVRTMQNTSDLDTARCTTSILHNLSHHREGLLAIFKSGGIPALVRMLSSPVESVLFYAITTLHNLLLYQEGAKMAVRLADGLQKMVPLLNKNNPKFLAITTDCLQLLAYGNQESKLIILANGGPQALVQIMRNYSYEKLLWTTSRVLKVLSVCPSNKPAIVEAGGMQALGKHLTSNSPRLVQNCLWTLRNLSDVATKQEGLESVLKILVNQLSVDDVNVLTCATGTLSNLTCNNSKNKTLVTQNSGVEALIHAILRAGDKDDITEPAVCALRHLTSRHPEAEMAQNSVRLNYGIPAIVKLLNQPNQWPLVKATIGLIRNLALCPANHAPLQEAAVIPRLVQLLVKAHQDAQRHVAAGTQQPYTDGVRMEEIVEGCTGALHILARDPMNRMEIFRLNTIPLFVQLLYSSVENIQRVAAGVLCELAQDKEAADAIDAEGASAPLMELLHSRNEGTATYAAAVLFRISEDKNPDYRKRVSVELTNSLFKHDPAAWEAAQSMIPINEPYGDDLDATYRPMYSSDVPLDPLEMHMDMDGDYPIDTYSDGLRPPYPTADHMLA

SEQ ID NO: 1032973 - protein, 792 aa, Homo sapiens; identical to SEQ ID NO: 1032965

SEQ ID NO: 1032974 - protein, 792 aa, Homo sapiens; identical to SEQ ID NO: 1032965

SEQ ID NO: 1032975 - protein, 792 aa, Homo sapiens; identical to SEQ ID NO: 1032965

SEQ ID NO: 1032976 - protein, 792 aa, Homo sapiens; identical to SEQ ID NO: 1032965

SEQ ID NO: 1032977 - protein, 792 aa, Homo sapiens; identical to SEQ ID NO: 1032965

SEQ ID NO: 1032978 - protein, 792 aa, Homo sapiens; identical to SEQ ID NO: 1032965

SEQ ID NO: 1032979 - protein, 404 aa, Homo sapiens
SWYGRRFKDQSRSSRRRPRRAQFAVRAGSHPGPTPTRPGQAPYSVATMEVMNLMEQPIKVTEWQQTYTYDSGIHSGANTCVPSVSSKGIMEEDEACGRQYTLKKTTTYTQGVPPSQGDLEYQMSTTARAKRVREAMCPGVSGEDSSLLLATQVEGQATNLQRLAEPSQLLKSAIVHLINYQDDAELATRALPELTKLLNDEDPVVVTKAAMIVNQLSKKEASRRALMGSPQLVAAVVRTMQNTSDLDTARCTTSILHNLSHHREGLLAIFKSGGIPALVRMLSSPVESVLFYAITTLHNLLLYQEGAKMAVRLADGLQKMVPLLNKNNPKFLAITTDCLQLLAYGNQESKLIILANGGPQALVQIMRNYSYEKLLWTTRRGLLLVRCLPRACIPPASTMAGLLL

SEQ ID NO: 1032980 - protein, 745 aa, Homo sapiens
MEVMNLMEQPIKVTEWQQTYTYDSGIHSGANTCVPSVSSKGIMEEDEACGRQYTLKKTTTYTQGVPPSQGDLEYQMSTTARAKRVREAMCPGVSGEDSSLLLATQVEGQATNLQRLAEPSQLLKSAIVHLINYQDDAELATRALPELTKLLNDEDPVVVTKAAMIVNQLSKKEASRRALMGSPQLVAAVVRTMQNTSDLDTARCTTSILHNLSHHREGLLAIFKSGGIPALVRMLSSPVESVLFYAITTLHNLLLYQEGAKMAVRLADGLQKMVPLLNKNNPKFLAITTDCLQLLAYGNQESKLIILANGGPQALVQIMRNYSYEKLLWTTSRVLKVLSVCPSNKPAIVEAGGMQALGKHLTSNSPRLVQNCLWTLRNLSDVATKQEGLESVLKILVNQLSVDDVNVLTCATGTLSNLTCNNSKNKTLVTQNSGVEALIHAILRAGDKDDITEPAVCALRHLTSRHPEAEMAQNSVRLNYGIPAIVKLLNQPNQWPLVKATIGLIRNLALCPANHAPLQEAAVIPRLVQLLVKAHQDAQRHVAAGTQQPYTDGVRMEEIVEGCTGALHILARDPMNRMEIFRLNTIPLFVQLLYSSVENIQRVAAGVLCELAQDKEAADAIDAEGASAPLMELLHSRNEGTATYAAAVLFRISEDKNPDYRKRVSVELTNSLFKHDPAAWEAAQSMIPINEPYGDDLDATYRPMYSSDVPLDPLEMHMDMDGDYPIDTYSDGLRPPYPTADHMLA

SEQ ID NO: 1032981 - protein, 493 aa, Homo sapiens
NHAAPSTIASWSRGLPWPPYFGLRRVLPGSEGPRERLMSWREEMWGLEPSLGSDPATSCVSVGKFPNLSEPHCLTCTTDSNALSQGVAGHRDESSRAHTGRADPFRSSHSPWTYSRRLPGVGCSLTPPPFLALQEGLESVLKILVNQLSVDDVNVLTCATGTLSNLTCNNSKNKTLVTQNSGVEALIHAILRAGDKDDITEPAVCALRHLTSRHPEAEMAQNSVRLNYGIPAIVKLLNQPNQWPLVKATIGLIRNLALCPANHAPLQEAAVIPRLVQLLVKAHQDAQRHVAAGTQQPYTDGVRMEEIVEGCTGALHILARDPMNRMEIFRLNTIPLFVQLLYSSVENIQRVAAGVLCELAQDKEAADAIDAEGASAPLMELLHSRNEGTATYAAAVLFRISEDKNPDYRKRVSVELTNSLFKHDPAAWEAAQSMIPINEPYGDDLDATYRPMYSSDVPLDPLEMHMDMDGDYPIDTYSDGLRPPYPTADHMLA

SEQ ID NO: 1032982 - protein, 165 aa, Homo sapiens
HFGEAVSLFVQLLYSSVENIQRVAAGVLCELAQDKEAADAIDAEGASAPLMELLHSRNEGTATYAAAVLFRISEDKNPDYRKRVSVELTNSLFKHDPAAWEAAQSMIPINEPYGDDLDATYRPMYSSDVPLDPLEMHMDMDGDYPIDTYSDGLRPPYPTADHMLA

SEQ ID NO: 1032983 - protein, 792 aa, Homo sapiens; identical to SEQ ID NO: 1032965

SEQ ID NO: 1032984 - protein, 700 aa, Homo sapiens
SWYGRRFKDQSRSSRRRPRRAQFAVRAGSHPGPTPTRPGQAPYSVATMEVMNLMEQPIKVTEWQQTYTYDSGIHSGANTCVPSVSSKGIMEEDEACGRQYTLKKTTTYTQGVPPSQGDLEYQMSTTARAKRVREAMCPGVSGEDSSLLLATQVEGQATNLQRLAEPSQLLKSAIVHLINYQDDAELATRALPELTKLLNDEDPVVVTKAAMIVNQLSKKEASRRALMGSPQLVAAVVRTMQNTSDLDTARCTTSILHNLSHHREGLLAIFKSGGIPALVRMLSSPVESVLFYAITTLHNLLLYQEGAKMAVRLADGLQKMVPLLNKNNPKFLAITTDCLQLLAYGNQESKLIILANGGPQALVQIMRNYSYEKLLWTTSRVLKVLSVCPSNKPAIVEAGGMQALGKHLTSNSPRLVQNCLWTLRNLSDVATKQEGLESVLKILVNQLSVDDVNVLTCATGTLSNLTCNNSKNKTLVTQNSGVEALIHAILRAGDKDDITEPAVCALRHLTSRHPEAEMAQNSVRLNYGIPAIVKLLNQPNQWPLVKATIGLIRNLALCPANHAPLQEAAVIPRLVQLLVKAHQDAQRHVAAGTQQPYTDGVRMEEIVEGCTGALHILARDPMNRMEIFRLNTIPLFVQLLYSSVENIQRVAAGVLCELAQDKEAADAIDAEGASAPLMELLHSPKRVLLPSPLHWYRHDS

SEQ ID NO: 1032985 - protein, 327 aa, Homo sapiens [sequence omitted]

SEQ ID NO: 1032986 - protein, 1061 aa, Homo sapiens
RAATQGRAAVQADDVEVLKVGRTQLIDAVLNLCTYHHPENIQLPPGYQPPNLAISTLYWKAWPLLLVVAAFNPENIGLAAWEEYPTLKMLMEMVMTNNYSYPPCTLTDEETRTEMLNRELQTAQREKQEILAFEGHLAAASTKQTITESSSLLLSQLTSLDPQGPPRRPPPHILDQVKSLNQSLRLGHLLCRSRNPDFLLHIIQRQASSQSMPWLADLVQSSEGSLDVLPVQCLCEFLLHDAVDDAASGEEDDEGESKEQKAKKRQRQQKQRQLLGRLQDLLLGPKADEQTTCEVLDYFLRRLGSSQVASRVLAMKGLSLVLSEGSLRDGEEKEPPMEEDVGDTDVLQGYQWLLRDLPRLPLFDSVRSTTALALQQAIHMETDPQTISAYLIYLSQHTPVEEQAQHSDLALDVARLVVERSTIMSHLFSKLSPSAASDAVLSALLSIFSRYVRRMRQSKEGEEVYSWSESQDQVFLRWSSGETATMHILVVHAMVILLTLGPPRADDSEFQALLDIWFPEEKPLPTAFLVDTSEEALLLPDWLKLRMIRSEVLRLVDAALQDLEPQQLLLFVQSFGIPVSSMSKLLQFLDQAVAHDPQTLEQNIMDKNYMAHLVEVQHERGASGGQTFHSLLTASLPPRRDSTEAPKPKSSPEQPIGQGRIRVGTQLRVLGPEDDLAGMFLQIFPLSPDPRWQSSSPRPVALALQQALGQELARVVQGSPEVPGITVRVLQALATLLSSPHGGALVMSMHRSHFLACPLLRQLCQYQRCVPQDTGFSSLFLKVLLQMLQWLDSPGVEGGPLRAQLRMLASQASAGRRLSDVRGGLLRLAEALAFRQDLEVVSSTVRAVIATLRSGEQCSVEPDLISKVLQGLIEVRSPHLEELLTAFFSATADAASPFPACKPVVVVSSLLLQEEEPLAGGKPGADGGSLEAVRLGPSSGLLVDWLEMLDPEVVSSCPDLQLRLLFSRRKGKGQAQVPSFRPYLLTLFTHQSSWPTLHQCIRVLLGKSREQRFDPSASLDFLWACIHVPRIWQGRDQRTPQKRREELVLRVQARSSSAWWS

SEQ ID NO: 1032987 - protein, 1013 aa, Homo sapiens
NLRLVRGWVVIGRGTLLLVVAAFNPENIGLAAWEEYPTLKMLMEMVMTNNYSYPPCTLTDEETRTEMLNRELQTAQREKQEILAFEGHLAAASTKQTITESSSLLLSQLTSLDPQGPPRRPPPHILDQVKSLNQSLRLGHLLCRSRNPDFLLHIIQRQASSQSMPWLADLVQSSEGSLDVLPVQCLCEFLLHDAVDDAASGEEDDEGESKEQKAKKRQRQQKQRQLLGRLQDLLLGPKADEQTTCEVLDYFLRRLGSSQVASRVLAMKGLSLVLSEGSLRDGEEKEPPMEEDVGDTDVLQGYQWLLRDLPRLPLFDSVRSTTALALQQAIHMETDPQTISAYLIYLSQHTPVEEQAQHSDLALDVARLVVERSTIMSHLFSKLSPSAASDAVLSALLSIFSRYVRRMRQSKEGEEVYSWSESQDQVFLRWSSGETATMHILVVHAMVILLTLGPPRADDSEFQALLDIWFPEEKPLPTAFLVDTSEEALLLPDWLKLRMIRSEVLRLVDAALQDLEPQQLLLFVQSFGIPVSSMSKLLQFLDQAVAHDPQTLEQNIMDKNYMAHLVEVQHERGASGGQTFHSLLTASLPPRRDSTEAPKPKSSPEQPIGQGRIRVGTQLRVLGPEDDLAGMFLQIFPLSPDPRWQSSSPRPVALALQQALGQELARVVQGSPEVPGITVRVLQALATLLSSPHGGALVMSMHRSHFLACPLLRQLCQYQRCVPQDTGFSSLFLKVLLQMLQWLDSPGVEGGPLRAQLRMLASQASAGRRLSDVRGGLLRLAEALAFRQDLEVVSSTVRAVIATLRSGEQCSVEPDLISKVLQGLIEVRSPHLEELLTAFFSATADAASPFPACKPVVVVSSLLLQEEEPLAGGKPGADGGSLEAVRLGPSSGLLVDWLEMLDPEVVSSCPDLQLRLLFSRRKGKGQAQVPSFRPYLLTLFTHQSSWPTLHQCIRVLLGKSREQRFDPSASLDFLWACIHVPRIWQGRDQRTPQKRREELVLRVQARSSSAWWS

SEQ ID NO: 1032988 - protein, 859 aa, Homo sapiens
MELADHLVKRAAAVQADDVEVLKVGRTQLIDAVLNLCTYHHPENIQLPPGYQPPNLAISTLYWKAWPLLLVVAAFNPENIGLAAWEEYPTLKMLMEMVMTNNYSYPPCTLTDEETRTEMLNRELQTAQREKQEILAFEGHLAAASTKQTITESSSLLLSQLTSLDPQGPPRRPPPHILDQVKSLNQSLRLGHLLCRSRNPDFLLHIIQRQASSQSMPWLADLVQSSEGSLDVLPVQCLCEFLLHDAVDDAASGEEDDEGESKEQKAKKRQRQQKQRQLLGRLQDLLLGPKADEQTTCEVLDYFLRRLGSSQVASRVLAMKGLSLVLSEGSLRDGEEKEPPMEEDVGDTDVLQGYQWLLRDLPRLPLFDSVRSTTALALQQAIHMETDPQTISAYLIYLSQHTPVEEQAQHSDLALDVARLVVERSTIMSHLFSKLSPSAASDAVLSALLSIFSRYVRRMRQSKEGEEVYSWSESQDQVFLRWSSGETATMHILVVHAMVILLTLGPPRADDSEFQALLDIWFPEEKPLPTAFLVDTSEEALLLPDWLKLRMIRSEVLRLVDAALQDLEPQQLLLFVQSFGIPVSSMSKLLQFLDQAVAHDPQTLEQNIMDKNYMAHLVEVQHERGASGGQTFHSLLTASLPPRRDSTEAPKPKSSPEQPIGQGRIRVGTQLRVLGPEDDLAGMFLQIFPLSPDPRWQSSSPRPVALALQQALGQELARVVQGSPEVPGITVRVLQALATLLSSPHGGALVMSMHRSHFLACPLLRQLCQYQRCVPQDTGFSSLFLKVLLQMLQWLDSPGVEGGPLRAQLRMLASQASAGRRLSDVRGGLLRLAEALAFRQDLEVVSSTVRFQPVSPLWW

SEQ ID NO: 1032989 - protein, 1065 aa, Homo sapiens
MELADHLVKRAAAVQADDVEVLKVGRTQLIDAVLNLCTYHHPENIQLPPGYQPPNLAISTLYWKAWPLLLVVAAFNPENIGLAAWEEYPTLKMLMEMVMTNNYSYPPCTLTDEETRTEMLNRELQTAQREKQEILAFEGHLAAASTKQTITESSSLLLSQLTSLDPQGPPRRPPPHILDQVKSLNQSLRLGHLLCRSRNPDFLLHIIQRQASSQSMPWLADLVQSSEGSLDVLPVQCLCEFLLHDAVDDAASGEEDDEGESKEQKAKKRQRQQKQRQLLGRLQDLLLGPKADEQTTCEVLDYFLRRLGSSQVASRVLAMKGLSLVLSEGSLRDGEEKEPPMEEDVGDTDVLQGYQWLLRDLPRLPLFDSVRSTTALALQQAIHMETDPQTISAYLIYLSQHTPVEEQAQHSDLALDVARLVVERSTIMSHLFSKLSPSAASDAVLSALLSIFSRYVRRMRQSKEGEEVYSWSESQDQVFLRWSSGETATMHILVVHAMVILLTLGPPRADDSEFQALLDIWFPEEKPLPTAFLVDTSEEALLLPDWLKLRMIRSEVLRLVDAALQDLEPQQLLLFVQSFGIPVSSMSKLLQFLDQAVAHDPQTLEQNIMDKNYMAHLVEVQHERGASGGQTFHSLLTASLPPRRDSTEAPKPKSSPEQPIGQGRIRVGTQLRVLGPEDDLAGMFLQIFPLSPDPRWQSSSPRPVALALQQALGQELARVVQGSPEVPGITVRVLQALATLLSSPHGGALVMSMHRSHFLACPLLRQLCQYQRCVPQDTGFSSLFLKVLLQMLQWLDSPGVEGGPLRAQLRMLASQASAGRRLSDVRGGLLRLAEALAFRQDLEVVSSTVRAVIATLRSGEQCSVEPDLISKVLQGLIEVRSPHLEELLTAFFSATADAASPFPACKPVVVVSSLLLQEEEPLAGGKPGADGGSLEAVRLGPSSGLLVDWLEMLDPEVVSSCPDLQLRLLFSRRKGKGQAQVPSFRPYLLTLFTHQSSWPTLHQCIRVLLGKSREQRFDPSASLDFLWACIHVPRIWQGRDQRTPQKRREELVLRVQARSSSAWWS

SEQ ID NO: 1032990 - protein, 168 aa, Homo sapiens
  misc_feature (10)..(10): Xaa can be any naturally occurring amino acid
FQCFLSCGAXGLAPSGWLGWGGQRSAWALQFWSGPLSVSDLLEVLSDIDEMSRRRPEILSFFSTNLQRLMSSAEECCRNLAFSLALRSMQNSPSIAAAFLPTFMYCLGSQDFEVVQTALRNLPEYALLCQEHAAVLLHRAFLVGMYGQMDPSAQISEALRILHMEAVM

SEQ ID NO: 1032991 - protein, 1065 aa, Homo sapiens; identical to SEQ ID NO: 1032989

SEQ ID NO: 1032992 - protein, 1030 aa, Homo sapiens
LRGELRQEEAAALSDGLLGGRGRQVPLEGQDSLLLVVAAFNPENIGLAAWEEYPTLKMLMEMVMTNNYSYPPCTLTDEETRTEMLNRELQTAQREKQEILAFEGHLAAASTKQTITESSSLLLSQLTSLDPQGPPRRPPPHILDQVKSLNQSLRLGHLLCRSRNPDFLLHIIQRQASSQSMPWLADLVQSSEGSLDVLPVQCLCEFLLHDAVDDAASGEEDDEGESKEQKAKKRQRQQKQRQLLGRLQDLLLGPKADEQTTCEVLDYFLRRLGSSQVASRVLAMKGLSLVLSEGSLRDGEEKEPPMEEDVGDTDVLQGYQWLLRDLPRLPLFDSVRSTTALALQQAIHMETDPQTISAYLIYLSQHTPVEEQAQHSDLALDVARLVVERSTIMSHLFSKLSPSAASDAVLSALLSIFSRYVRRMRQSKEGEEVYSWSESQDQVFLRWSSGETATMHILVVHAMVILLTLGPPRADDSEFQALLDIWFPEEKPLPTAFLVDTSEEALLLPDWLKLRMIRSEVLRLVDAALQDLEPQQLLLFVQSFGIPVSSMSKLLQFLDQAVAHDPQTLEQNIMDKNYMAHLVEVQHERGASGGQTFHSLLTASLPPRRDSTEAPKPKSSPEQPIGQGRIRVGTQLRVLGPEDDLAGMFLQIFPLSPDPRWQSSSPRPVALALQQALGQELARVVQGSPEVPGITVRVLQALATLLSSPHGGALVMSMHRSHFLACPLLRQLCQYQRCVPQDTGFSSLFLKVLLQMLQWLDSPGVEGGPLRAQLRMLASQASAGRRLSDVRGGLLRLAEALAFRQDLEVVSSTVRAVIATLRSGEQCSVEPDLISKVLQGLIEVRSPHLEELLTAFFSATADAASPFPACKPVVVVSSLLLQEEEPLAGGKPGADGGSLEAVRLGPSSGLLVDWLEMLDPEVVSSCPDLQLRLLFSRRKGKGQAQVPSFRPYLLTLFTHQSSWPTLHQCIRVLLGKSREQRFDPSASLDFLWACIHVPRIWQGRDQRTPQKRREELVLRVQARSSSAWWS

SEQ ID NO: 1032993 - protein, 897 aa, Homo sapiens
TEISECVSGCYCHHEGRGVVLVAISAVGGQFPDFLLHIIQRQASSQSMPWLADLVQSSEGSLDVLPVQCLCEFLLHDAVDDAASGEEDDEGESKEQKAKKRQRQQKQRQLLGRLQDLLLGPKADEQTTCEVLDYFLRRLGSSQVASRVLAMKGLSLVLSEGSLRDGEEKEPPMEEDVGDTDVLQGYQWLLRDLPRLPLFDSVRSTTALALQQAIHMETDPQTISAYLIYLSQHTPVEEQAQHSDLALDVARLVVERSTIMSHLFSKLSPSAASDAVLSALLSIFSRYVRRMRQSKEGEEVYSWSESQDQVFLRWSSGETATMHILVVHAMVILLTLGPPRADDSEFQALLDIWFPEEKPLPTAFLVDTSEEALLLPDWLKLRMIRSEVLRLVDAALQDLEPQQLLLFVQSFGIPVSSMSKLLQFLDQAVAHDPQTLEQNIMDKNYMAHLVEVQHERGASGGQTFHSLLTASLPPRRDSTEAPKPKSSPEQPIGQGRIRVGTQLRVLGPEDDLAGMFLQIFPLSPDPRWQSSSPRPVALALQQALGQELARVVQGSPEVPGITVRVLQALATLLSSPHGGALVMSMHRSHFLACPLLRQLCQYQRCVPQDTGFSSLFLKVLLQMLQWLDSPGVEGGPLRAQLRMLASQASAGRRLSDVRGGLLRLAEALAFRQDLEVVSSTVRAVIATLRSGEQCSVEPDLISKVLQGLIEVRSPHLEELLTAFFSATADAASPFPACKPVVVVSSLLLQEEEPLAGGKPGADGGSLEAVRLGPSSGLLVDWLEMLDPEVVSSCPDLQLRLLFSRRKGKGQAQVPSFRPYLLTLFTHQSSWPTLHQCIRVLLGKSREQRFDPSASLDFLWACIHVPRIWQGRDQRTPQKRREELVLRVQARSSSAWWS

SEQ ID NO: 1032994 - protein, 327 aa, Homo sapiens [sequence omitted]

SEQ ID NO: 1032995 - protein, 514 aa, Homo sapiens
NLRLVRGWVVIGRGTLCLSGLPLGLHPCSSHLAGAGPAHPAEAAGGAGAAGPGPELISLVELILAEAETRSQDGDTAACSLIQARLPLLLSCCCGDDESVRKVTEHLSGCIQQWGDSVLGRRCRDLLLQLYLQRPELRVPVPEVLLHSEGAASSSVCKLDGLIHRFITLLADTSDSRALENRGADASMACRKLAVAHPLLLLRHLPMIAALLHGRTHLNFQEFRQQNHLSCFLHVLGLLELLQPHVFRSEHQGALWDCLLSFIRLLLNYRKSSRHLAAFINKFVQFIHKYITYNAPAAISFLQKHADPLHDLSFDNSDLVMLKSLLAGLSLPSRDDRTDRGLDEEGEEESSAGSLPLVSVSLFTPLTAAEMAPYMKRLSRGQTVEDLLEVLSDIDEMSRRRPEILSFFSTNLQRLMSSAEECCRNLAFSLALRSMQNSPSIAAAFLPTFMYCLGSQDFEVVQTALRNLPEYALLCQEHAAVLLHRAFLVGMYGQMDPSAQISEALRILHMEAVM

SEQ ID NO: 1032996 - protein, 104 aa, Homo sapiens
LRGDLRDCQDSQQIKEQKFVHFLAQDKSPSIAAAFLPTFMYCLGSQDFEVVQTALRNLPEYALLCQEHAAVLLHRAFLVGMYGQMDPSAQISEALRILHMEAVM

SEQ ID NO: 1032997 - protein, 576 aa, Homo sapiens
MHILVVHAMVILLTLGPPRADDSEFQALLDIWFPEEKPLPTAFLVDTSEEALLLPDWLKLRMIRSEVLRLVDAALQDLEPQQLLLFVQSFGIPVSSMSKLLQFLDQAVAHDPQTLEQNIMDKNYMAHLVEVQHERGASGGQTFHSLLTASLPPRRDSTEAPKPKSSPEQPIGQGRIRVGTQLRVLGPEDDLAGMFLQIFPLSPDPRWQSSSPRPVALALQQALGQELARVVQGSPEVPGITVRVLQALATLLSSPHGGALVMSMHRSHFLACPLLRQLCQYQRCVPQDTGFSSLFLKVLLQMLQWLDSPGVEGGPLRAQLRMLASQASAGRRLSDVRGGLLRLAEALAFRQDLEVVSSTVRAVIATLRSGEQCSVEPDLISKVLQGLIEVRSPHLEELLTAFFSATADAASPFPACKPVVVVSSLLLQEEEPLAGGKPGADGGSLEAVRLGPSSGLLVDWLEMLDPEVVSSCPDLQLRLLFSRRKGKGQAQVPSFRPYLLTLFTHQSSWPTLHQCIRVLLGKSREQRFDPSASLDFLWACIHVPRIWQGRDQRTPQKRREELVLRVQARSSSAWWS

SEQ ID NO: 1032998 - protein, 1065 aa, Homo sapiens; identical to SEQ ID NO: 1032989

SEQ ID NO: 1032999 - protein, 110 aa, Homo sapiens
MVKIMKAVTIQLEAESQQLLGNVTLGGRWGGSGLASPVGRPLKFVIRPLFQRDVNWSEKEIFHLRKLLVLNAGWYLGMCLEIEISRVFALEPAPQEAFSRDKAKVEILHG

SEQ ID NO: 1033000 - protein, 110 aa, Homo sapiens; identical to SEQ ID NO: 1032999

SEQ ID NO: 1033001 - protein, 110 aa, Homo sapiens; identical to SEQ ID NO: 1032999

SEQ ID NO: 1033002 - protein, 177 aa, Homo sapiens [sequence omitted]

SEQ ID NO: 1033003 - protein, 123 aa, Homo sapiens
MLFYLSGTYYALYFLATLLMITYKSQVFSYPHRYLVLDLALLFLMGILEAVRLYLGTRGNLTEAERPLAASLALTAGTALLSAHFLLWQALVLWADWALSATLLALHGLEAVLQVVAIAAFTR

SEQ ID NO: 1033004 - protein, 123 aa, Homo sapiens; identical to SEQ ID NO: 1033003

SEQ ID NO: 1033005 - protein, 123 aa, Homo sapiens; identical to SEQ ID NO: 1033003

SEQ ID NO: 1033006 - protein, 168 aa, Homo sapiens
MAEGARARGPRGCRDRDGPAGGAGKMAAPRRGRGSSTVLSSVPLQMLFYLSGTYYALYFLATLLMITYKSQVFSYPHRYLVLDLALLFLMGILEAVRLYLGTRGNLTEAERPLAASLALTAGTALLSAHFLLWQALVLWADWALSATLLALHGLEAVLQVVAIAAFTR

SEQ ID NO: 1033007 - protein, 123 aa, Homo sapiens; identical to SEQ ID NO: 1033003

SEQ ID NO: 1033008 - protein, 229 aa, Homo sapiens
MAEGARARGPRGCRDRDGPAGGAGKMAAPRRGRGSSTVLSSVPLQMLFYLSGTYYALYFLATLLMITYKSQVFSYPHRYLVLDLALLFLMGILEAVRLYLGTRGNLTEAERPLAASLALTAGTALLSAHFLLWQALVLWADWALSATLLALHGLEAVLQVVAIAAFTRGFGGEVRAKAGDETAGERAAEGHIRSLRPLQFYQLLPFARSAKQILALCFFPIPRFTISSP

SEQ ID NO: 1033009 - protein, 178 aa, Homo sapiens
MAEGARARGPRGCRDRDGPAGGAGKMAAPRRGELGRGGGFPGLQRRARRSPCGDNPVSAFGALTGPCHRLYVERDSSRHPIEEGAALALAWVAGVLHPEEAPPARGRLAPGRVGAERSGGPVPGGLVRACFVKTRGGMGAVRELDSGKEIGGRCSASAEDSSEGRTPRNGTKALCGSQ

SEQ ID NO: 1033010 - protein, 107 aa, Homo sapiens
MAEGARARGPRGCRDRDGPAGGAGKMAAPRRGRGSSTVLSSVPLQMLFYLSGTYYALYFLATLLMITYKSQVFSYPHRYLVLDLALLFLMGILEAVRLYLGEWTVTP

SEQ ID NO: 1033011 - protein, 123 aa, Homo sapiens; identical to SEQ ID NO: 1033003

SEQ ID NO: 1033012 - protein, 123 aa, Homo sapiens; identical to SEQ ID NO: 1033003

SEQ ID NO: 1033013 - protein, 123 aa, Homo sapiens; identical to SEQ ID NO: 1033003

SEQ ID NO: 1033014 - protein, 177 aa, Homo sapiens [sequence omitted]

SEQ ID NO: 1033015 - protein, 168 aa, Homo sapiens; identical to SEQ ID NO: 1033006

SEQ ID NO: 1033016 - protein, 229 aa, Homo sapiens; identical to SEQ ID NO: 1033008

SEQ ID NO: 1033017 - protein, 111 aa, Homo sapiens
MAEGARARGPRGCRDRDGPAGGAGKMAAPRRGRGSSTVVSCCVPLQDSTQRPELLLGERALGLTPRFPKVLSSNSTLERGVFLDRFRELMELPRISSAGSIPYLLSPAQSG

SEQ ID NO: 1033018 - protein, 123 aa, Homo sapiens; identical to SEQ ID NO: 1033003

SEQ ID NO: 1033019 - protein, 123 aa, Homo sapiens; identical to SEQ ID NO: 1033003

SEQ ID NO: 1033020 - protein, 123 aa, Homo sapiens; identical to SEQ ID NO: 1033003

SEQ ID NO: 1033021 - protein, 123 aa, Homo sapiens; identical to SEQ ID NO: 1033003

SEQ ID NO: 1033022 - protein, 123 aa, Homo sapiens; identical to SEQ ID NO: 1033003

SEQ ID NO: 1033023 - protein, 123 aa, Homo sapiens; identical to SEQ ID NO: 1033003

SEQ ID NO: 1033024 - protein, 218 aa, Homo sapiens
AEGTCLRFSPLMAAAVLGTRGEDVDQLVACIESKLPVLCCTLQLREEFKQEVEATAGLLYVDDPNWSGIGVVRYEHANDDKSSLKSDPEGENIHAGLLKKLNELESDLTFKIGPEYKSMKSCLYVGMASDNVDAAELVETIAATAREIEENSRLLENMTEVVRKGIQEAQVELQKASEERLLEEGVLRQIPVVGSVLNWFSPVQARSLLKGPCEVQML

SEQ ID NO: 1033025 - protein, 337 aa, Homo sapiens
AEGTCLRFSPLMAAAVLGTRGEDVDQLVACIESKLPVLCCTLQLREEFKQEVEATAGLLYVDDPNWSGIGVVRYEHANDDKSSLKSDPEGENIHAGLLKKLNELESDLTFKIGPEYKSMKSCLYVGMASDNVDAAELVETIAATAREIEENSRLLENMTEVVRKGIQEAQVELQKASEERLLEEGVLRQIPVVGSVLNWFSPVQALQKGRTFNLTAGSLESTEPIYVYKAQGAGVTLPPTPSGSRTKQRLPGQKPFKRSLRGSDALSETSSVSHIEDLEKVERLSSGPEQITLEASSTEGHPGAPSPQHTDQTEAFQKGVPHPEDDHSQVEGPESLR

SEQ ID NO: 1033026 - protein, 337 aa, Homo sapiens; identical to SEQ ID NO: 1033025

SEQ ID NO: 1033027 - protein, 337 aa, Homo sapiens; identical to SEQ ID NO: 1033025

SEQ ID NO: 1033028 - protein, 337 aa, Homo sapiens; identical to SEQ ID NO: 1033025

SEQ ID NO: 1033029 - protein, 383 aa, Homo sapiens
AEGTCLRFSPLMAAAVLGTRGEDVDQLVACIESKLPVLCCTLQLREEFKQEVEATAGLLYVDDPNWSGIGVVRYEHANDDKSSLKSDPEGENIHAGLLKKLNELESDLTFKIGPEYKSMKSCLYVGMASDNVDAAELVETIAATAREIEENSRLLENMTEVVRKGIQEAQVELQKASEERLLEEGVLRQIPVVGSVLNWFSPVQALQKGRTFNLTAGSLESTEPIYVYKAQGAGVTLPPTPSGSRTKQRLPGQKPFKRSLRGSDALSETSSVSHIEDLEKVERLSSGPEQITLEASSTEGHPGAPSPQHTDQTEAFQKGVPHPEDDHSQMGKPGCRDLRLTQPVNSPLLVFACHLGATRNPHVEMVSRSTVLYEVVLSLHHKC

SEQ ID NO: 1033030 - protein, 337 aa, Homo sapiens; identical to SEQ ID NO: 1033025

SEQ ID NO: 1033031 - protein, 337 aa, Homo sapiens; identical to SEQ ID NO: 1033025

SEQ ID NO: 1033032 - protein, 362 aa, Homo sapiens
SLFCISLNRLPLSPGPSTLVSCAASVRAMATEEKKPETEAARAQPTPSSSATQSKPTPVKPNYALKFTLAGHTKAVSSVKFSPNGEWLASSSADKLIKIWGAYDGKFEKTISGHKLGISDVAWSSDSNLLVSASDDKTLKIWDVSSGKCLKTLKGHSNYVFCCNFNPQSNLIVSGSFDESVRIWDVKTGKCLKTLPAHSDPVSAVHFNRDGSLIVSSSYDGLCRIWDTASGQCLKTLIDDDNPPVSFVKFSPNGKYILAATLDNTLKLWDYSKGKCLKTYTGHKNEKYCIFANFSVTGGKWIVSGSEDNLVYIWNLQTKEIVQKLQGHTDVVISTACHPTENIIASAALENDKTIKLWKSDC

SEQ ID NO: 1033033 - protein, 956 aa, Homo sapiens
SLFCISLNRLPLSPGPSTLVSCAASVRAMATEEKKPETEAARAQPTPSSSATQSKPTPVKPNYALKFTLAGHTKAVSSVKFSPNGEWLASSSADKLIKIWGAYDGKFEKTISGHKLGISDVAWSSDSNLLVSASDDKTLKIWDVSSGKCLKTLKGHSNYVFCCNFNPQSNLIVSGSFDESVRIWDVKTGKCLKTLPAHSDPVSAVHFNRDGSLIVSSSYDGLCRIWDTASGQCLKTLIDDDNPPVSFVKFSPNGKYILAATLDKEYCVGLWGRACGLPSQRHLRASVSLWRACCGLGTGSRLLVELRLLGSGLLGRRAGPRPSLPEAEPQVRAIGGFRVRFLVEQLWPGQAQPSRMKESAVRGPPRPFLVLTSEHLDFTSHKATALLGCSLSSSFPMLCTLSPVGPSLGPDPLRAVWLGGKTCSGCFQNQEDFLTLLRMTRVRDDNTHQLPVKVSLGTTNTCGCHTVLSDAKSLDFEPEGLLTLMGKGVPAPLAFAPGADGGCDVVAAELGVGTEGCLQTCRLTPLSVLQHSEALGLQQGEGEPPQAWAPMVHHPWVMASGGDRAGPGDDKGEELREPSPLGLVRIPERPGYLEGGSLQVKSSIVWVWYLYFSEISEVSSETPCLEVELHKIKGNHDSVTSLPLLFQCLKTYTGHKNEKYCIFANFSVTGGKWIVSGSEDNLVYIWNLQTKEIVQKLQGHTGEGLRSCSHWLPVDVRTVPAGEAWCARRVLSSSPSHLSPPLAPLRNRCYRALAQGMELVTVLPTQTRAPGLNPVSPCSARHAGPEGVCGCGTLGGCSPSHVTASSVSWAGDSEVIAAPSWRLWLLSGTCSLSQRDPPAACRPSGLHGGAGSQATWGCHLCGSRLPSAAAATSSPSGPAFPRLMEPTRAGGSSPCGNLGRHCFSLHVSSFTQPGVSAYAPRRAWAFPWVLAGVLGFFGLRRSCKHFDVADLAPPVC

SEQ ID NO: 1033034 - protein, 255 aa, Homo sapiens
MESGWQVHLLINLLKFGARMMGNLRKPYDKTLKIWDVSSGKCLKTLKGHSNYVFCCNFNPQSNLIVSGSFDESVRIWDVKTGKCLKTLPAHSDPVSAVHFNRDGSLIVSSSYDGLCRIWDTASGQCLKTLIDDDNPPVSFVKFSPNGKYILAATLDNTLKLWDYSKGKCLKTYTGHKNEKYCIFANFSVTGGKWIVSGSEDNLVYIWNLQTKEIVQKLQGHTDVVISTACHPTENIIASAALENDKTIKLWKSDC

SEQ ID NO: 1033035 - protein, 334 aa, Homo sapiens
MATEEKKPETEAARAQPTPSSSATQSKPTPVKPNYALKFTLAGHTKAVSSVKFSPNGEWLASSSADKLIKIWGAYDGKFEKTISGHKLGISDVAWSSDSNLLVSASDDKTLKIWDVSSGKCLKTLKGHSNYVFCCNFNPQSNLIVSGSFDESVRIWDVKTGKCLKTLPAHSDPVSAVHFNRDGSLIVSSSYDGLCRIWDTASGQCLKTLIDDDNPPVSFVKFSPNGKYILAATLDNTLKLWDYSKGKCLKTYTGHKNEKYCIFANFSVTGGKWIVSGSEDNLVYIWNLQTKEIVQKLQGHTDVVISTACHPTENIIASAALENDKTIKLWKSDC

SEQ ID NO: 1033036 - protein, 117 aa, Homo sapiens
ISRLVLFDKHLSSPYLSPMLKNIQGVCAYDRRDARGHTGQANALITLAILTLWGAFLVVFIYGKPCTGGVYLCHLGKQAVWHILAHPALQPMKEALKTLRWGKVLAVWIHRPSKELP

SEQ ID NO: 1033037 - protein, 1247 aa, Homo sapiens
MRSPAPVTVGVLGIAPANSAASTFPESTAIGIPLPPKLWTGHEGAKCFPGCLLRGHQHSCHGPFVHRMPVALPPQGSAVHSKALRSEAGRRECAVVEARGPGLSFSFKPLSPPLGTTPLYLEVKMPAQEGRAGPRRARCEVSLRTAERARVTPERPCQSAGLAGSRFVHRGLCACRGGKSPQPGSRPRGKAQPGLPNPVNAQVPGLPDGQESSCPPGVGGHMGALRPGAAPGAFQMPTAALIRTSDDQEGAWSPGEVPRPESTPETTPGDATCAGPGGPLVSVYRACCLWKREGTLALSRLPLSPGPSTLVSCAASVRAMATEEKKPETEAARAQPTPSSSATQSKPTPVKPNYALKFTLAGHTKAVSSVKFSPNGEWLASSSADKLIKIWGAYDGKFEKTISGHKLGISDVAWSSDSNLLVSASDDKTLKIWDVSSGKCLKTLKGHSNYVFCCNFNPQSNLIVSGSFDESVRIWDVKTGKCLKTLPAHSDPVSAVHFNRDGSLIVSSSYDGLCRIWDTASGQCLKTLIDDDNPPVSFVKFSPNGKYILAATLDKEYCVGLWGRACGLPSQRHLRASVSLWRACCGLGTGSRLLVELRLLGSGLLGRRAGPRPSLPEAEPQVRAIGGFRVRFLVEQLWPGQAQPSRMKESAVRGPPRPFLVLTSEHLDFTSHKATALLGCSLSSSFPMLCTLSPVGPSLGPDPLRAVWLGGKTCSGCFQNQEDFLTLLRMTRVRDDNTHQLPVKVSLGTTNTCGCHTVLSDAKSLDFEPEGLLTLMGKGVPAPLAFAPGADGGCDVVAAELGVGTEGCLQTCRLTPLSVLQHSEALGLQQGEGEPPQAWAPMVHHPWVMASGGDRAGPGDDKGEELREPSPLGLVRIPERPGYLEGGSLQVKSSIVWVWYLYFSEISEVSSETPCLEVELHKIKGNHDSVTSLPLLFQCLKTYTGHKNEKYCIFANFSVTGGKWIVSGSEDNLVYIWNLQTKEIVQKLQGHTGEGLRSCSHWLPVDVRTVPAGEAWCARRVLSSSPSHLSPPLAPLRNRCYRALAQGMELVTVLPTQTRAPGLNPVSPCSARHAGPEGVCGCGTLGGCSPSHVTASSVSWAGDSEVIAAPSWRLWLLSGTCSLSQRDPPAACRPSGLHGGAGSQATWGCHLCGSRLPSAAAATSSPSGPAFPRLMEPTRAGGSSPCGNLGRHCFSLHVSSFTQPGVSAYAPRRAWAFPWVLAGVLGFFGLRRSCKHFDVADLAPPVC

SEQ ID NO: 1033038 - protein, 997 aa, Homo sapiens
PGGPLTRPEAPALVSSFPQASVPGLTSPLSLHCPFREGPQTHQATQSLDRLPLSPGPSTLVSCAASVRAMATEEKKPETEAARAQPTPSSSATQSKPTPVKPNYALKFTLAGHTKAVSSVKFSPNGEWLASSSADKLIKIWGAYDGKFEKTISGHKLGISDVAWSSDSNLLVSASDDKTLKIWDVSSGKCLKTLKGHSNYVFCCNFNPQSNLIVSGSFDESVRIWDVKTGKCLKTLPAHSDPVSAVHFNRDGSLIVSSSYDGLCRIWDTASGQCLKTLIDDDNPPVSFVKFSPNGKYILAATLDKEYCVGLWGRACGLPSQRHLRASVSLWRACCGLGTGSRLLVELRLLGSGLLGRRAGPRPSLPEAEPQVLTIGGFRVRFLVEQLWPGQAQPSRMKESAVRGPPRPFLVLTSEHLDFTSHKATALLGCSLSSSFPMLCTLSPVGPSLGPDPLRAVWLGGKTCSGCFQNQEDFLTLLRMTRVRDDNTHQLPVKVSLGTTNTCGCHTVLSDAKSLDFEPEGLLTLMGKGVPAPLAFAPGADGGCDVVAAELGVGTEGCLQTCRLTPLSVLQHSEALGLQQGEGEPPQAWAPMVHHPWVMASGGDRAGPGDDKGEELREPSPLGLVRIPERPGYLEGGSLQVKSSIVWVWYLYFSEISEVSSETPCLEVELHKIKGNHDSVTSLPLLFQCLKTYTGHKNEKYCIFANFSVTGGKWIVSGSEDNLVYIWNLQTKEIVQKLQGHTGEGLRSCSHWLPVDVRTVPAGEAWCARRVLSSSPSHLSPPLAPLRNRCYRALAQGMELVTVLPTQTRAPGLNPVSPCSARHAGPEGVCGCGTLGGCSPSHVTASSVSWAGDSEVIAAPSWRLWLLSGTCSLSQRDPPAACRPSGLHGGAGSQATWGCHLCGSRLPSAAAATSSPSGPAFPRLMEPTRAGGSSPCGNLGRHCFSLHVSSFTQPGVSAYAPRRAWAFPWVLAGVLGFFGLRRSCKHFDVADLAPPVC

SEQ ID NO: 1033039 - protein, 393 aa, Homo sapiens
SVAAWSPPELPPCRAESALPPRRRPTRRPERPAPPPRPGRLPLSPGPSTLVSCAASVRAMATEEKKPETEAARAQPTPSSSATQSKPTPVKPNYALKFTLAGHTKAVSSVKFSPNGEWLASSSADKLIKIWGAYDGKFEKTISGHKLGISDVAWSSDSNLLVSASDDKTLKIWDVSSGKCLKTLKGHSNYVFCCNFNPQSNLIVSGSFDESVRIWDVKTGKCLKTLPAHSDPVSAVHFNRDGSLIVSSSYDGLCRIWDTASGQCLKTLIDDDNPPVSFVKFSPNGKYILAATLDNTLKLWDYSKGKCLKTYTGHKNEKYCIFANFSVTGGKWIVSGSEDNLVYIWNLQTKEIVQKLQGHTDVVISTACHPTENIIASAALENDKTIKLWKSDC

SEQ ID NO: 1033040 - protein, 422 aa, Homo sapiens
RNAVTSSGNRWFLGIAPANSAASTFPESTAIGIPLPPKLWTGHEGAKCFPGCLLRGHQHSCHGPFVHRMPVALPPQGSAVHSKALRSEAGRRECAVVEARGPGLSFSFKPLSPPLGTTPLYLEVKMPAQEGRAGPRRARCEVSLRTAERARVTPERPCQSAGLAGSRFVHRGLCACRGGKSPQPGSRPRGKAQPGLPNPVNAQVPGLPDGQESSCPPGVGGHMGALRPGAAPGAFQMPTAALIRTSDDQEGAWSPGEVPRPESTPETTPGDATCAGPGGPLVSVYRACCLWKREGTLALSRLPLSPGPSTLVSCAASVRAMATEEKKPETEAARAQPTPSSSATQSKPTPVKPNYALKFTLAGHTKAVSSVKFSPNGEWLASSSADKLIKIWGAYDGKFEKTISGTFRRKRLYRNYKATQMS

SEQ ID NO: 1033041 - protein, 393 aa, Homo sapiens; identical to SEQ ID NO: 1033039

SEQ ID NO: 1033042 - protein, 334 aa, Homo sapiens; identical to SEQ ID NO: 1033035

SEQ ID NO: 1033043 - protein, 334 aa, Homo sapiens; identical to SEQ ID NO: 1033035

SEQ ID NO: 1033044 - protein, 987 aa, Homo sapiens
SVAAWSPPELPPCRAESALPPRRRPTRRPERPAPPPRPGRLPLSPGPSTLVSCAASVRAMATEEKKPETEAARAQPTPSSSATQSKPTPVKPNYALKFTLAGHTKAVSSVKFSPNGEWLASSSADKLIKIWGAYDGKFEKTISGHKLGISDVAWSSDSNLLVSASDDKTLKIWDVSSGKCLKTLKGHSNYVFCCNFNPQSNLIVSGSFDESVRIWDVKTGKCLKTLPAHSDPVSAVHFNRDGSLIVSSSYDGLCRIWDTASGQCLKTLIDDDNPPVSFVKFSPNGKYILAATLDKEYCVGLWGRACGLPSQRHLRASVSLWRACCGLGTGSRLLVELRLLGSGLLGRRAGPRPSLPEAEPQVRAIGGFRVRFLVEQLWPGQAQPSRMKESAVRGPPRPFLVLTSEHLDFTSHKATALLGCSLSSSFPMLCTLSPVGPSLGPDPLRAVWLGGKTCSGCFQNQEDFLTLLRMTRVRDDNTHQLPVKVSLGTTNTCGCHTVLSDAKSLDFEPEGLLTLMGKGVPAPLAFAPGADGGCDVVAAELGVGTEGCLQTCRLTPLSVLQHSEALGLQQGEGEPPQAWAPMVHHPWVMASGGDRAGPGDDKGEELREPSPLGLVRIPERPGYLEGGSLQVKSSIVWVWYLYFSEISEVSSETPCLEVELHKIKGNHDSVTSLSLLFQCLKTYTGHKNEKYCIFANFSVTGGKWIVSGSEDNLVYIWNLQTKEIVQKLQGHTGEGLRSCSHWLPVDVRTVPAGEAWCARRVLSSSPSHLSPPLAPLRNRCYRALAQGMELVTVLPTQTRAPGLNPVSPCSARHAGPEGVCGCGTLGGCSPSHVTASSVSWAGDSEVIAAPSWRLWLLSGTCSLSQRDPPAACRPSGLHGGAGSQATWGCHLCGSRLPSAAAATSSPSGPAFPRLMEPTRAGGSSPCGNLGRHCFSLHVSSFTQPGVSAYAPRRAWAFPWVLAGVLGFFGLRRSCKHFDVADLAPPVC

SEQ ID NO: 1033045 - protein, 1123 aa, Homo sapiens
MPAQEGRAGPRRARCEVSLRTAERARVTPERPCQSAGLAGSRFVHRGLCACRGGKSPQPGSRPRGKAQPGLPNPVNAQVPGLPDGQESSCPPGVGGHMGALRPGAAPGAFQMPTAALIRTSDDQEGAWSPGEVPRPESTPETTPGDATCAGPGGPLVSVYRACCLWKREGTLALSRLPLSPGPSTLVSCAASVRAMATEEKKPETEAARAQPTPSSSATQSKPTPVKPNYALKFTLAGHTKAVSSVKFSPNGEWLASSSADKLIKIWGAYDGKFEKTISGHKLGISDVAWSSDSNLLVSASDDKTLKIWDVSSGKCLKTLKGHSNYVFCCNFNPQSNLIVSGSFDESVRIWDVKTGKCLKTLPAHSDPVSAVHFNRDGSLIVSSSYDGLCRIWDTASGQCLKTLIDDDNPPVSFVKFSPNGKYILAATLDKSVLRGTVGAGMWPPQPETPACQREPLESVLWAWHGIQAPGGASASGQWPVRSEGRPPSIPSRGCTSGPTIGGFRVRFLVEQLWPGQAQPSRMKESAVRGPPRPFLVLTSEHLDFTSHKATALLGCSLSSSFPMRAPSALWVRAWALILLRAVWLGGKTCSGCFQNQEDFLTLLRMTRVRDDNTHQLPVKVSLGTTNTCGCHTVLSDAKSLDFEPEGLLTLMGKGVPAPLAFAPGADGGCDVVAAELGVGTEGCLQTCRLTPLSVLQHSEALGLQQGEGEPPQAWAPMVHHPWVMASGGDRAGPGDDKGEELREPSPLGLVRIPERPGYLEGGSLQVKSSIVWVWYLYFSEISEVSSETPCLEVELHKIKGNHDSVTSLPLLFQCLKTYTGHKNEKYCIFANFSVTGGKWIVSGSEDNLVYIWNLQTKEIVQKLQGHTGEGLRSCSHWLPVDVRTVPAGEAWCARRVLSSSPSHLSPPLAPLRNRCYRALAQGMELVTVLPTQTRAPGLNPVSPCSARHAGPEGVCGCGTLGGCSPSHVTASSVSWAGDSEVIAAPSWRLWLLSGTCSLSQRDPPAACRPSGLHGGAGSQATWGCHLCGSRLPSAAAATSSPSGPAFPRLMEPTRAGGSSPCGNLGRHCFSLHVSSFTQPGVSAYAPRRAWAFPWVLAGVLGFFGLRRSCKHFDVADLAPPVC

SEQ ID NO: 1033046 - protein, 869 aa, Homo sapiens
MGMFEILTFCRWSYFVLSVTDPVLSGHKLGISDVAWSSDSNLLVSASDDKTLKIWDVSSGKCLKTLKGHSNYVFCCNFNPQSNLIVSGSFDESVRIWDVKTGKCLKTLPAHSDPVSAVHFNRDGSLIVSSSYDGLCRIWDTASGQCLKTLIDDDNPPVSFVKFSPNGKYILAATLDKEYCVGLWGRACGLPSQRHLRASVSLWRACCGLGTGSRLLVELRLLGSGLLGRRAGPRPSLPEAEPQVRAIGGFRVRFLVEQLWPGQAQPSRMKESAVRGPPRPFLVLTSEHLDFTSHKATALLGCSLSSSFPMLCTLSPVGPSLGPDPLRAVWLGGKTCSGCFQNQEDFLTLLRMTRVRDDNTHQLPVKVSLGTTNTCGCHTVLSDAKSLDFEPEGLLTLMGKGVPAPLAFAPGADGGCDVVAAELGVGTEGCLQTCRLTPLSVLQHSEALGLQQGEGEPPQAWAPMVHHPWVMASGGDRAGPGDDKGEELREPSPLGLVRIPERPGYLEGGSLQVKSSIVWVWYLYFSEISEVSSETPCLEVELHKIKGNHDSVTSLPLLFQCLKTYTGHKNEKYCIFANFSVTGGKWIVSGSEDNLVYIWNLQTKEIVQKLQGHTGEGLRSCSHWLPVDVRTVPAGEAWCARRVLSSSPSHLSPPLAPLRNRCYRALAQGMELVTVLPTQTRAPGLNPVSPCSARHAGPEGVCGCGTLGGCSPSHVTASSVSWAGDSEVIAAPSWRLWLLSGTCSLSQRDPPAACRPSGLHGGAGSQATWGCHLCGSRLPSAAAATSSPSGPAFPRLMEPTRAGGSSPCGNLGRHCFSLHVSSFTQPGVSAYAPRRAWAFPWVLAGVLGFFGLRRSCKHFDVADLAPPVC

SEQ ID NO: 1033047 - protein, 393 aa, Homo sapiens; identical to SEQ ID NO: 1033039

SEQ ID NO: 1033048 - protein, 393 aa, Homo sapiens; identical to SEQ ID NO: 1033039

SEQ ID NO: 1033049 - protein, 170 aa, Homo sapiens
GASGAAAYGADMAKSKNHTTHNQSRKWHRNGIKKPRSQRYESLKGVDPKFLRNMRFAKKHNKKGLKKMQANNAKAMSARAEAIKALVKPKEVKPKIPKGVSRKLDRLAYIAHPKLGKRARARIAKGLRLCRPKAKAKAKAKDQTKAQAAAPASVPAQAPKRTQAPTKASE

SEQ ID NO: 1033050 - protein, 170 aa, Homo sapiens; identical to SEQ ID NO: 1033049

SEQ ID NO: 1033051 - protein, 74 aa, Homo sapiens
GASGAAAYGADMAKSKNHTTHNQFRKLDKNGIKEPRLQRYGSFKGVGPKVPRDMRFGKKDTHKGAHEGSGPHFP

SEQ ID NO: 1033052 - protein, 170 aa, Homo sapiens; identical to SEQ ID NO: 1033049

SEQ ID NO: 1033053 - protein, 169 aa, Homo sapiens
LQATSRNPQNMTQSKNHTTHNQSRKWHRNGIKKPRSQRYESLKGVDPKFLRNMRFAKKHNKKGLKKMQANNAKAMSARAEAIKALVKPKEVKPKIPKGVSRKLDRLAYIAHPKLGKRARARIAKGLRLCRPKAKAKAKAKDQTKAQAAAPASVPAQAPKRTQAPTKASE

SEQ ID NO: 1033054 - protein, 158 aa, Homo sapiens
NSKDAPTEHDQSRKWHRNGIKKPRSQRYESLKGVDPKFLRNMRFAKKHNKKGLKKMQANNAKAMSARAEAIKALVKPKEVKPKIPKGVSRKLDRLAYIAHPKLGKRARARIAKGLRLCRPKAKAKAKAKDQTKAQAAAPASVPAQAPKRTQAPTKASE

SEQ ID NO: 1033055 - protein, 166 aa, Homo sapiens
GASGAAAYGADMAKSKNHTTHNQSRKWHRNGIKKPRSQRYESLKGVDPKFLRNMRFAKKHNKKGLKKMQANNAKAMSARAEAIKALVKPKEVKPKIPKGVSRKLDRLAYIAHPKLAPVLGPPKTQPYTMSRLIAMTGGKSWQPTGLGANPDTSVPTVVCPWPCKDR

SEQ ID NO: 1033056 - protein, 69 aa, Homo sapiens
GASGAAAYGADMAKSKNHTTHNQSRKWHRNGIKKPRSQRYESLKGRVTCTESHGQCLVLVPGAQSRPLM

SEQ ID NO: 1033057 - protein, 51 aa, Homo sapiens
AAGDLEEPTEHDPPVPKMAQKWYQETPITKIPFLCHFRDWLCVVWFLDWVM

SEQ ID NO: 1033058 - protein, 170 aa, Homo sapiens; identical to SEQ ID NO: 1033049

SEQ ID NO: 1033059 - protein, 173 aa, Homo sapiens
GASGAAAYGADMAKSKNHTTHNQSRKWHRNGIKKPRSQRYESLKGVDPKFLRNMRFAKKHNKKGLKKMQANNAKAMSARAEAIKALVKPKEVKPKIPKGVSRKLDRLAYIAHPKLGKRARARIAKGLRLCRPKAKAQTGVSDSRLVHDGMCIIRMRAGGPNRRSAVALIGVTL

SEQ ID NO: 1033060 - protein, 173 aa, Homo sapiens
MYTWLIPERLSPHRQVPTLAIPTADQSRKWHRNGIKKPRSQRYESLKGVDPKFLRNMRFAKKHNKKGLKKMQANNAKAMSARAEAIKALVKPKEVKPKIPKGVSRKLDRLAYIAHPKLGKRARARIAKGLRLCRPKAKAKAKAKDQTKAQAAAPASVPAQAPKRTQAPTKASE

SEQ ID NO: 1033061 - protein, 152 aa, Homo sapiens
MSQSRRGVQSSGLDVGADESWYGTTLGVDPKFLRNMRFAKKHNKKGLKKMQANNAKAMSARAEAIKALVKPKEVKPKIPKGVSRKLDRLAYIAHPKLGKRARARIAKGLRLCRPKAKAKAKAKDQTKAQAAAPASVPAQAPKRTQAPTKASE

SEQ ID NO: 1033062 - protein, 170 aa, Homo sapiens; identical to SEQ ID NO: 1033049

SEQ ID NO: 1033063 - protein, 145 aa, Homo sapiens
DLEDHPVRSTEPQRYESLKGVDPKFLRNMRFAKKHNKKGLKKMQANNAKAMSARAEAIKALVKPKEVKPKIPKGVSRKLDRLAYIAHPKLGKRARARIAKGLRLCRPKAKAKAKAKDQTKAQAAAPASVPAQAPKRTQAPTKASE

SEQ ID NO: 1033064 - protein, 97 aa, Homo sapiens
GASGAAAYGADMAKSKNHTTHNQSRKWHRNGIKKPRSQRYESLKGVDPKFLRNMRFAKKHNKKGLKKMQANNAKAMSARAEAIKALVKPKEVKPKIP

SEQ ID NO: 1033065 - protein, 119 aa, Homo sapiens
MTQQGAALQNYNNELVKCIEELCQKREELCRQIQEEEDEKQRLQNEVRQLTEKLARVNENLARKIASRNEFDRTIAETEAAYLKILESSQTLLSVLKREAGNLTKATAPDQKSSGGRDS

SEQ ID NO: 1033066 - protein, 83 aa, Homo sapiens
MTQQGAALQNYNNELVKCERRSRDGEVGRAAGPGSRLAAGCPWTRLAAGIARLSRALRAGGRVSVARALAGSQAPRRALGGGA

SEQ ID NO: 1033067 - protein, 119 aa, Homo sapiens; identical to SEQ ID NO: 1033065

SEQ ID NO: 1033068 - protein, 193 aa, Homo sapiens
MTRYRGRYSLVRASMDRPSRGCPDRCGHRAAEQSPPCRRPGVRGPSPRWLAGPAPGARGWCLTLASSGGRRPALRRRAPALGPQRRPSRPPGIEELCQKREELCRQIQEEEDEKQRLQNEVRQLTEKLARVNENLARKIASRNEFDRTIAETEAAYLKILESSQTLLSVLKREAGNLTKATAPDQKSSGGRDS

SEQ ID NO: 1033069 - protein, 111 aa, Homo sapiens
RAVGESCAGADSAASAAVGVVGPRAALTMTQQGAALQNYNNELVKCERRSRDGEVGRAAGPGSRLAAGCPWTRLAAGIARLSRALRAGGRVSVARALAGSQAPRRALGGGA

SEQ ID NO: 1033070 - protein, 83 aa, Homo sapiens; identical to SEQ ID NO: 1033066

SEQ ID NO: 1033071 - protein, 111 aa, Homo sapiens; identical to SEQ ID NO: 1033069

SEQ ID NO: 1033072 - protein, 87 aa, Homo sapiens
RAVGESCAGADSAASAAVGVVGPRAALTMTQQGAALQNYNNELVKCIEELCQKREELCRQIQVQVSSARGLSLWHPHSCPAREALVV

SEQ ID NO: 1033073 - protein, 110 aa, Homo sapiens
MTTGAAANYNDWSVHKDCANGDCGADQERRDKHGANEVRQLTEKLARVNENLARKIASRNEFDRTIAETEAAYLKILESSQTLLSVLKREAGNLTKATAPDQKSSGGRDS

SEQ ID NO: 1033074 - protein, 247 aa, Homo sapiens
  misc_feature (119)..(119): Xaa can be any naturally occurring amino acid
  misc_feature (124)..(124): Xaa can be any naturally occurring amino acid
  misc_feature (139)..(139): Xaa can be any naturally occurring amino acid
  misc_feature (145)..(145): Xaa can be any naturally occurring amino acid
  misc_feature (149)..(151): Xaa can be any naturally occurring amino acid
  misc_feature (159)..(159): Xaa can be any naturally occurring amino acid
  misc_feature (165)..(165): Xaa can be any naturally occurring amino acid
  misc_feature (169)..(169): Xaa can be any naturally occurring amino acid
RAVGESCAGADSAASAAVGVVGPRAALTMTQQGAALQNYNNELVKCIEELCQKREELCRQIQEEEDEKQRLQNEVRQLTEKLARVNENLARKIASRNEFDRTIAETEAAYLKNLKNSQXFLNIXKKKTKNLTKLQPQTXKITTTXTFFXXXSNSFLLFXLFFNPXKFLXKTSLFFTAAATFPHCLRCREGQVPASTGISDKPRAQPTRGSSLHAHTGYGDGGLQVSSARGLSLWHPHSCPAREALVV

SEQ ID NO: 1033075 - protein, 109 aa, Homo sapiens
RAVGESCAGADSAASAAVGVVGPRAALTMTQQGAALQNYNNELVKCIEELCQKREELCRQIQEEEDEKQRLQNEILESSQTLLSVLKREAGNLTKATAPDQKSSGGRDS

SEQ ID NO: 1033076 - protein, 83 aa, Homo sapiens; identical to SEQ ID NO: 1033066

SEQ ID NO: 1033077 - protein, 83 aa, Homo sapiens; identical to SEQ ID NO: 1033066

SEQ ID NO: 1033078 - protein, 554 aa, Homo sapiens
MTAPGAAGRCPPTTWLGSLLLLVCLLASRSITEEVSEYCSHMIGSGHLQSLQRLIDSQMETSCQITFEFVDQEQLKDPVCYLKKAFLLVQDIMEDTMRFRDNTANPIAIVQLQELSLRLKSCFTKDYEEHDKACVRTFYETPLQLLEKVKNVFNETKNLLDKDWNIFSKNCNNSFAECSSQDVVTKPDCNCLYPKAIPSSDPASVSPHQPLAPSMAPVAGLTWEDSEGTEGSSLLPGEQPLHTVDPGSAKQRPPRSTCQSFEPPETPVVKDSTIGGSPQPRPSVGAFNPGMEDILDSAMGTNWVPEEASGEASEIPVPQGTELSPSRPGGGSMQTEPARPSNFLSASSPLPASAKGQQPADVTATALPRVGPVMPTGQDWNHTPQKTDHPSALLRDPPEPGSPRISSLRPQALSNPSTLSAQPQLSRSHSSGSVLPLGELEGRRSTRDRTSPAEPEAAPASEGAARPLPRFNSVPLTDTGHERQSEGSSSPQLQESVFHLLVPSVILVLLAVGGLLFYRWRRRSHQEPQRADSPLEQPEGSPLTQDDRQVELPV

SEQ ID NO: 1033079 - protein, 438 aa, Homo sapiens [sequence omitted]

SEQ ID NO: 1033080 - protein, 283 aa, Homo sapiens
LRVGQSCSIVDEALFFCVEQGMVDTGESETWGEMTPSLSQTWLGSLLLLVCLLASRSITEEVSEYCSHMIGSGHLQSLQRLIDSQMETSCQITFEFVDQEQLKDPVCYLKKAFLLVQDIMEDTMRFRDNTPNAIAIVQLQELSLRLKSCFTKDYEEHDKACVRTFYETPLQLLEKVKNVFNETKNLLDKDWNIFSKNCNNSFAECSSQGHERQSEGSSSPQLQESVFHLLVPSVILVLLAVGGLLFYRWRRRSHQEPQRADSPLEQPEGSPLTQDDRQVELPV

SEQ ID NO: 1033081 - protein, 617 aa, Homo sapiens
EGWPVRLGPGKVKVCLGPLGARAALRIPGQRCGPRPGRPLRSSQRASERARAADAPGRDPAARMTAPGAAGRCPPTTWLGSLLLLVCLLASRSITEEVSEYCSHMIGSGHLQSLQRLIDSQMETSCQITFEFVDQEQLKDPVCYLKKAFLLVQDIMEDTMRFRDNTPNAIAIVQLQELSLRLKSCFTKDYEEHDKACVRTFYETPLQLLEKVKNVFNETKNLLDKDWNIFSKNCNNSFAECSSQDVVTKPDCNCLYPKAIPSSDPASVSPHQPLAPSMAPVAGLTWEDSEGTEGSSLLPGEQPLHTVDPGSAKQRPPRSTCQSFEPPETPVVKDSTIGGSPQPRPSVGAFNPGMEDILDSAMGTNWVPEEASGEASEIPVPQGTELSPSRPGGGSMQTEPARPSNFLSASSPLPASAKGQQPADVTGTALPRVGPVRPTGQDWNHTPQKTDHPSALLRDPPEPGSPRISSLRPQGLSNPSTLSAQPQLSRSHSSGSVLPLGELEGRRSTRDRRSPAEPEGGPASEGAARPLPRFNSVPLTDTGHERQSEGSSSPQLQESVFHLLVPSVILVLLAVGGLLFYRWRRRSHQEPQRADSPLEQPEGSPLTQDDRQVELPV

SEQ ID NO: 1033082 - protein, 319 aa, Homo sapiens
EGWPVRLGPGKVKVCLGPLGARAALRIPGQRCGPRPGRPLRSSQRASERARAADAPGRDPAARMTAPGAAGRCPPTTWLGSLLLLVCLLASRSITEEVSEYCSHMIGSGHLQSLQRLIDSQMETSCQITFEFVDQEQLKDPVCYLKKAFLLVQDIMEDTMRFRDNTPNAIAIVQLQELSLRLKSCFTKDYEEHDKACVRTFYETPLQLLEKVKNVFNETKNLLDKDWNIFSKNCNNSFAECSSQGHERQSEGSSSPQLQESVFHLLVPSVILVLLAVGGLLFYRWRRRSHQEPQRADSPLEQPEGSPLTQDDRQVELPV

SEQ ID NO: 1033083 - protein, 617 aa, Homo sapiens; identical to SEQ ID NO: 1033081

SEQ ID NO: 1033084 - protein, 553 aa, Homo sapiens
MTAPGAAGRCPPTTWLGSLLLLVCLLASRSITEEVSEYCSHMIGSGHLQSLQRLIDSQMETSCQITFEFVDQEQLKDPVCYLKKAFLLVQDIMEDTMRFRDNTPNAIAIVQLQELSLRLKSCFTKDYEEHDKACVRTFYETPLQLLEKVKNVFNETKNLLDKDWNIFSKNCNNSFAECSSQDVVTKPDCNCLYPKAIPSSDPASVSPHQPLAPSMAPVAGLTWEDSEGTEGSSLLPGEQPLHTVDPGSAKQRPPRSTCQSFEPPETPVVKDSTIGGSPQPRPSVGAFNPGMEDILDSAMGTNWVPEEASGEASEIPVPQGTELSPSRPGGGSMQTEPARPSNFLSASSPLPASAKGQQPADVTGTALPRVGPVRPTGQDWNHTPQKTDHPSALLRDPPEPGSPRISSPRPQGLSNPSTLSAQPQLSRSHSSGSVLPLGELEGRRSTRDRRSPAEPEGGPASEGAARPLPRFNSVPLTDTHERQSEGSSSPQLQESVFHLLVPSVILVLLAVGGLLFYRWRRRSHQEPQRADSPLEQPEGSPLTQDDRQVELPV

SEQ ID NO: 1033085 - protein, 218 aa, Homo sapiens
YDHAFGAHGRRCKSMMLVVEAIVMLRMTSVGILTDMMGRKVGRTYVEKVPSIDVLAVITESIKKCASDLTSDIGDERPDLPEAPTNFRGPQARIFWRTVRGMLPHKTKRGQAALDRLKVFDGIPPPYDKKKRMVVPAALKVVRLKPTRKFAYLGRLAHEVGWKYQAVTATLEEKRKEKAKIHYRKKKQLMRLRKQAEKNVEKKIDKYTEVLKTHGLLV

SEQ ID NO: 1033086 - protein, 227 aa, Homo sapiens
MAVAFPSGCRRWRRCRSWCLMVEAISWAAWRSALRLAKQVLLGRKVVVVRCEGINISGNFYRNKLKYLAFLRKRMNTNPSRGPYHFRAPSRIFWRTVRGMLPHKTKRGQAALDRLKVFDGIPPPYDKKKRMVVPAALKVVRLKPTRKFAYLGRLAHEVGWKYQAVTATLEEKRKEKAKIHYRKKKQLMRLRKQAEKNVEKNMEDNRGLRPRILVEPLRCSPQQKHDM

SEQ ID NO: 1033087 - protein, 75 aa, Homo sapiens
EIIIIKFPAASNWLNEGGWKYQAVTATLEEKRKEKAKIHYRKKKQLMRLRKQAEKNVEKKIDKYTEVLKTHGLLV

SEQ ID NO: 1033088 - protein, 214 aa, Homo sapiens
  misc_feature (1)..(1): Xaa can be any naturally occurring amino acid
XFGTSGCRRWRRCRSWCLMVEAISWAAWRSALRLAKQVLLGRKVVVVRCEGINISGNFYRNKLKYLAFLRKRMNTNPSRGPYHFRAPSRIFWRTVRGMLPHKTKRGQAALDRLKVFDGIPPPYDKKKRMVVPAALKVVRLKPTRKFAYLGRLAHEVGWKYQAVTATLEEKRKEKAKIHYRKKKQLMRLRKQAEKNVEKKIDKYTEVLKTHGLLV

SEQ ID NO: 1033089 - protein, 227 aa, Homo sapiens
  misc_feature (5)..(6): Xaa can be any naturally occurring amino acid
RTYKXXVKKNPPGGYLYTERHTISLVQLVDRQRDGVQSVLMSASLALGIVLTVLWRECVVRCEGINISGNFYRNKLKYLAFLRKRMNTNPSRGPYHFRAPSRIFWRTVRGMLPHKTKRGQAALDRLKVFDGIPPPYDKKKRMVVPAALKVVRLKPTRKFAYLGRLAHEVGWKYQAVTATLEEKRKEKAKIHYRKKKQLMRLRKQAEKNVEKKIDKYTEVLKTHGLLV

SEQ ID NO: 1033090 - protein, 150 aa, Homo sapiens
MVSISCPRDLPTSASQSAGIIGVSHHAWRTVRGMLPHKTKRGQAALDRLKVFDGIPPPYDKKKRMVVPAALKVVRLKPTRKFAYLGRLAHEVGWKYQAVTATLEEKRKEKAKIHYRKKKQLMRLRKQAEKNVEKKIDKYTEVLKTHGLLV

SEQ ID NO: 1033091 - protein, 214 aa, Homo sapiens; identical to SEQ ID NO: 1033088
  misc_feature (1)..(1): Xaa can be any naturally occurring amino acid

SEQ ID NO: 1033092 - protein, 225 aa, Homo sapiens
  misc_feature (1)..(1): Xaa can be any naturally occurring amino acid
XFGTSGCRRWRRCRSWCLMVEAISWAAWRSALRLAKQVLLGRKVVVVRCEGINISGNFYRNKLKYLAFLRKRMNTNPSRGPYHFRAPSRIFWRTVRGMLPHKTKRGQAALDRLKVFDGIPPPYDKKKRMVVPAALKVVRLKPTRKFAYLGRLAHEVGWKYQAVTATLEEKRKEKAKIHYRKKKQLMRLRKQAEKNVEKNMEDNRGLRPRILVEPLRCSPQQKHDM

SEQ ID NO: 1033093 - protein, 173 aa, Homo sapiens
  misc_feature (1)..(1): Xaa can be any naturally occurring amino acid
XFGTSGCRRWRRCRSWCLMVEAISWAAWRSALRLAKQVLLGRKVVVVRCEGINISGNFYRNKLKYLAFLRKRMNTNPSRGPYHFRAPSRIFWRTVRGMLPHKTKRGQAALDRLKVFDGIPPPYDKKKRMVVEVPGSDSHPGGEEERESQDPLPEEETAHEATETGREERGEEN

SEQ ID NO: 1033094 - protein, 101 aa, Homo sapiens
  misc_feature (1)..(1): Xaa can be any naturally occurring amino acid
  misc_feature (77)..(77): Xaa can be any naturally occurring amino acid
XFGTSGCRRWRRCRSWCLMVEAISWAAWRSALRLAKQVLLGRKVVVAPAVMGPRWRSVMSNIHHLSFESHGHEIQPXCTVLENLASNSFPRVGDSRASRSN

SEQ ID NO: 1033095 - protein, 189 aa, Homo sapiens
RWRPALKQMGPPGLQKFGTRFVRCEGINISGNFYRNKLKYLAFLRKRMNTNPSRGPYHFRAPSRIFWRTVRGMLPHKTKRGQAALDRLKVFDGIPPPYDKKKRMVVPAALKVVRLKPTRKFAYLGRLAHEVGWKYQAVTATLEEKRKEKAKIHYRKKKQLMRLRKQAEKNVEKKIDKYTEVLKTHGLLV

SEQ ID NO: 1033096 - protein, 214 aa, Homo sapiens; identical to SEQ ID NO: 1033088
  misc_feature (1)..(1): Xaa can be any naturally occurring amino acid

SEQ ID NO: 1033097 - protein, 144 aa, Homo sapiens
MAVAFPSGCRRWRRCRSWCLMVEAISWAAWRSALRLAKQVLLGRKVVVVRCEGINISGNFYRNKLKYLAFLRKRMNTNPSRGPYHFRAPSRIFWRTARGIRCHKTKRGQAALDRLKVFDGIPPPYDMKYAAGSSRCPKLCPPPS

SEQ ID NO: 1033098 - protein, 216 aa, Homo sapiens
MAVAFPSGCRRWRRCRSWCLMVEAISWAAWRSALRLAKQVLLGRKVVVVRCEGINISGNFYRNKLKYLAFLRKRMNTNPSRGPYHFRAPSRIFWRTVRGMLPHKTKRGQAALDRLKVFDGIPPPYDKKKRMVVPAALKVVRLKPTRKFAYLGRLAHEVGWKYQAVTATLEEKRKEKAKIHYRKKKQLMRLRKQAEKNVEKKIDKYTEVLKTHGLLV

SEQ ID NO: 1033099 - protein, 186 aa, Homo sapiens
GPEVVGASGRVVVHPLAVVRCEGINISGNFYRNKLKYLAFLRKRMNTNPSRGPYHFRAPSRIFWRTVRGMLPHKTKRGQAALDRLKVFDGIPPPYDKKKRMVVPAALKVVRLKPTRKFAYLGRLAHEVGWKYQAVTATLEEKRKEKAKIHYRKKKQLMRLRKQAEKNVEKKIDKYTEVLKTHGLLV

SEQ ID NO: 1033100 - protein, 214 aa, Homo sapiens; identical to SEQ ID NO: 1033088
  misc_feature (1)..(1): Xaa can be any naturally occurring amino acid

SEQ ID NO: 1033101 - protein, 214 aa, Homo sapiens
  misc_feature (1)..(1): Xaa can be any naturally occurring amino acid
XFGTSGCRRWRRCRSWCLMVEAISWAAWRSALRLAKQVLLGRKVVVVRCEGINISGNFYRNKLKYLAFLRKRMNTNPSRGPYHFRAPSRIFWRTVRGMLPHKTKRGQAALDRLKVFDGIPPPYDKKKRMVVPAALKVVRLKPTRKFAYLGRLAPDGGWKYQAVTATLEEKRKEKAKIHYRKKKQLMRLRKQAEKNVEKKIDKYTEVLKTHGLLV

SEQ ID NO: 1033102 - protein, 216 aa, Homo sapiens
  misc_feature (1)..(1): Xaa can be any naturally occurring amino acid
XFGTSGCRRWRRCRSWCLMVEAISWAAWRSALRLAKQVLLGRKVVVVRCEGINISGNFYRNKLKYLAFLRKRMNTNPSRGPYHFRAPSRIFWLDLCEVMLAHKTKRGQAALDRLKVFDGIPPPYDKKKRMVVPAALKVVRLKPTRKFAYLGRLGSRRSGWKYQAVTATLEEKRKEKAKIHYRKKKQLMRLRKQAEKNVEKKIDKYTEVLKTHGLLV

SEQ ID NO: 1033103 - protein, 508 aa, Homo sapiens [sequence omitted]

SEQ ID NO: 1033104 - protein, 78 aa, Homo sapiens
VYSRVIPKQSYRLKFFPASADRTVIDYNGERTLDGFKKFLESGGQDGAGDDDDLEDLEEAEEPDMEEDDDQKAVKDEL

SEQ ID NO: 1033105 - protein, 481 aa, Homo sapiens
GDPGFIRRGRDRARALVAPAVPAAPTEAPRLIRVRHAAPRSAVPGRGRPGAAADAPEEEDHVLVLRKSNFAEAAGGATSTCWWSSMPLGVATARALAPEYAKAAGKLKAEGSEIRLAKVDATEESDLGQQYGVARLSHHQVLQELETRLPPRNIQLAREADDIVNWLKKRTGPAATTLRDGAAAESLVESSEVAVIGFFKDVESDSAKQFLQAAEAIDDIPFGITSNSDVFSKYQLDKDGVVLFKKFDEGRNNFEGEVTKENLLDFIKHNQLPLVIEFTEQTAPKIFGGEIKTHILLFLPKSVSDYDGKLSNFKTAAESFKGKILFIFIDSDHTDNQRILEFFGLKKEECPAVRLITLEEEMTKYKPDSEELTAERITEFCHRFLEGKIKPHLMSQERAGDWDKQPVKVLVGKNFEDVAFDEKKNVFVESMPHGVVTANSWLPFGINWGETYKDDDLEDLEEAEEPDMEEDDDQKAVKDEL

SEQ ID NO: 1033106 - protein, 546 aa, Homo sapiens
GDPGFIRRGRDRARALVAPAVPAAPTEAPRLIRVRHAAPRSAVPGRGRPGAAADAPEEEDHVLVLRKSNFAEAAGGATSTCWWSSMPLGVATARALAPEYAKAAGKLKAEGSEIRLAKVDATEESDLGQQYGVARLSHHQVLQELETRLPPRNIQLAREADDIVNWLKKRTGPAATTLRDGAAAESLVESSEVAVIGFFKDVESDSAKQFLQAAEAIDDIPFGITSNSDVFSKYQLDKDGVVLFKKFDEGRNNFEGEVTKENLLDFIKHNQLPLVIEFTEQTAPKIFGGEIKTHILLFLPKSVSDYDGKLSNFKTAAESFKGKILFIFIDSDHTDNQRILEFFGLKKEECPAVRLITLEEEMTKYKPDSEELTAERITEFCHRFLEGKIKPHLMSQERAGDWDKQPVKVLVGKNFEDVAFDEKKNVFVESMPHGVVTANSWLPFGINWGETYKDHENIVIAKMDSTANEVEAVKVHSFPTLKFFPASADRTVIDYNGERTLDGFKKFLESGGQDGAGDDDDLEDLEEAEEPDMEEDDDQKAVKDEL

SEQ ID NO: 1033107 - protein, 546 aa, Homo sapiens; identical to SEQ ID NO: 1033106

SEQ ID NO: 1033108 - protein, 546 aa, Homo sapiens; identical to SEQ ID NO: 1033106

SEQ ID NO: 1033109 - protein, 180 aa, Homo sapiens
  misc_feature (21)..(21): Xaa can be any naturally occurring amino acid
  misc_feature (25)..(25): Xaa can be any naturally occurring amino acid
  misc_feature (28)..(28): Xaa can be any naturally occurring amino acid
  misc_feature (30)..(30): Xaa can be any naturally occurring amino acid
  misc_feature (35)..(35): Xaa can be any naturally occurring amino acid
  misc_feature (47)..(47): Xaa can be any naturally occurring amino acid
  misc_feature (53)..(53): Xaa can be any naturally occurring amino acid
  misc_feature (55)..(55): Xaa can be any naturally occurring amino acid
  misc_feature (57)..(57): Xaa can be any naturally occurring amino acid
  misc_feature (60)..(60): Xaa can be any naturally occurring amino acid
  misc_feature (66)..(67): Xaa can be any naturally occurring amino acid
VEGGPRVGKGRRGEGDIGGDXRGCXPLXLXPVGGXAVWLPGGVGTEXDGTGFXCXVXRVXEVGAGXXHFWVNGDFRILSGCPPCLEEELVAASPGARHRPGPSPSLKPGLLLLSWAHCDHWPLYSTACGLFKAEPRPLTPGWGGGPRMLELNQTLTVLQAFLFHNRIEPHWPNKVEILPP

SEQ ID NO: 1033110 - protein, 120 aa, Homo sapiens
  misc_feature (115)..(116): Xaa can be any naturally occurring amino acid
MGRGYENWQSLGAAGLKGFLTPALAMPSSLRKELSGEVVPPADQGRGHCAGSSLLGPQETTKCLGWWLPTALLLRPCPRPRCLGGWLPTAWVWLEWWQEWAPVRPRWPWGINQHXXAASC

SEQ ID NO: 1033111 - protein, 198 aa, Homo sapiens
NKLHSNYVGIRGNLGTKPLVRVPAQFLVAGAIAEYAPVIREPKFPRVAQFNIEDQQQFQGNLLENFPANLLTYIAFSLRIIHLCAPVQPPTTGTPKVAYTFDAGPQCRDLHPGRTLWLSLWLLCGTAFPQARNGDTFLKGLQVRPAPLSAELQAALAMEPTPGGVKYIIVTQVGPGPQILDDPCAHLLGPDGLPKPAA

SEQ ID NO: 1033112 - protein, 477 aa, Homo sapiens
MAHNPNMTHLKINLPVTALPPLWVRCDSSDPEGTCWLGAELITTNNSITGIVLYVVSCKADKNYSVNLENLKNLHKKRHHLSTVTSKGFAQYELFKSSALDDTITASQTAIALDISWSPVDEILQIPPLSSTATLNIKVESGEPRGPLNHLYRELKFLLVLADGLRTGVTEWLEPLEAKSAVELVQEFLNDLNKLDGFGDSTKKDTEVETLKHDTAAVDRSVKRLFKVRSDLDFAEQLWCKMSSSVISYQDLVKCFTLIIQSLQRGDIQPWLHSGSNSLLSKLIHQSYHGTMDTVSLSGTIPVQMLLEIGLDKLKKDYISFFIGQELASLNHLEYFIAPSVDIQEQVYRVQKLHHILEILVSCMPFIKSQHELLFSLTQICIKYYKQNPLDEQHIFQLPVRPTAVKNLYQSEKPQKWRVEIYSGQKKIKTVWQLSDSSPIDHLNFHKPDFSELTLNGSLEERIFFTNMVTCSQVHFK

SEQ ID NO: 1033113 - protein, 477 aa, Homo sapiens; identical to SEQ ID NO: 1033112

SEQ ID NO: 1033114 - protein, 591 aa, Homo sapiens
MWERLNCAAEDFYSRLLQKFNEEKKGIRKDPFLYEADVQVQLISKGQPNPLKNILNENDIVFIVEKVPLEKEETSHIEELQSEETAISDFSTGENVGPLALPVGKARQLIGLYTMAHNPNMTHLKINLPVTALPPLWVRCDSSDPEGTCWLGAELITTNNSITGIVLYVVSCKADKNYSVNLENLKNLHKKRHHLSTVTSKGFAQYELFKSSALDDTITASQTAIALDISWSPVDEILQIPPLSSTATLNIKVESGEPRGPLNHLYRELKFLLVLADGLRTGVTEWLEPLEAKSAVELVQEFLNDLNKLDGFGDSTKKDTEVETLKHDTAAVDRSVKRLFKVRSDLDFAEQLWCKMSSSVISYQDLVKCFTLIIQSLQRGDIQPWLHSGSNSLLSKLIHQSYHGTMDTVSLSGTIPVQMLLEIGLDKLKKDYISFFIGQELASLNHLEYFIAPSVDIQEQVYRVQKLHHILEILVSCMPFIKSQHELLFSLTQICIKYYKQNPLDEQHIFQLPVRPTAVKNLYQSEKPQKWRVEIYSGQKKIKTVWQLSDSSPIDHLNFHKPDFSELTLNGSLEERIFFTNMVTCSQVHFK

SEQ ID NO: 1033115 - protein, 477 aa, Homo sapiens; identical to SEQ ID NO: 1033112

SEQ ID NO: 1033116 - protein, 444 aa, Homo sapiens
CEGLQFCSSDNVILSCAFTFLSFISYADKNYSVNLENLKNLHKKRHHLSTVTSKGFAQYELFKSSALDDTITASQTAIALDISWSPVDEILQIPPLSSTATLNIKVESGEPRGPLNHLYRELKFLLVLADGLRTGVTEWLEPLEAKSAVELVQEFLNDLNKLDGFGDSTKKDTEVETLKHDTAAVDRSVKRLFKVRSDLDFAEQLWCKMSSSVISYQDLVKCFTLIIQSLQRGDIQPWLHSGSNSLLSKLIHQSYHGTMDTVSLSGTIPVQMLLEIGLDKLKKDYISFFIGQELASLNHLEYFIAPSVDIQEQVYRVQKLHHILEILVSCMPFIKSQHELLFSLTQICIKYYKQNPLDEQHIFQLPVRPTAVKNLYQSEKPQKWRVEIYSGQKKIKTVWQLSDSSPIDHLNFHKPDFSELTLNGSLEERIFFTNMVTCSQVHFK

SEQ ID NO: 1033117 - protein, 477 aa, Homo sapiens; identical to SEQ ID NO: 1033112

SEQ ID NO: 1033118 - protein, 331 aa, Homo sapiens
MWERLNCAAEDFYSRLLQKFNEEKKGIRKDPFLYEADVQVQLISKGQPNPLKNILNENDIVFIVEKVPLEKEETSHIEELQSEETAISDFSTGENVGPLALPVGKARQLIGLYTMAHNPNMTHLKINLPVTALPPLWVRCDSSDPEGTCWLGAELITTNNSITGIVLYVVSCKADKNYSVNLENLKNLHKKRHHLSTVTSKGFAQYELFKSSALDDTITASQTAIALDISWSPVDEILQIPPLSSNSDICEYLKVGIKGGAQRVLGTHLLNEETGHIFPGYGEQGFTHVGVPSECVRLRVMPTVACNSVRKRKGRKTGRMRGLQHNTVNIT

SEQ ID NO: 1033119 - protein, 554 aa, Homo sapiens
MWERLNCAAEDFYSRLLQKFNEEKKGIRKDPFLYEADVQVQLISKGQPNPLKNILNENDIVFIVEKVPLEKEETSHIEELQSEETAISDFSTGENVGPLALPVGKARQLIGLYTMAHNPNMTHLKINLPVTALPPLADKNYSVNLENLKNLHKKRHHLSTVTSKGFAQYELFKSSALDDTITASQTAIALDISWSPVDEILQIPPLSSTATLNIKVESGEPRGPLNHLYRELKFLLVLADGLRTGVTEWLEPLEAKSAVELVQEFLNDLNKLDGFGDSTKKDTEVETLKHDTAAVDRSVKRLFKVRSDLDFAEQLWCKMSSSVISYQDLVKCFTLIIQSLQRGDIQPWLHSGSNSLLSKLIHQSYHGTMDTVSLSGTIPVQMLLEIGLDKLKKDYISFFIGQELASLNHLEYFIAPSVDIQEQVYRVQKLHHILEILVSCMPFIKSQHELLFSLTQICIKYYKQNPLDEQHIFQLPVRPTAVKNLYQSEKPQKWRVEIYSGQKKIKTVWQLSDSSPIDHLNFHKPDFSELTLNGSLEERIFFTNMVTCSQVHFK

SEQ ID NO: 1033120 - protein, 217 aa, Homo sapiens
MAHNPNMTHLKINLPVTALPPLWVRCDSSDPEGTCWLGAELITTNNSITGIVLYVVSCKADKNYSVNLENLKNLHKKRHHLSTVTSKGFAQYELFKSSALDDTITASQTAIALDISWSPVDEILQIPPLSSNSDICEYLKVGIKGEAQRVLGTHLLNEETGHIFPGYGEQGFTHVGVPSECVRLRVMPTVACNSVRKRKGRKTGRMRGLQHNTVNIT

SEQ ID NO: 1033121 - protein, 375 aa, Homo sapiens
MFLRSRVGRPINNEKIDILMIDMDGTQSKSKVRCERHSVGVLPCRLHCWLPLTKGVPLYRQIADLAGYSEVILRDVPSGVQMSNNWRVLNVLANRDAVAIALSSMIRPKIWMHDNTFSGSQCSNKEQRFTTTLKNVIKEKYGKDATNVGDEGGFAPNILENKEGLELLKTAIGKAGYTDKVVIGMDVAAPSSSGLGSMTWTSSLPMTPAGTSRLTSWLTCTSPSSRTTQWCLSKIPLTRMTGELGRKFTASAGIQVVGDDLTVTNPKRIAKAVNEKSCNCLLLKVNQIGSVTESLQACKLAQANGWGVMVSHRSGETEDTFIADLVVGLCTGQIKTGAPCRSERLAKYNQLLRIEEELGSKAKFAGRNFRNPLAK

SEQ ID NO: 1033122 - protein, 461 aa, Homo sapiens
MFLRSRVGRPINNEKIDILMIDMDGTQSKSKVRCERHSVGVLPCRLHCWLPLTKGVPLYRQIADLAGYSEVILRDVPSGVQMSNNWRVLNVLANRDAVAIALSSMIRPKIWMHDNTFSGSQCSNKEQRFTTTLKNVIKEKYGKDATNVGDEGGFAPNILENKEGLELLKTAIGKAGYTDKVVIGMDVAAPSSSGLGSMTWTSSLPMTPAGTSRLTSWLTCTSPSSRTTQWCLSKIPLTRMTGELGRKFTASAGIQVVGDDLTVTNPKRIAKAVNEKSCNCLLLKVNQIGSVTESLQACKLAQANGWGVMVSHRSGETEDTFIADLVVGLCTGQIKTGAPCRSERLAKYNQLLRIEEELEHATGPKYCPSKDSLQEDPPLGQRYRMCGKANATFVYDLVGLSHDRSSLSVSVSVQADGPRTQQLCKGVPVVVERPQLRVWSSYRFLRNFYMKPSSLEPRWQL

SEQ ID NO: 1033123 - protein, 254 aa, Homo sapiens
MRIGAEVYRQLCKNVIKEKYGKDATNVGDEGGFAPNILENKEGLELLKTAIGKAGYTDKVVIGMDVAAPSSSGLGSMTWTSSLPMTPAGTSRLTSWLTCTSPSSRTTQWCLSKIPLTRMTGELGRKFTASAGIQVVGDDLTVTNPKRIAKAVNEKSCNCLLLKVNQIGSVTESLQACKLAQANGWGVMVSHRSGETEDTFIADLVVGLCTGQIKTGAPCRSERLAKYNQLLRIEEELGSKAKFAGRNFRNPLAK

SEQ ID NO: 1033124 - protein, 375 aa, Homo sapiens; identical to SEQ ID NO: 1033121

SEQ ID NO: 1033125 - protein, 397 aa, Homo sapiens
MFLRSRVGRPINNEKIDILMIDMDGTQSKSKVRCERHSVGVLPCRLHCWLPLTKGVPLYRQIADLAGYSEVILRDVPSGVQMSNNWRVLNVLANRDAVAIALSSMIRPKIWMHDNTFSGSQCSNKEQRFTTTLKNVIKEKYGKDATNVGDEGGFAPNILENKEGLELLKTAIGKAGYTDKVVIGMDVAAPSSSGLGSMTWTSSLPMTPAGTSRLTSWLTCTSPSSRTTQWCLSKIPLTRMTGELGRKFTASAGIQVVGDDLTVTNPKRIAKAVNEKSCNCLLLKVNQIGSVTESLQACKLAQANGWGVMVSHRSGETEDTFIADLVVGLCTGQIKTGAPCRSERLAKYNQLLRIEEELGYLEANAWPVRILQRLPSGSRYAVVQCPRPFGSPVGLLR

SEQ ID NO: 1033126 - protein, 385 aa, Homo sapiens
MFLRSRVGRPINNEKIDILMIDMDGTQSKSKVRCERHSVGVLPCRLHCWLPLTKGVPLYRQIADLAGYSEVILPVPAFICPQWLVLMLVNKLDHARQLHDSSQDRVQKYFTGKPMRHWETEGFSRTNLEECRLTEEIIWEEMHTQSVGDRNGGVGSPDIRWEEYSIGLSEWKSQWYVEKVGLICDYRVVASDIEDVTGSREFFRSGKYDLDFKSPDDPSRYISPDQLADLYKSFIKDYPVVSIEDPFDQDDWGAWQKFTASAGIQVVGDDLTVTNPKRIAKAVNEKSCNCLLLKVNQIGSVTESLQACKLAQANGWGVMVSHRSGETEDTFIADLVVGLCTGQIKTGAPCRSERLAKYNQLLRIEEELGSKAKFAGRNFRNPLAK

SEQ ID NO: 1033127 - protein, 493 aa, Homo sapiens [sequence omitted]

SEQ ID NO: 1033128 - protein, 539 aa, Homo sapiens
MSVDMNSQGSDSNEEDYDPNCEEEEEEEEDDPGDIEDYYVGVASDVEQQGADAFDPEEYQFTCLTYKESEGALNEHMTSLASVLKVSHSVAKLILVNFHWQVSEILDRYKSNSAQLLVEARVQPNPSKHVPTSHPPHHCAVCMQFVRKENLLSLACQHQFCRSCWEQHCSVLVKDGVGVGVSCMAQDCPLRTPEDFVFPLLPNEELREKYRRYLFRDYVESHYQLQLCPGADCPMVIRVQEPRARRVQCNRCNEVFWYRVSVSAEQPWAHAPSSKAPLLLLHVRAALEEAGSLSQQNSCAPSGFKCRQMYHAPTDCATIRKWLTKCADDSETANYISAHTKDCPKCNICIEKNGGCNHMQCSKCKHDFCWMCLGDWKTHGSEYYECSRYKENPDIVNQSQQAQAREALKKYLFYFERWENHNKSLQLEAQTYQRIHEKIQERVMNNLGTWIDWQYLQNAAKLLAKCRYTLQYTYPYAYYMESGPRKKLFEYQQAQLEAEIENLSWKVERADSYDRGDLENQMHIAEQRRRTLLKDFHDT

SEQ ID NO: 1033129 - protein, 421 aa, Homo sapiens
MLTAISCILPMALVSHSVAKLILVNFHWQVSEILDRYKSNSAQLLVEARVQPNPSKHVPTSHPPHHCAVCMQFVRKENLLSLACQHQFCRSCWEQHCSVLVKDGVGVGVSCMAQDCPLRTPEDFVFPLLPNEELREKYRRYLFRDYVESHYQLQLCPGADCPMVIRVQEPRARRVQCNRCNEVFCFKCRQMYHAPTDCATIRKWLTKCADDSETANYISAHTKDCPKCNICIEKNGGCNHMQCSKCKHDFCWMCLGDWKTHGSEYYECSRYKENPDIVNQSQQAQAREALKKYLFYFERWENHNKSLQLEAQTYQRIHEKIQERVMNNLGTWIDWQYLQNAAKLLAKCRYTLQYTYPYAYYMESGPRKKLFEYQQAQLEAEIENLSWKVERADSYDRGDLENQMHIAEQRRRTLLKDFHDT

SEQ ID NO: 1033130 - protein, 519 aa, Homo sapiens
MSVDMNSQGSDSNEEDYDPNCEEEEEEEEDDPGDIEDYYVGVASDVEQQGADAFDPEEYQFTCLTYKESEGALNEHMTSLASVLKVAVDAHCHQLHPPYGTGITRSGIAGSQSHSVAKLILVNFHWQVSEILDRYKSNSAQLLVEARVQPNPSKHVPTSHPPHHCAVCMQFVRKENLLSLACQHQFCRSCWEQHCSVLVKDGVGVGVSCMAQDCPLRTPEDFVFPLLPNEELREKYRRYLFRDYVESHYQLQLCPGADCPMVIRVQEPRARRVQCNRCNEVFCFKCRQMYHAPTDCATIRKWLTKCADDSETANYISAHTKDCPKCNICIEKNGGCNHMQCSKCKHDFCWMCLGDWKTHGSEYYECSRYKENPDIVNQSQQAQAREALKKYLFYFERWENHNKSLQLEAQTYQRIHEKIQERVMNNLGTWIDWQYLQNAAKLLAKCRYTLQYTYPYAYYMESGPRKKLFEYQQAQLEAEIENLSWKVERADSYDRGDLENQMHIAEQRRRTLLKDFHDT

SEQ ID NO: 1033131 - protein, 528 aa, Homo sapiens
NKARYEAWVVTQAEASGGSSAGLTGVGPPPPLPLRPNPVPLARPDPVWLVRAQRPRGRSSRWKSYYVEYLGDICLRDLQELQIESRSVAQAGVQWCNLCSLQPPSPEFKQFSCLSLLSSWESHSVAKLILVNFHWQVSEILDRYKSNSAQLLVEARVQPNPSKHVPTSHPPHHCAVCMQFVRKENLLSLACQHQFCRSCWEQHCSVLVKDGVGVGVSCMAQDCPLRTPEDFVFPLLPNEELREKYRRYLFRDYVESHYQLQLCPGADCPMVIRVQEPRARRVQCNRCNEVFCFKCRQMYHAPTDCATIRKWLTKCADDSETANYISAHTKDCPKCNICIEKNGGCNHMQCSKCKHDFCWMCLGDWKTHGSEYYECSRYKENPDIVNQSQQAQAREALKKYLFYFERWENHNKSLQLEAQTYQRIHEKIQERVMNNLGTWIDWQYLQNAAKLLAKCRYTLQYTYPYAYYMESGPRKKLFEYQQAQLEAEIENLSWKVERADSYDRGDLENQMHIAEQRRRTLLKDFHDT

SEQ ID NO: 1033132 - protein, 94 aa, Homo sapiens
QIRLGSEAWVVTQAEASGGSSAGLTGVGPPPPLPLRPNPVPLARPDPVWLVRAQRPRGRSSRWKSYYVEYLGDICLRDLQELQKTKILMHLRKR

SEQ ID NO: 1033133 - protein, 136 aa, Homo sapiens
NKARYEAWVVTQAEASGGSSAGLTGVGPPPPLPLRPNPVPLARPDPVWLVRAQRPRGRSSRWKSYYVEYLGDICLRDLQELQIESRSVAQAGVQWCNLCSLQPPSPEFKQFSCLSLLSSWDYRCMPSCLANFRIST

SEQ ID NO: 1033134 - protein, 125 aa, Homo sapiens
PWLAAGGASPRASLAGPGLRLRRRPGGPGAPRRRHVVRALPAVSGRAPSVCLPFFLPPPSQLSERSEATASDQPAPAHLGPLSLSGAAGKRAASGLTTRVIFGSSRSAARAVYTPACGGYPQLAG

SEQ ID NO: 1033135 - protein, 73 aa, Homo sapiens
  misc_feature (54)..(54): Xaa can be any naturally occurring amino acid
  misc_feature (69)..(69): Xaa can be any naturally occurring amino acid
MYHAPTDCATIRKWLTKCADDSETANYISAHTKDVKDRILPLMDLPSLVLPRAXPWRFAISEQNTQSPXTLPE

SEQ ID NO: 1033136 - protein, 589 aa, Homo sapiens
MSVDMNSQGSDSNEEDYDPNCEEEEEEEEDDPGDIEDYYVGVASDVEQQGADAFDPEEYQFTCLTYKESEGALNEHMTSLASVLKVSHSVAKLILVNFHWQVSEILDRYKSNSAQLLVEARVQPNPSKHVPTSHPPHHCAVCMQFVRKENLLSLACQHQFCRSCWEQHCSVLVKDGVGVGVSCMAQDCPLRTPEDFVFPLLPNEELREKYRRYLFRDYVESHYQLQLCPGADCPMVIRVQEPRARRVQCNRCNEVFWYRVSVSAEQPWAHAPSSKAPLLLLHVRAALEEAGSLSQQNSCAPSGFKCRQMYHAPTDCATIRKWLTKCADDSETANYISAHTKDPQRPATFKEVLLPRSAHTMSNWAQVPGALCNLFKTNLVVCEPNGTLLSPPCPKCNICIEKNGGCNHMQCSKCKHDFCWMCLGDWKTHGSEYYECSRYKENPDIVNQSQQAQAREALKKYLFYFERWENHNKSLQLEAQTYQRIHEKIQERVMNNLGTWIDWQYLQNAAKLLAKCRYTLQYTYPYAYYMESGPRKKLFEYQQAQLEAEIENLSWKVERADSYDRGDLENQMHIAEQRRRTLLKDFHDT

SEQ ID NO: 1033137 - protein, 493 aa, Homo sapiens
MSVDMNSQGSDSNEEDYDPNCEEEEEEEEDDPGDIEDYYVGVASDVEQQGADAFDPEEYQFTCLTYKESEGALNEHMTSLASVLKVSHSVAKLILVNFHWQVSEILDRYKSNSAQLLVEARVQPNPSKHVPTSHPPHHCAVCMQFVRKENLLSLACQHQFCRSCWEQHCSVLVKDGVGVGVSCMAQDCPLRTPEDFVFPLLPNEELREKYRRYLFRDYVESHYQLQLCPGADCPMVIRVQEPRARRVQCNRCNEVFCFKCRQMYHAPTDCATIRKWLTKCADDSETANYISAHTKDCPKCNICIEKNGGCNHMQCSKCKHDFCWMCLGDWKTHGSEYYECSRYKENPDIVNQSQQAQAREALKKYLFYFERWENHNKSLQLEAQTYQRIHEKIQERVMNNLGTWIDWQYLQNAAKLLAKCRYTLQYTYPYAYYMESGPRKKLFEYQQAQLEAEIENLSWKVERADSYDRGDLENQMHIAEQRRRTLLKDFHDT

SEQ ID NO: 1033138 - protein, 503 aa, Homo sapiens
MSVDMNSQGSDSNEEDYDPNCEEEEEEEEDDPGDIEDYYVGVASDVEQQGADAFDPEEYQFTCLTYKESEGALNEHMTSLASVLKVITRSGIAGSQSHSVAKLILVNFHWQVSEILDRYKSNSAQLLVEARVQPNPSKHVPTSHPPHHCAVCMQFVRKENLLSLACQHQFCRSCWEQHCSVLVKDGVGVGVSCMAQDCPLRTPEDFVFPLLPNEELREKYRRYLFRDYVESHYQLQLCPGADCPMVIRVQEPRARRVQCNRCNEVFCFKCRQMYHAPTDCATIRKWLTKCADDSETANYISAHTKDCPKCNICIEKNGGCNHMQCSKCKHDFCWMCLGDWKTHGSEYYECSRYKENPDIVNQSQQAQAREALKKYLFYFERWENHNKSLQLEAQTYQRIHEKIQERVMNNLGTWIDWQYLQNAAKLLAKCRYTLQYTYPYAYYMESGPRKKLFEYQQAQLEAEIENLSWKVERADSYDRGDLENQMHIAEQRRRTLLKDFHDT

SEQ ID NO: 1033139 - protein, 488 aa, Homo sapiens
MSVDMNSQGSDSNEEDYDPNCEEEEEEEEDDPGDIEDYYVGVASDVEQQGADAFDPEEYQFTCLTYKESEGALNEHMTSLASVLKVSHSVAKLILVNFHWQVSEILDRYKSNSAQLLVEARVQPNPSKHVPTSHPPHHCAVCMQFVRKENLLSLACQHQFCRSCWEQHCSVLVKDGVGVGVSCMAQDCPLRTPEDFVFPLLPNEELREKYRRYLFRDYVESHYQLQLCPGADCPMVIRVQEPRARRVQCNRCNEVFCFKCRQMYHAPTDCATIRKWLTKCADDSETANYISAHTKDCPKCNICIEKNGGCNHMQCSKCKHDFCWMCLGDWKTHGSEYYECSRYKENPDIVNQSQQAQAREALKKYLFYFERWENHNKSLQLEAQTYQRIHEKIQERVMNNLGTWIDWQYLQNAAKLLAKCRYTLQYTYPYAYYMESGPRKKLFEYQQAQLEAEIENLSWKVERADSYDRGVSAYCPLGFYIAGRGLAW

SEQ ID NO: 1033140 - protein, 351 aa, Homo sapiens
MQFVRKENLLSLACQHQFCRSCWEQHCSVLVKDGVGVGVSCMAQDCPLRTPEDFVFPLLPNEELREKYRRYLFRDYVESHYQLQLCPGADCPMVIRVQEPRARRVQCNRCNEVFCFKCRQMYHAPTDCATIRKWLTKCADDSETANYISAHTKDCPKCNICIEKNGGCNHMQCSKCKHDFCWMCLGDWKTHGSEYYECSRYKENPDIVNQSQQAQAREALKKYLFYFERWENHNKSLQLEAQTYQRIHEKIQERVMNNLGTWIDWQYLQNAAKLLAKCRYTLQYTYPYAYYMESGPRKKLFEYQQAQLEAEIENLSWKVERADSYDRGDLENQMHIAEQRRRTLLKDFHDT

SEQ ID NO: 1033141 - protein, 160 aa, Homo sapiens
MSVDMNSQGSDSNEEDYDPNCEEEEEEEEDDPGDIEDYYVGVASDVEQQGADAFDPEEYQFTCLTYKESEGALNEHMTSLASVLKVETDSRCVTQAGVQWHDLGSLQAPPTGFIPFSCLSLPSSWDYRCPPTLPAKFLLYLNVETGFHLVSQDGLDLLTS

SEQ ID NO: 1033142 - protein, 160 aa, Homo sapiens
MSVDMNSQGSDSNEEDYDPNCEEEEEEEEDDPGDIEDYYVGVASDVEQQGADAFDPEEYQFTCLTYKESEGALNEHMTSLASVLKVETDSRCVTQAGVQWHDLGSLQAPPTGFIPFSCLSLPSSWDYRCPPTLPAKFFLYLNVETGFHLVSQDGLDLLTS

SEQ ID NO: 1033143 - protein, 493 aa, Homo sapiens [sequence omitted]

SEQ ID NO: 1033144 - protein, 493 aa, Homo sapiens [sequence omitted]

SEQ ID NO: 1033145 - protein, 102 aa, Homo sapiens
MYHAPTDCATIRKWLTKCADDSETANYISAHTKDCPKCNICIEKNGGCNHMQCSKCKHGEFQAWCVRPSGTFLWLGLRYYLSEYFCHEMTKHEKNLSHLTVT

SEQ ID NO: 1033146 - protein, 493 aa, Homo sapiens [sequence omitted]

SEQ ID NO: 1033147 - protein, 493 aa, Homo sapiens; identical to SEQ ID NO: 1033137

SEQ ID NO: 1033148 - protein, 522 aa, Homo sapiens
MSVDMNSQGSDSNEEDYDPNCEEEEEEEEDDPGDIEDYYVGVASDVEQQGADAFDPEEYQFTCLTYKESEGALNEHMTSLASVLKVSHSVAKLILVNFHWQVSEILDRYKSNSAQLLVEARVQPNPSKHVPTSHPPHHCAVCMQFVRKENLLSLACQHQFCRSCWEQHCSVLVKDGVGVGVSCMAQDCPLRTPEDFVFPLLPNEELREKYRRYLFRDYVESHYQLQLCPGADCPMVIRVQEPRARRVQCNRCNEVFCFKCRQMYHAPTDCATIRKWLTKCADDSETANYISAHTKDPQRPATFKGGAPPQKCSHHEQLGTGARSFVYICLKTNLVVCEPNGTLLSPPCPKCNICIEKNGGCNHMQCSKCKHDFCWMCLGDWKTHGSEYYECSRYKENPDIVNQSQQAQAREALKKYLFYFERWERVMNNLGTWIDWQYLQNAAKLLAKCRYTLQYTYPYAYYMESGPRKKLFEYQQAQLEAEIENLSWKVERADSYDRGDLENQMHIAEQRRRTLLKDFHDT

SEQ ID NO: 1033149 - protein, 486 aa, Homo sapiens
MGSDSNEEDYDPNCEEEEEEEEDDPGDIEDYYVGVASDVEQQGADAFDPEEYQFTCLTYKESEGALNEHMTSLASVLKVSHSVAKLILVNFHWQVSEILDRYKSNSAQLLVEARVQPNPSKHVPTSHPPHHCAVCMQFVRKENLLSLACQHQFCRSCWEQHCSVLVKDGVGVGVSCMAQDCPLRTPEDFVFPLLPNEELREKYRRYLFRDYVESHYQLQLCPGADCPMVIRVQEPRARRVQCNRCNEVFCFKCRQMYHAPTDCATIRKWLTKCADDSETANYISAHTKDCPKCNICIEKNGGCNHMQCSKCKHDFCWMCLGDWKTHGSEYYECSRYKENPDIVNQSQQAQAREALKKYLFYFERWENHNKSLQLEAQTYQRIHEKIQERVMNNLGTWIDWQYLQNAAKLLAKCRYTLQYTYPYAYYMESGPRKKLFEYQQAQLEAEIENLSWKVERADSYDRGDLENQMHIAEQRRRTLLKDFHDT

SEQ ID NO: 1033150 - protein, 104 aa, Homo sapiens
MSVDMNSQGSDSNEEDYDPNCEEEEEEEEDDPGDIEDYYVGVASDVEQQGADAFDPEEYQFTCLTYKESEGALNEHMTSLASVLKVRRTPAWATQRDSVSKKKT

SEQ ID NO: 1033151 - protein, 119 aa, Homo sapiens
MMLISRLWVVVMTPIMCFLESMPLIYINIILAFTISLLGILVYRSHLISSLLCLEGIILSLFIIATLITLNTHSLLANIVPIAILVFAACEAAVGLALLVSISNTYGLDYVHNLNLLQC

SEQ ID NO: 1033152 - protein, 119 aa, Homo sapiens; identical to SEQ ID NO: 1033151

SEQ ID NO: 1033153 - protein, 119 aa, Homo sapiens; identical to SEQ ID NO: 1033151

SEQ ID NO: 1033154 - protein, 119 aa, Homo sapiens; identical to SEQ ID NO: 1033151

SEQ ID NO: 1033155 - protein, 119 aa, Homo sapiens; identical to SEQ ID NO: 1033151

SEQ ID NO: 1033156 - protein, 119 aa, Homo sapiens; identical to SEQ ID NO: 1033151

SEQ ID NO: 1033157 - protein, 119 aa, Homo sapiens; identical to SEQ ID NO: 1033151

SEQ ID NO: 1033158 - protein, 119 aa, Homo sapiens; identical to SEQ ID NO: 1033151

SEQ ID NO: 1033159 - protein, 119 aa, Homo sapiens; identical to SEQ ID NO: 1033151

SEQ ID NO: 1033160 - protein, 119 aa, Homo sapiens; identical to SEQ ID NO: 1033151

SEQ ID NO: 1033161 - protein, 119 aa, Homo sapiens; identical to SEQ ID NO: 1033151

SEQ ID NO: 1033162 - protein, 108 aa, Homo sapiens
MCLSGVENECEAYYNKLHLPTTNRPKIAHCILFNQPHSPRSNSHSHPNPLKLHRRSHSHNRPRTYILITILPSKLKLRTHSQSHHNPLSRTSNSTPTNSFLMTSSKPR

SEQ ID NO: 1033163 - protein, 119 aa, Homo sapiens; identical to SEQ ID NO: 1033151

SEQ ID NO: 1033164 - protein, 119 aa, Homo sapiens; identical to SEQ ID NO: 1033151

SEQ ID NO: 1033165 - protein, 119 aa, Homo sapiens; identical to SEQ ID NO: 1033151

SEQ ID NO: 1033166 - protein, 119 aa, Homo sapiens; identical to SEQ ID NO: 1033151

SEQ ID NO: 1033167 - protein, 335 aa, Homo sapiens
LRALSAKAACSVTAQPAAVSRITSWVVLHGHEPLIGLPVDWGTSCVLHGAGSFGRRRKMEPSTAARAWALFWLLLPLLGAVCASGPRTLVLLDNLNVRETHSLFFRSLKDRGFELTFKTADDPSLSLIKYGEFLYDNLIIFSPSVEDFGGNINVETISAFIDGGGSVLVAASSDIGDPLRELGSECGIEFDEEKTAVIDHHNYDISDLGQHTLIVADTENLLKAPTIVGKSSLNPILFRGVGMVADPDNPFGAGHPERALPPLTPFFPDKPITQYPHAAVEVTPLLIAGLRPWNQCPGHLQRAPSEYFQRTPSSTQQCRRRRRVQRYSRTGYYEL

SEQ ID NO: 1033168 - protein, 306 aa, Homo sapiens
LRALSAKAACSVTAQPAAVSRITSWVVLHGHEPLIGLPVDWGTSCVLHGAGSFGRRRKMEPSTAARAWALFWLLLPLLGAVCASGPRTLVLLDNLNVRETHSLFFRSLKDRGFELTFKTADDPSLSLIKYGEFLYDNLIIFSPSVEGDPLRELGSECGIEFDEEKTAVIDHHNYDISDLGQHTLIVADTENLLKAPTIVGKSSLNPILFRGVGMVADPDNPFGAGHPERALPPLTPFFPDKPITQYPHAAVEVTPLLIAGLRPWNQCPGHLQRAPSEYFQRTPSSTQQCRRRRRVQRYSRTGYYEL

SEQ ID NO: 1033169 - protein, 349 aa, Homo sapiens
MHTLFLELLEQYVVAKNPKLMLRRSETVVERMLSNWMSICLYQYLKDSAGEPLYKLFKAIKHQVEKGPVDAVQKKAKYTLNDTGLLGDDVEYAPLTVSVIVQDEGVDAIPVKVLNCDTISQVKEKIIDQVYRGQPCSCCPGQTAWSWSGVRAPQRRSVGPGPDVTAGGPVEARQHPYALQCPGWSHPHPVQGGGLPAAGGQPAGPALGSAMPPGGGEPGVAPGAADRRGGRGQVQERQREREGADEGHHRDLPDAAALSQGHTAAVCGQLLPERRGACDAVPPAVKYFFDFLDEQAEKHNIQDEDTIHIWKTNTLPLRFWVNILKNPHFIFDVHVTRWWTPRCQSSPGI

SEQ ID NO: 1033170 - protein, 358 aa, Homo sapiens
  misc_feature (259)..(259): Xaa can be any naturally occurring amino acid
  misc_feature (269)..(270): Xaa can be any naturally occurring amino acid
  misc_feature (273)..(274): Xaa can be any naturally occurring amino acid
  misc_feature (277)..(277): Xaa can be any naturally occurring amino acid
  misc_feature (305)..(305): Xaa can be any naturally occurring amino acid
  misc_feature (310)..(310): Xaa can be any naturally occurring amino acid
  misc_feature (315)..(315): Xaa can be any naturally occurring amino acid
WIWRTWSQNSNRSIATLASPPSRTRGLILSKVGVSQQPEDSQQDLPGERHALLEEENRVWHLVRPTDEVDEGKSKRGSVKEKERTKAITEIYLTRLLSVKGTLQQFVDNFFQSVLAPGHAVPPAVKYFFDFLDEQAEKHNIQDEDTIHIWKTNSLPLRFWVNILKNPHFIFDVHVHEVVDASLSVIAQTFMDACTRTEHKLSRDSPSNKLLYAKEISTYKKMVEDYYKGIRQMVQVSDRTCTHTWKISLGAPDSLNTLXALHHLYQYTXXFYXXIIXALEEDPAAQKMQLAFRLQQNAAALENKXTDLLXYNLQXCLGTEVPEVLRALRGGGRVAVAEAPPPWNAPKPEWVQRNPPSV

SEQ ID NO: 1033171 - protein, 349 aa, Homo sapiens; identical to SEQ ID NO: 1033169

SEQ ID NO: 1033172 - protein, 349 aa, Homo sapiens; identical to SEQ ID NO: 1033169

SEQ ID NO: 1033173 - protein, 975 aa, Homo sapiens
  misc_feature (939)..(939): Xaa can be any naturally occurring amino acid
  misc_feature (955)..(955): Xaa can be any naturally occurring amino acid
MIVRATVVAGGSTGPGGDRVLFVGKGNGPHDNGIIVSTRLLDRTDSREAFEAYTDHATYKAGYLSTNTQQFVAAFEDGPYVFFVFNQQDKHPARNRTLLARMCREDPNYYSYLEMDLQCRDPDIHAAAFGTCLAASVAAPGSGRVLYAVFSRDSRSSGGPGAGLCLFPLDEVHAKMEANRNACYTGTREARDIFYKPFHGDIQCGGHAPGSSKSFPCGSEHLPYPLGSRDGLRGTAVLQRGGLNLTAVTVAAENNHTVAFLGTSDGRILKVYLTPDGTSSEYDSILVEINKRVKRDLVLSGDLGSLYAMTQDKVFRLPVQECLSYPTCTQCRDSQDPYCGWCVVEGRCTRKAECPRAEEASHWLWSRSKSCVAVTSAQPQNMSRRAQGEVQLTVSPLPALSEEDELLCLFGESPPHPARVEGEAVICNSPSSIPVTPPGQDHVAVTIQLLLRRGNIFLTSYQYPFYDCRQAMSLEENLPCISCVSNRWTCQWDLRYHECREASPNPEDGIVRAHMEDSCPQFLGPSPLVIPMNHETDVNFQGKNLDTVKGSSLHVGSDLLKFMEPVTMQESGTFAFRTPKLSHDANETLPLHLYVKSYGKNIDSKLHVTLYNCSFGRSDCSLCRAANPDYRCAWCGGQSRCVYEALCNTTSECPPPVITRIQPETGPLGGGIRITILGSNLGVQAGDIQRISVAGRNCSFQPERYSVSTRIVCVIEAAETPFTGGVEVDVFGKLGRSPPNVQFTFQQPKPLSVEPQQGPQAGGTTLTIHGTHLDTGSQEDVRVTLNGVPCKVTKFGAQLQCVTGPQATRGQMLLEVSYGGSPVPNPGIFFTYRENPVLRAFEPLRSFASGGRSINVTGQGFSLIQRFAMVVIAEPLQSWQPPREAESLQPMTVVGTDYVWGIHYGPFFKRFDRSFLFHSRLLTITSFSVPRLPSFRCPXRFIIIHPRNLKGKNWXGAVAQACNPRTLGGRGGRIM

SEQ ID NO: 1033174 - protein, 203 aa, Homo sapiens
MSGQRVDVKVVMLGKEYVGKTSLVERYVHDRFLVGPYQNTIGAAFVAKVMSVGDRTVTLGIWDTAGSERYEAMSRIYYRGAKAAIVCYDLTDSSSFERAKFWVKELRSLEEGCQIYLCGTKSDLLEEDRRRRRVDFHDVQDYADNIKAQLFETSSKTGQSVDELFQKVAEDYVSVAAFQVMTEDKGVDLGQKPNPYFYSCCHH

SEQ ID NO: 1033175 - protein, 184 aa, Homo sapiens
MSGQRVDVKVVMLGKEYVGKTSLVERYVHDRFLVGPYQNTIGAAFVAKVMSVGDRTVTLGIWDTAGSERYEAMSRIYYRGAKAAIVCYDLTDSSSFERAKFWVKELRSLEEGCQIYLCGTKSDLLEEDRRRRRVDFHDVQDYADSSCSSALWGVGVCGCLGGSKKIGTALAARARCSRRSSWPP

SEQ ID NO: 1033176 - protein, 224 aa, Homo sapiens
MSGQRVDVKVVMLGKEYVGKTSLVERYVHDRFLVGPYQNTIGAAFVAKVMSVGDRTVTLGIWDTAGSERYEAMSRIYYRGAKAAIVCYDLTDSSSFERAKFWVKELRSLEEGCQIYLCGTKSDLLEEDRRRRRVDFHDVQDYADNIKAQLFETSSKTGQSVDELFQKVAEDYVSVAAFQVMTEDKGVDLGQKPRFTHRPRFTHRPRFTHQPRFTHQPEDSSLQQ

SEQ ID NO: 1033177 - protein, 133 aa, Homo sapiens
MQGHQRKLNRAQRAGSLGDPRATGIGPSLIIIFPARRALPESGRGLRQCGCLPGDDRGQGRGSGPEAKPLLLQLLSSLSQHSPGLGELKEFPVRAGPSSFLGLGSQMSELPQVLMSAEWRLPVLAHGTETALG

SEQ ID NO: 1033178 - protein, 203 aa, Homo sapiens; identical to SEQ ID NO: 1033174

SEQ ID NO: 1033179 - protein, 203 aa, Homo sapiens; identical to SEQ ID NO: 1033174

SEQ ID NO: 1033180 - protein, 184 aa, Homo sapiens; identical to SEQ ID NO: 1033175

SEQ ID NO: 1033181 - protein, 174 aa, Homo sapiens
MAPISSLSLQTIGAAFVAKVMSVGDRTVTLGIWDTAGSERYEAMSRIYYRGAKAAIVCYDLTDSSSFERAKFWVKELRSLEEGCQIYLCGTKSDLLEEDRRRRRVDFHDVQDYADNIKAQLFETSSKTGQSVDELFQKVAEDYVSVAAFQVMTEDKGVDLGQKPNPYFYSCCHH

SEQ ID NO: 1033182 - protein, 189 aa, Homo sapiens [sequence omitted]

SEQ ID NO: 1033183 - protein, 88 aa, Homo sapiens
MSGQRVDVKVVMLGKEYVGKTSLVERYVHDRFLVGPYQNTIGAAFVAKVMSVGDRTVTLGIWDTAGSERYEAMSRIYYRGRVAGTELD

SEQ ID NO: 1033184 - protein, 155 aa, Homo sapiens
MAPISSLSLQTIGAAFVAKVMSVGDRTVTLGIWDTAGSERYEAMSRIYYRGAKAAIVCYDLTDSSSFERAKFWVKELRSLEEGCQIYLCGTKSDLLEEDRRRRRVDFHDVQDYADSSCSSALWGVGVCGCLGGSKKIGTALAARARCSRRSSWPP

SEQ ID NO: 1033185 - protein, 172 aa, Homo sapiens
MSGQRVDVKVVMLGKEYVGKTSLVERYVHDRFLVGPYQNTIGAAFVAKVMSVGDRTVTLGIWDTAGSERYEAMSRIYYRGAKAAIVCYDLTDSSSFERAKFWVKELRSLEEGCQIYLCGTKSDLLEEDRRRRRVDFHDVQDYADSSCSSALWGVGVFSFLVFFSSLFAFYIW

SEQ ID NO: 1033186 - protein, 184 aa, Homo sapiens; identical to SEQ ID NO: 1033175

SEQ ID NO: 1033187 - protein, 174 aa, Homo sapiens; identical to SEQ ID NO: 1033181

SEQ ID NO: 1033188 - protein, 172 aa, Homo sapiens; identical to SEQ ID NO: 1033185

SEQ ID NO: 1033189 - protein, 131 aa, Homo sapiens
  misc_feature (15)..(15): Xaa can be any naturally occurring amino acid
  misc_feature (22)..(22): Xaa can be any naturally occurring amino acid
  misc_feature (27)..(27): Xaa can be any naturally occurring amino acid
  misc_feature (31)..(31): Xaa can be any naturally occurring amino acid
  misc_feature (42)..(42): Xaa can be any naturally occurring amino acid
  misc_feature (48)..(48): Xaa can be any naturally occurring amino acid
  misc_feature (52)..(52): Xaa can be any naturally occurring amino acid
  misc_feature (59)..(59): Xaa can be any naturally occurring amino acid
  misc_feature (61)..(61): Xaa can be any naturally occurring amino acid
  misc_feature (68)..(68): Xaa can be any naturally occurring amino acid
  misc_feature (71)..(71): Xaa can be any naturally occurring amino acid
  misc_feature (95)..(95): Xaa can be any naturally occurring amino acid
  misc_feature (97)..(98): Xaa can be any naturally occurring amino acid
  misc_feature (103)..(103): Xaa can be any naturally occurring amino acid
MRYPAGRWIPRPAAXRPPFPAXFALPXYAAXAPAGFSARGLXRTLLPXELGXPPLTAAXAXGAAARRXSAXGAPDAEAGLAPGELQQLAQGPEDXLXXLLLSXDELRQPIWGACRGCRAGGQCFHLPGSQA

SEQ ID NO: 1033190 - protein, 131 aa, Homo sapiens; identical to SEQ ID NO: 1033189
  misc_feature (15)..(15): Xaa can be any naturally occurring amino acid
  misc_feature (22)..(22): Xaa can be any naturally occurring amino acid
  misc_feature (27)..(27): Xaa can be any naturally occurring amino acid
  misc_feature (31)..(31): Xaa can be any naturally occurring amino acid
  misc_feature (42)..(42): Xaa can be any naturally occurring amino acid
  misc_feature (48)..(48): Xaa can be any naturally occurring amino acid
  misc_feature (52)..(52): Xaa can be any naturally occurring amino acid
  misc_feature (59)..(59): Xaa can be any naturally occurring amino acid
  misc_feature (61)..(61): Xaa can be any naturally occurring amino acid
  misc_feature (68)..(68): Xaa can be any naturally occurring amino acid
  misc_feature (71)..(71): Xaa can be any naturally occurring amino acid
  misc_feature (95)..(95): Xaa can be any naturally occurring amino acid
  misc_feature (97)..(98): Xaa can be any naturally occurring amino acid
  misc_feature (103)..(103): Xaa can be any naturally occurring amino acid

SEQ ID NO: 1033191 - protein, 97 aa, Homo sapiens
MCGPSSCFKPAAATGGATPVAVTIAGREAGSSLLLQVPGGRQGDCPLVCQPHRFTGEDIRQPGQSQIGGCTCRIPLDISVFRLFPSERRERPASPKR

SEQ ID NO: 1033192 - protein, 181 aa, Homo sapiens
YSLCHVGGRGEKCKNAGLAKSIGVSNFTRSQLEMILDNQVSSTSLSATRWNVILLQPEKLLDFCKSKDIVLVAYSALGSHREEPWVDPNSPVLLEDPVLCALAKKHKRTPALIALRYQLQRGVVVLAKSYNEQRIRQNVQVFEFQLTSEEMKAIDGLNRNVRYLTLDIFAGPPNYPFSDEY

SEQ ID NO: 1033193 - protein, 924 aa, Homo sapiens
ARVNKHKPWLEPTYHGIVTENDNTVLLDPPLIALDKDAPLRFAGEICGFKIHGQNVPFDAVVVDKSTGEGVIRSKEKLDCELQKDYSFTIQAYDCGKGPDGTNVKKSHKATVHIQVNDVNEYAPVFKEKSYKATVIEGKQYDSILRVEAVDADCSPQFSQICSYEIITPDVPFTVDKDGYIKNTEKLNYGKEHQYKLTVTAYDCGKKRATEDVLVKISIKPTCTPGWQGWNNRIEYEPGTGALAVFPNIHLETCDEPVASVQATVELETSHIGKGCDRDTYSEKSLHRLCGAAAGTAELLPSPSGSLNWTMGLPTDNGHDSDQVFEFNGTQAVRIPDGVVSVSPKEPFTISVWMRHGPFGRKKETILCSSDKTDMNRHHYSLYVHGCRLIFLFRQDPSEEKKYRPAEFHWKLNQVCDEEWHHYVLNVEFPSVTLYVDGTSHEPFSVTEDYPLHPSKIETQLVVGACWQGGDLHMTQFFRGNLAGLTLRSGKLADKKVIDCLYTCKEGLDLQVLEDSGRGVQIQAHPSQLVLTLEGEDLGELDKAMQHISYLNSRQFPTPGIRRLKITSTIKCFNEATCISVPPVDGYVMVLQPEEPKISLSGVHHFARAASEFESSEGVFLFPELRIISTITREVEPEGDGAEDPTVQESLVSEEIVHDLDTCEVTVEGEELNHEQESLEVDMARLQQKGIEVSSSELGMTFTGVDTMASYEEVLHLLRYRNWHARSLLDRKFKLICSELNGRYISNEFKVEVNVIHTANPMEHANHMAAQPQFVHPEHRSFVDLSGHNLANPHPFAVVPSTATVVIVVCVSFLVFMIILGVFRIRAAHRRTMRDQDTGKENEMDWDDSALTITVNPMETYEDQHSSEEEEEEEEEEESEDGEEEDDITSAESESSEEEEGEQGDPQNATRQQQLEWDDSTLSY

SEQ ID NO: 1033194 - protein, 943 aa, Homo sapiens
ARVNKHKPWLEPTYHGIVTENDNTVLLDPPLIALDKDAPLRFAGEICGFKIHGQNVPFDAVVVDKSTGEGVIRSKEKLDCELQKDYSFTIQAYDCGKGPDGTNVKKSHKATVHIQVNDVNEYAPVFKEKSYKATVIEGKQYDSILRVEAVDADCSPQFSQICSYEIITPDVPFTVDKDGYIKNTEKLNYGKEHQYKLTVTAYDCGKKRATEDVLVKISIKPTCTPGWQGWNNRIEYEPGTGALAVFPNIHLETCDEPVASVQATVELETSHIGKGCDRDTYSEKSLHRLCGAAAGTAELLPSPSGSLNWTMGLPTDNGHDSDQVFEFNGTQAVRIPDGVVSVSPKEPFTISVWMRHGPFGRKKETILCSSDKTDMNRHHYSLYVHGCRLIFLFRQDPSEEKKYRPAEFHWKLNQVCDEEWHHYVLNVEFPSVTLYVDGTSHEPFSVTEDYPLHPSKIETQLVVGACWQEFSGVENDNETEPVTVASAGGDLHMTQFFRGNLAGLTLRSGKLADKKVIDCLYTCKEGLDLQVLEDSGRGVQIQAHPSQLVLTLEGEDLGELDKAMQHISYLNSRQFPTPGIRRLKITSTIKCFNEATCISVPPVDGYVMVLQPEEPKISLSGVHHFARAASEFESSEGVFLFPELRIISTITREVEPEGDGAEDPTVQESLVSEEIVHDLDTCEVTVEGEELNHEQESLEVDMARLQQKGIEVSSSELGMTFTGVDTMASYEEVLHLLRYRNWHARSLLDRKFKLICSELNGRYISNEFKVEVNVIHTANPMEHANHMAAQPQFVHPEHRSFVDLSGHNLANPHPFAVVPSTATVVIVVCVSFLVFMIILGVFRIRAAHRRTMRDQDTGKENEMDWDDSALTITVNPMETYEDQHSSEEEEEEEEEEESEDGEEEDDITSAESESSEEEEGEQGDPQNATRQQQLEWDDSTLSY

SEQ ID NO: 1033195 - protein, 943 aa, Homo sapiens; identical to SEQ ID NO: 1033194

SEQ ID NO: 1033196 - protein, 943 aa, Homo sapiens; identical to SEQ ID NO: 1033194

SEQ ID NO: 1033197 - protein, 943 aa, Homo sapiens; identical to SEQ ID NO: 1033194

SEQ ID NO: 1033198 - protein, 171 aa, Homo sapiens
MGVLEILDVFGAAELRQACRPHQGKEVEEEKPVAPQDGVGPFTVAPEPFKFLTIISLPLLNHMDKVVGEDEWDTLAVDSKLGLEIPQKVAKINVEQLPTLSDHDVVAVPIANAQHICGHTIASTGEGELLNGSIQGLPRVLGLQPVEQGILVEGGCGCHVALVELDVGDGV

SEQ ID NO: 1033199 - protein, 908 aa, Homo sapiens
ARVNKHKPWLEPTYHGIVTENDNTVLLDPPLIALDKDAPLRFAGEICGFKIHGQNVPFDAVVVDKSTGEGVIRSKEKLDCELQKDYSFTIQAYDCGKGPDGTNVKKSHKATVHIQVNDVNEYAPVFKEKSYKATVIEGKQYDSILRVEAVDADCSPQFSQICSYEIITPDVPFTVDKDGYIKNTEKLNYGKEHQYKLTVTAYDCGKKRATEDVLVKISIKPTCTPGWQGWNNRIEYEPGTGALAVFPNIHLETCDEPVASVQATVELETSHIGKGCDRDTYSEKSLHRLCGAAAGTAELLPSPSGSLNWTMGLPTDNGHDSDQVFEFNGTQAVRIPDGVVSVSPKEPFTISVWMRHGPFGRKKETILCSSDKTDMNRHHYSLYVHGCRLIFLFRQDPSEEKKYRPAEFHWKLNQVCDEEWHHYVLNVEFPSVTLYVDGTSHEPFSVTEDYPLHPSKIETQLVVGACWQEFSGVENDNETEPVTVASAGGDLHMTQFFRGNLAGLTLRSGKLADKKVIDCLYTCKEGLDLQVLEDSGRGVQIQAHPSQLVLTLEGEDLGELDKAMQHISYLNSRQFPTPGIRRLKITSTIKCFNEATCISVPPVDGYVMVLQPEEPKISLSGVHHFARAASEFESSEGVFLFPELRIISTITREVEPEGDGAEDPTVQESLVSEEIVHDLDTCEVTVEGEELNHEQESLEVDMARLQQKGIEVSSSELGMTFTGVDTMASYEEVLHLLRYRNWHARSLLDRKFKLICSELNGRYISNEFKVEVNVIHTANPMEHANHMAAQPQFVHPEHRSFVDLSGHNLANPHPFAVVPSTATVVIVVCVSFLVFMIILGVFRIRAAHRRTMRDQDTGKENEMDWDDSALTITVNPMEVGVGGRPPGLRGSTGQGLREAGTARLLQTY

SEQ ID NO: 1033200 - protein, 656 aa, Homo sapiens
ARVNKHKPWLEPTYHGIVTENDNTVLLDPPLIALDKDAPLRFAGEICGFKIHGQNVPFDAVVVDKSTGEGVIRSKEKLDCELQKDYSFTIQAYDCGKGPDGTNVKKSHKATVHIQVNDVNEYAPVFKEKSYKATVIEGKQYDSILRVEAVDADCSPQFSQICSYEIITPDVPFTVDKDGYIKNTEKLNYGKEHQYKLTVTAYDCGKKRATEDVLVKISIKPTCTPGWQGWNNRIEYEPGTGALAVFPNIHLETCDEPVASVQATVELETSHIGKGCDRDTYSEKSLHRLCGAAAGTAELLPSPSGSLNWTMGLPTDNGHDSDQVFEFNGTQAVRIPDGVVSVSPKEPFTISVWMRHGPFGRKKETILCSSDKTDMNRHHYSLYVHGCRLIFLFRQDPSEEKKYRPAEFHWKLNQVCDEEWHHYVLNVEFPSVTLYVDGTSHEPFSVTEDYPLHPSKIETQLVVGACWQEFSGVENDNETEPVTVASAGGDLHMTQFFRGNLAGLTLRSGKLADKKVIDCLYTCKEGLDLQVLEDSGRGVQIQAHPSQLVLTLEGEDLGELDKAMQHISYLNSRQFPTPGIRRLKITSTIKCFNEATCISVPPVDGYVMVLQPEEPKISLSGVHHFARAASEFESSEGVFLFPELRIIWFSAYLVPS

SEQ ID NO: 1033201 - protein, 729 aa, Homo sapiens
ARVNKHKPWLEPTYHGIVTENDNTVLLDPPLIALDKDAPLRFAGEICGFKIHGQNVPFDAVVVDKSTGEGVIRSKEKLDCELQKDYSFTIQAYDCGKGPDGTNVKKSHKATVHIQVNDVNEYAPVFKEKSYKATVIEGKQYDSILRVEAVDADCSPQFSQICSYEIITPDVPFTVDKDGYIKNTEKLNYGKEHQYKLTVTAYDCGKKRATEDVLVKISIKPTCTPGWQGWNNRIEYEPGTGALAVFPNIHLETCDEPVASVQATVELETSHIGKGCDRDTYSEKSLHRLCGAAAGTAELLPSPSGSLNWTMGLPTDNGHDSDQVFEFNGTQAVRIPDGVVSVSPKEPFTISVWMRHGPFGRKKETILCSSDKTDMNRHHYSLYVHGCRLIFLFRQDPSEEKKYRPAEFHWKLNQVCDEEWHHYVLNVEFPSVTLYVDGTSHEPFSVTEDYPLHPSKIETQLVVGACWQEFSGVENDNETEPVTVASAGGDLHMTQFFRGNLAGLTLRSGKLADKKVIDCLYTCKEGLDLQVLEDSGRGVQIQAHPSQLVLTLEGEDLGELDKAMQHISYLNSRQFPTPGIRRLKITSTIKCFNEATCIKRTRDHKNAMIEAMPHPKRGEHKQNGTRRGPRITYPPQTRKTGRSEHTQTDTNKQGETRPITQHDHRRPLTPGNDNAGERKHLAGTKTRPTTDSKRHDPQGTPTYTRTINKKQTTTHHTRQQTDTHNSRPS

SEQ ID NO: 1033202 - protein, 525 aa, Homo sapiens
ARVNKHKPWLEPTYHGIVTENDNTVLLDPPLIALDKDAPLRFAGEICGFKIHGQNVPFDAVVVDKSTGEGVIRSKEKLDCELQKDYSFTIQAYDCGKGPDGTNVKKSHKATVHIQVNDVNEYAPVFKEKSYKATVIEGKQYDSILRVEAVDADCSPQFSQICSYEIITPDVPFTVDKDGYIKNTEKLNYGKEHQYKLTVTAYDCGKKRATEDVLVKISIKPTCTPGWQGWNNRIEYEPGTGALAVFPNIHLETCDEPVASVQATVELETSHIGKGCDRDTYSEKSLHRLCGAAAGTAELLPSPSGSLNWTMGLPTDNGHDSDQVFEFNGTQAVRIPDGVVSVSPKEPFTISVWMRHGPFGRKKETILCSSDKTDMNRHHYSLYVHGCRLIFLFRQDPSEEKKYRPAEFHWKLNQVCDEEWHHYVLNVEFPSVTLYVDGTSHEPFSVTEDYPLHPSKIETQLVVGACWQGTCHYPPPSTRELSCTSLLGWWQQAVIGILQPYPRVLDLFLPFPVYSLFGDTAVTPL

SEQ ID NO: 1033203 - protein, 825 aa, Homo sapiens
MDKVVGEDEWDTLAVDSKLGLEIPQKVAKINVEQLPTLSDHDVVAVPIANAQHICGHTIASTGEGELLNGSIQGLPRVLGLQPVEQGILVEGGCGCHVALVELDVGDGVCTEYHLNEACAVPGGEAAIGGHPQVQPLLLPQDVHELDHLQGQHVLPEVIPVLKDDAHAAAAACLLVAVHDPQGLHLGVHEGALLHADFSQQGAGVEWGLQVGEGLKVGLLPHAQVHQLLGLGLGGLLRAQLDEVIQGLQFAQCFPLLHQHLHVVGAAPAVGLQDEAEAQGHRRHVHLGAEVPEKEVADLAVGQGPVQQEFGQLAVQVGLVLEHLHQLQQVLEQLIVRQFPQRLDGEGAYVAIGEAEVKQLQGAQDGQLRPGAQQVEHLGHILMLVPLGDQQQPGYRLREVLLDFMPQLPHQVLLVLIQLPRPPPLQDFPQLQLLLLGDMHTLAVSPQLQDLLQGGVVHGVRGHLGQADEQGSGAIRVGVTAHSARGVQQLALLIWDGGPHVEAAFPGLKLVLVVKQHEVGPGNGAVRLLGLLLGGASLLGFLDHGVQRKAETGHAGQVADVDVELQPLLPHGLRAHAHLRAGHRLAQHLVAVEKPGLHHQLHPLVGVHFAALDELDAERLLQGPQGHRGRLLRRNGRWFGTRFLDLGGRVALLIPHGEDGGGMDHGQVRGQPTVQAAADVLELAERVAAIQVLMPAVHLQRVVFRLLHQRLPEHCGLLPQGTGHQRQRHVLGGHLEGEALLAALKLNVDQKGPVREPQGTRPPGLSRGLQLQGETVLQPGLPAQLLPAGGRLLAELAHLGAKVVHFWVAQGVKLVEAFADEEADL

SEQ ID NO: 1033204 - protein, 213 aa, Homo sapiens
ARVNKHKPWLEPTYHGIVTENDNTVLLDPPLIALDKDAPLRFAGEICGFKIHGQNVPFDAVVVDKSTGEGVIRSKEKLDCELQKDYSFTIQAYDCGKGPDGTNVKKSHKATVHIQVNDVNEYAPVFKEKSYKATVIEGKQYDSILRVEAVDADCSPQFSQICSYEIITPDVQVFEFQLTSEEMKAIDGLNRNVRYLTLDIFAGPPNYPFSDEY

SEQ ID NO: 1033205 - protein, 120 aa, Homo sapiens
MPLGEGGLRMTEEFHRGSAPHGQSSLDAAGHAWAHLAALKLNVDQKGPVREPQGTRPPGLSRGLQLQGETVLQPGLPAQLLPAGGRLLAELAHLGAKVVHFWVAQGVKLVEAFADEEADL

SEQ ID NO: 1033206 - protein, 181 aa, Homo sapiens; identical to SEQ ID NO: 1033192

SEQ ID NO: 1033207 - protein, 181 aa, Homo sapiens
YSLCHVGGRGEKCKNAGLAKSIGVSNFTRSQLEMILDNQVSSTSLSATRWNVILLQPEKLLDFCKSKDIVLVAYSALGSHREEPWVDPNSPVLLEDPVLCALAKKHKRTPALIALRYQLQRGVVVLAKSYNEQRIRQNVQVFEFQLTSEEMKAIDGLNRNVRSFTVECFRPPSKYGVLTEY

SEQ ID NO: 1033208 - protein, 943 aa, Homo sapiens; identical to SEQ ID NO: 1033194

SEQ ID NO: 1033209 - protein, 943 aa, Homo sapiens; identical to SEQ ID NO: 1033194

SEQ ID NO: 1033210 - protein, 1206 aa, Homo sapiens
MHHCTPAWATEEDPISKKKKKIFEIMAEYVASDLLLPSCVTGVSYMEAQISLTRPEDQRRFSFMGLGLISPAVEVWWVIYYFLTCKQNHFTVEKDEGILVPKTHLKKWRASIPESRGYPGCLGELPELSLGRYTGGSHEDRGILSDSRHQVTARRQDPGSLAGGLGRRFPREENSLCWAQIHQLEDLEVTILSREPGAASGGPAPPLHEGGVFRLWLFSSLNYFKSSNKYTSVNKRQPCRFFPVRCSSGSSAPLGPMCLVPTTRSRLLLGPGLGGATTACCLWTRCGPPVHFGFPALTEGFVKLHSEVLQCLLLCFPQCQGVLEILDVFGAAELRQACRPHQGKEVEEEKPVAPQDGVGPFTVAPEPFKFLTIISLPLLNHMDKVVGEDEWDTLAVDSKLGLEIPQKVAKINVEQLPTLSDHDVVAVPIANAQHICGHTIASTGEGELLNGSIQGLPRVLGLQPVEQGILVEGGCGCHVALVELDVGDGVCTEYHLNEACAVPGGEAAIGGHPQVQPLLLPQDVHELDHLQGQHVLPEVIPVLKDDAHAAAAACLLVAVHDPQGLHLGVHEGALLHADFSQQGAGVEWGLQVGEGLYVGLLPHAQVHQLLGLGLGGLLRAQLDEVIQGLQFAQCFPLLHQHLHVVGAAPAVGLQDEAEAQGHRRHVHLGAEVPEKEVADLAVGQGPVQQEFGQLAVQVGLVLEHLHQLQQVLEQLIVRQFPQRLDGEGAYVAIGEAEVKQLQGAQDGQLRPGAQQVEHLGHILMLVPLGDQQQPGERLREVLLDFMPQLPHQVLLVLIQLPRPPPLQDFPQLQLLLLGDMHTLAVSPQLQDLLQGGVVHGVRGHLGQADEQGSGAIRVGVTAHSARGVQQLALLIWDGGPHVEAAFPGLKLVLVVKQHEVGPGNGAVRLLGLLLGGASLLGFLDHGVQRKAETGHAGQVADVDVELQPLLPHGLRAHAHLRAGHRLAQHLVAVEKPGLHHQLHPLVGVHFAALDELDAERLLQGPQGHRGRLLRRNGRWFGTRFLDLGGRVALLIPHGEDGGGMDHGQVRGQPTVQAAADVLELAERVAAIQVLMPAVHLQRVVFRLLHQRLPEHCGLLPQGTGHQRQRHVLGGHLEGEALLAALKLNVDQKGPVREPQGTRPPGLSRGLQLQGETVLQPGLPAQLLPAGGRLLAELAHLGAKVVHFWVAQGVKLVEAFADEEADL

SEQ ID NO: 1033211 - protein, 1100 aa, Homo sapiens
MWRASIPESRGYPGCLGELPELSLGRYTGGSHEDRGILSDSRHQVTARRQDPGSLAGGLGRRFPREENSLCWAQIHQLEDLEVTILSREPGAASGGPAPPLHEGGVFRLWLFSSLNYFKVINKYTSVNKRQPCRFFPVRCSSGSSAPLGPMCLVPTTRSRLLLAQGWEEPLLPVVFGHVVGQPVHFGFPALTEGFVKLHSEVLQCLLLCFPQCQGVLEILDVFGAAELRQACRPHQGKEVEEEKPVAPQDGVGPFTVAPEPFKFLTIISLPLLNHMDKVVGEDEWDTLAVDSKLGLEIPQKVAKINVEQLPTLSDHDVVAVPIANAQHICGHTIASTGEGELLNGSIQGLPRVLGLQPVEQGILVEGGCGCHVALVELDVGDGVCTEYHLNEACAVPGGEAAIGGHPQVQPLLLPQDVHELDHLQGQHVLPEVIPVLKDDAHAAAAACLLVAVHDPQGLHLGVHEGALLHADFSQQGAGVEWGLQVGEGLKVGLLPHAQVHQLLGLGLGGLLRAQLDEVIQGLQFAQCFPLLHQHLHVVGAAPAVGLQDEAEAQGHRRHVHLGAEVPEKEVADLAVGQGPVQQEFGQLAVQVGLVLEHLHQLQQVLEQLIVRQFPQRLDGEGAYVAIGEAEVKQLQGAQDGQLRPGAQQVEHLGHILMLVPLGDQQQPGERLREVLLDFMPQLPHQVLLVLIQLPRPPPLQDFPQLQLLLLGDMHTLAVSPQLQDLLQGGVVHGVRGHLGQADEQGSGAIRVGVTAHSARGVQQLALLIWDGGPHVEAAFPGLKLVLVVKQHEVGPGNGAVRLLGLLLGGASLLGFLDHGVQRKAETGHAGQVADVDVELQPLLPHGLRAHAHLRAGHRLAQHLVAVEKPGLHHQLHPLVGVHFAALDELDAERLLQGPQGHRGRLLRRNGRWFGTRFLDLGGRVALLIPHGEDGGGMDHGQVRGQPTVQAAADVLELAERVAAIQVLMPAVHLQRVVFRLLHQRLPEHCGLLPQGTGHQRQRHVLGGHLEGEALLAALKLNVDQKGPVREPQGTRPPGLSRGLQLQGETVLQPGLPAQLLPAGGRLLAELAHLGAKVVHFWVAQGVKLVEAFADEEADL

SEQ ID NO: 1033212 - protein, 711 aa, Homo sapiens
ARVNKHKPWLEPTYHGIVTENDNTVLLDPPLIALDKDAPLRFAGEICGFKIHGQNVPFDAVVVDKSTGEGVIRSKEKLDCELQKDYSFTIQAYDCGKGPDGTNVKKSHKATVHIQVNDVNEYAPVFKEKSYKATVIEGKQYDSILRVEAVDADCSPQFSQICSYEIITPDVPFTVDKDGYIKNTEKLNYGKEHQYKLTVTAYDCGKKRATEDVLVKISIKPTCTPGWQGWNNRIEYEPGTGALAVFPNIHLETCDEPVASVQATVELETSHIGKGCDRDTYSEKSLHRLCGAAAGTAELLPSPSGSLNWTMGLPTDNGHDSDQVFEFNGTQAVRIPDGVVSVSPKEPFTISVWMRHGPFGRKKETILCSSDKTDMNRHHYSLYVHGCRLIFLFRQDPSEEKKYRPAEFHWKLNQVCDEEWHHYVLNVEFPSVTLYVDGTSHEPFSVTEDYPLHPSKIETQLVVGACWQEFSGVENDNETEPVTVASAGGDLHMTQFFRGNLAGLTLRSGKLADKKVIDCLYTCKEGLDLQVLEDSGRGVQIQAHPSQLVLTLEGEDLGELDKAMQHISYLNSRQFPTPGIRRLKITSTIKCFNEATCISVPPVDGYVMVLQPEEPKISLSGVHHFARAASEFESSEGVFLFPELRIISTITREVEPEGDGAEDPTVQESLVSEEIVHDLDTCEVTVEGEELNHEQESLEVDMARLQQKGSV

SEQ ID NO: 1033213 - protein, 637 aa, Homo sapiens
ARVNKHKPWLEPTYHGIVTENDNTVLLDPPLIALDKDAPLRFAGEICGFKIHGQNVPFDAVVVDKSTGEGVIRSKEKLDCELQKDYSFTIQAYDCGKGPDGTNVKKSHKATVHIQVNDVNEYAPVFKEKSYKATVIEGKQYDSILRVEAVDADCSPQFSQICSYEIITPDVPFTVDKDGYIKNTEKLNYGKEHQYKLTVTAYDCGKKRATEDVLVKISIKPTCTPGWQGWNNRIEYEPGTGALAVFPNIHLETCDEPVASVQATVELETSHIGKGCDRDTYSEKSLHRLCGAAAGTAELLPSPSGSLNWTMGLPTDNGHDSDQVFEFNGTQAVRIPDGVVSVSPKEPFTISVWMRHGPFGRKKETILCSSDKTDMNRHHYSLYVHGCRLIFLFRQDPSEEKKYRPAEFHWKLNQVCDEEWHHYVLNVEFPSVTLYVDGTSHEPFSVTEDYPLHPSKIETQLVVGACWQGGDLHMTQFFRGNLAGLTLRSGKLADKKVIDCLYTCKEGLDLQVLEDSGRGVQIQAHPSQLVLTLEGEDLGELDKAMQHISYLNSRQFPTPGIRRLKITSTIKCFNEATCISVPPVDGYVMVLQPEEPKISLSGVHHFARAASEFESSEGVFLFPELRIIWFSAYLVPS

SEQ ID NO: 1033214 - protein, 586 aa, Homo sapiens
ARVNKHKPWLEPTYHGIVTENDNTVLLDPPLIALDKDAPLRFAGEICGFKIHGQNVPFDAVVVDKSTGEGVIRSKEKLDCELQKDYSFTIQAYDCGKGPDGTNVKKSHKATVHIQVNDVNEYAPVFKEKSYKATVIEGKQYDSILRVEAVDADCSPQFSQICSYEIITPDVPFTVDKDGYIKNTEKLNYGKEHQYKLTVTAYDCGKKRATEDVLVKISIKPTCTPGWQGWNNRIEYEPGTGALAVFPNIHLETCDEPVASVQATVELETSHIGKGCDRDTYSEKSLHRLCGAAAGTAELLPSPSGSLNWTMGLPTDNGHDSDQVFEFNGTQAVRIPDGVVSVSPKEPFTISVWMRHGPFGRKKETILCSSDKTDMNRHHYSLYVHGCRLIFLFRQDPSEEKKYRPAEFHWKLNQVCDEEWHHYVLNVEFPSVTLYVDGTSHEPFSVTEDYPLHPSKIETQLVVGACWQEFSGVENDNETEPVTVASAGGDLHMTQFFRGNLAGLTLRSGKLADKKVIDCLYTCKEGLDLQVLEDSGRGVQIQAHPSQLVLTLEGEDLGELDKAMQHISYLNSRQFPTPGIRRCVYS

SEQ ID NO: 1033215 - protein, 325 aa, Homo sapiens
ARVNKHKPWLEPTYHGIVTENDNTVLLDPPLIALDKDAPLRFAGEICGFKIHGQNVPFDAVVVDKSTGEGVIRSKEKLDCELQKDYSFTIQAYDCGKGPDGTNVKKSHKATVHIQVNDVNEYAPVFKEKSYKATVIEGKQYDSILRVEAVDADCSPQFSQICSYEIITPDVPFTVDKDGYIKNTEKLNYGKEHQYKLTVTAYDCGKKRATEDVLVKISIKPTCTPGWQGWNNRIEYEPGTGALAVFPNIHLETCDEPVASVQATVELETSHIGKGCDRDTYSEKSLHRLCGKETRRSCIRLALVKVGGTFTTGNTCVCCVHNYKL

SEQ ID NO: 1033216 - protein, 241 aa, Homo sapiens
ARVNKHKPWLEPTYHGIVTENDNTVLLDPPLIALDKDAPLRFAGEICGFKIHGQNVPFDAVVVDKSTGEGVIRSKEKLDCELQKDYSFTIQAYDCGKGPDGTNVKKSHKATVHIQVNDVNEYAPVFKEKSYKATVIEGKQYDSILRVEAVDADCSPQFSQICSYEIITPDVPFTVDKDGYIKNTEKLNYGKEHQYKLTVTAYDCGKKRATEDVLVKISIKPTCTPGWQGELHSLPCAHICS

SEQ ID NO: 1033217 - protein, 213 aa, Homo sapiens; identical to SEQ ID NO: 1033204

SEQ ID NO: 1033218 - protein, 206 aa, Homo sapiens
MATFISVQLKKTSEVDLAKPLVKFIQQTYPSGGEEQAQYCRAAEELSKLRRAAVGRPLDKHEGALETLLRYYDQICSIEPKFPFSENQICLTFTWKDAFDKGSLFGGSVKLALASLGYEKSCVLFNCAALASQIAAEQNLDNDEGLKIAAKHYQFASGAFLHIKETVLSALSREPTVDHISRYCWDPQSYYAGTGSRSIFFKSHKR

SEQ ID NO: 1033219 - protein, 206 aa, Homo sapiens; identical to SEQ ID NO: 1033218

SEQ ID NO: 1033220 - protein, 206 aa, Homo sapiens; identical to SEQ ID NO: 1033218

SEQ ID NO: 1033221 - protein, 206 aa, Homo sapiens; identical to SEQ ID NO: 1033218

SEQ ID NO: 1033222 - protein, 229 aa, Homo sapiens
MLAQAQEVFFLKATRDKMKDAIIAKLANQAADYFGDAFKQCQYKDTLPKEVFPVLAAKHCIMQANAEYHQSILAKQQKKFGEEIARLQHAAELIKTVASRYDEYVNVKDFSDKINRALAAAKKDNDFIYHDRVPDLKDLDPIGKATLVKSTPVNVPISQKFTDLFEKMVPVSVQQSLAAYNQRKADLINRSIAQMREATTWANGVLASLNLPAAIEDVSGDTVPQVYID

SEQ ID NO: 1033223 - protein, 489 aa, Homo sapiens
GQRLLRRGTGGWRWWLLVCWGSVVAAAERAWGWWRGHWTGCAWLLPDRREAAEAEAEVPVVQYVWRARCPADRVFVWGFIFSRWLLGSAFLCGAQLSRTPGCPVAGSSRRRPVSDPDPCLYRLELDQKISSAVLQCMDSHLLSSKTADVKKVLGVMGLNKDSQLVIYTGAVKDNTRGSEYVLEPVQPSLLPLDMTWGDPRVLQVSCGRAHSLVLTDREGVFSMGNNSYGQCGRKVVENEIYSESHRVHRMQDFDGQVVQVACGQDHSLFLTDKGEVYSCGWGADGQTGLGHYNITSSPTKLGGDLAGVNVIQVATYGDCCLAVSADGGLFGWGNSEYLQLASVTDSTQVNVPRCLHFSGVGKVRQAACGGTGCAVLNGEGHVFVWGYGILGKGPNLVESAVPEMIPPTLFGLTEFNPEIQVSRIRCGLSHFAALTNKGELFVWGKNIRGCLGIGRLEDQYFPWRVTMPGEPVDVACGVDHMVTLAKSFI

SEQ ID NO: 1033224 - protein, 431 aa, Homo sapiens
GQRLLRRGTGGWRWWLLVCWGSVVAAAERAWGWWRGHWTGCAWLLPDRREAAEAEAEVPVVQYVWRARCPADRVFVWGFIFSRWLLGSAFLCGAQLSRTPGCPVAGSSRRRPVSDPDPCLYRLELDQKISSAVLQCMDSHLLSSKTADVKKVLGVMGLNKDSQLVIYTGAVKDNTRGSEYVLEPVQPSLLPLDMTWGDPRVLQVSCGRAHSLVLTDREGVFSMGNNSYGQCGRKVVENEIYSESHRVHRMQDFDGQVVQVACGQDHSLFLTDKGEVYSCGWGADGQTGLGHYNITSSPTKLGGDLAGVNVIQVATYGDCCLAVSADGGLFGWGNSEYLQLASVTDSTQVNVPRCLHFSGVGKVRQAACGGTGCAVLNDKGELFVWGKNIRGCLGIGRLEDQYFPWRVTMPGEPVDVACGVDHMVTLAKSFI

SEQ ID NO: 1033225 - protein, 222 aa, Homo sapiens
MQSAPFLDAGLAMALGTPGVVEDVRFHGEAIEQWAPFQQAEPPCLSEGHLLAPLKLGLSSDAMLSAQTGSVIRAPGRGSFETQPLPLLGGRDLGRRLPVTGAGGEGDDAWGACGRGMWRGPHGDPGQVIHLNLPHLLGRPRPGNHWHSLAEASAWPAPRGSWMVVAEDPACSVTLCPESLSGYLPGGSGQGPSPAAGEACGTQLGWQPLVGRCGPHVSVLSK

SEQ ID NO: 1033226 - protein, 144 aa, Homo sapiens
SYVAQAGLELLPQVVFPPWPHKMLELLGDDAWGACGRGMWRGPHGDPGQVIHLNLPHLLGRPRPGNHWHSLAEASAWPAPRGSWMVVAEDPACSVTLCPESLSGYLPGGSGQGPSPAAGEACGTQLGWQPLVGRCGPHVSVLSK

SEQ ID NO: 1033227 - protein, 489 aa, Homo sapiens; identical to SEQ ID NO: 1033223

SEQ ID NO: 1033228 - protein, 489 aa, Homo sapiens; identical to SEQ ID NO: 1033223

SEQ ID NO: 1033229 - protein, 489 aa, Homo sapiens; identical to SEQ ID NO: 1033223

SEQ ID NO: 1033230 - protein, 489 aa, Homo sapiens; identical to SEQ ID NO: 1033223

SEQ ID NO: 1033231 - protein, 481 aa, Homo sapiens
GQRLLRRGTGGWRWWLLVCWGSVVAAAERAWGWWRGHWTGCAWLLPDRREAAEAEAEVPVVQYVWRARCPADRVFVWGFIFSRWLLGSAFLCGAQLSRTPGCPVAGSSRRRPVSDPDPCLYRLELDQKISSAVLQCMDSHLLSSKTADVKKVLGVMGLNKDSQLVIYTGAVKDNTRGSEYVLEPVQPSLLPLDMTWGDPRVLQVSCGRAHSLVLTDREGVFSMGNNSYGQCGRKVVENEIYSESHRVHRMQDFDGQVVQVACGQDHSLFLTDKGEVYSCGWGADGQTGLGHYNITSSPTKLGGDLAGVNVIQVATYGDCCLAVSADGGLFGWGNSEYLQLASVTDSTQVNVPRCLHFSGVGKVRQAACGGTGCAVLNGEGHVFVWGYGILGKGPNLVESAVPEMIPPTLFGLTEFNPEIQVSRIRCGLSHFAALTNKGELFVWGKNIRGCLGIGRLEDQYFPWRVRLAGEVMRLDAKSRVT

SEQ ID NO: 1033232 - protein, 192 aa, Homo sapiens
NSLRCFSVGRALARFIQLAELFGCLIQPRNPGFPHPMWTQPLCCTDQQRRAVCMGQEHPRVPGNRSPGGPVFPMEGDDAWGACGRGMWRGPHGDPGQVIHLNLPHLLGRPRPGNHWHSLAEASAWPAPRGSWMVVAEDPACSVTLCPESLSGYLPGGSGQGPSPAAGEACGTQLGWQPLVGRCGPHVSVLSK

SEQ ID NO: 1033233 - protein, 403 aa, Homo sapiens
GQRLLRRGTGGWRWWLLVCWGSVVAAAERAWGWWRGHWTGCAWLLPDRREAAEAEAEVPVVQYVWRARCPADRVFVWGFIFSRWLLGSAFLCGAQLSRTPGCPVAGSSRRRPVSDPDPCLYRLELDQKISSAVLQCMDSHLLSSKTADVKKVLGVMGLNKDSQLVIYTGAVKDNTRGSEYVLEPVQPSLLPLDMTWGDPRVLQVSCGRAHSLVLTDREGVFSMGNNSYGQCGRKVVENEIYSESHRVHRMQDFDGQVVQVACGQDHSLFLTDKGEVYSCGWGADGQTGLGHYNITSSPTKLGGDLAGVNVIQVATYGDCCLAVSADGGLFGWGNSEYLQLASVTDSTQVNVPRCLHFSGVGKVRQAACGGTGCAVLNGVTMPGEPVDVACGVDHMVTLAKSFI

SEQ ID NO: 1033234 - protein, 489 aa, Homo sapiens; identical to SEQ ID NO: 1033223

SEQ ID NO: 1033235 - protein, 489 aa, Homo sapiens; identical to SEQ ID NO: 1033223

SEQ ID NO: 1033236 - protein, 489 aa, Homo sapiens; identical to SEQ ID NO: 1033223

SEQ ID NO: 1033237 - protein, 389 aa, Homo sapiens
GQRLLRRGTGGWRWWLLVCWGSVVAAAERAWGWWRGHWTGCAWLLPDRREAAEAEAEVPVVQYVWRARCPADRVFVWGFIFSRWLLGSAFLCGAQLSRTPGCPVAGSSRRRPVSDPDPCLYRLELDQKISSAVLQCMDSHLLSSKTADVKKVLGVMGLNKDSQLVIYTGAVKDNTRGSEYVLEPVQPSLLPLDMTWGDPRVLQVSCGRAHSLVLTDREGVFSMGNNSYGQCGRKVVENEIYSESHRVHRMQDFDGQVVQVACGQDHSLFLTDKGEVYSCGWGADGQTGLGHYNITSSLLMALPGRLPHRKLAGGTLEAPWPGIPSGAVRRHQPQPPTTLTAWLGKVKKPLRKRIEAKFLCAEGPEHIRQGSAAVPGGGGRSRNCEQCLI

SEQ ID NO: 1033238 - protein, 107 aa, Homo sapiens
  misc_feature (5)..(5): Xaa can be any naturally occurring amino acid
  misc_feature (8)..(8): Xaa can be any naturally occurring amino acid
  misc_feature (21)..(21): Xaa can be any naturally occurring amino acid
CPALXAWXLLVSLNQDTLEQXSPESCLIRGGLGRWSLRLLPPEDTNHDSRLLKPEQVSVGRPEGGFEVVPGTGVTEWTAQGAALPGLVKPQMSPIQGSGGAAVTPEA

SEQ ID NO: 1033239 - protein, 190 aa, Homo sapiens
PRTWLPVQLQAEGRAWDLGLKRPSDFQDHLVCFLPGTLALGVYHGLPASHMELAQELMETCYQMNRQMETGLSPEIVHFNLYPQPGRRDVEVKPADRHNLLRPETVESLFYLYRVTGDRKYQDWGWEILQSFSRFTRVSTCPRPAWSRPPGHRHGWAVGLRLAPLLVVAVTWVREGRACRNQVGAGILRV

SEQ ID NO: 1033240 - protein, 631 aa, Homo sapiens
MAQQHARHGDAADYEFSSSFALPAFSVDSIFYITPWTDHWKALAFRLEEEQKMRPEIAGLKPANPPVLPAPQKADSDPENLPEISSQKTQRHIQRGPPHLQIRPPSQDLKDGTQEEATKRQEAPVDPRPEGDPQRTVISWRGAVIEPEQGTELPSRRAEVPTKPPLPPARTQGTPVHLNYRQKGVIDVFLHAWKGYRKFAWGHDELKPVSRSFSEWFGLGLTLIDALDTMWILGLRKEFEEARKWVSKKLHFEKDVDVNLFESTIRILGGLLSAYHLSGDSLFLRKAEDFGNRLMPAFRTPSKIPYSDVNIGTGVAHPPRWTSDSTVAEVTSIQLEFRELSRLTGDKKFQEAVEKVTQHIHGLSGKKDGLVPMFINTHSGLFTHLGVFTLGARADSYYEYLLKQWIQGGKQETQLLEDYVEAIEGVRTHLLRHSEPSKLTFVGELAHGRFSAKMDHLVCFLPGTLALGVYHGLPASHMELAQELMETCYQMNRQMETGLSPEIVHFNLYPQPGRRDVEVKPADRHNLLRPETVESLFYLYRVTGDRKYQDWGWEILQSFSRFTRVPSGGYSSINNVQDPQKPEPRDKMESFFLGETLKYLFLLFSDDPNLLSLDAYVFNTEAHPLPIWTPA

SEQ ID NO: 1033241 - protein, 873 aa, Homo sapiens
MAQQHARHGDAADYEFSSSFALPAFSVDSIFYITPWTDHWKALAFRLEEEQKMRPEIAGLKPANPPVLPAPQKADSDPENLPEISSQKTQRHIQRGPPHLQIRPPSQDLKDGTQEEATKRQEAPVDPRPEGDPQRTVISWRGAVIEPEQGTELPSRRAEVPTKPPLPPARTQGTPVHLNYRQKGVIDVFLHAWKGYRKFAWGHDELKPVSRSFSEWFGLGLTLIDALDTMWILGLRKEFEEARKWVSKKLHFEKDVDVNLFESTIRILGGLLSAYHLSGDSLFLRKAEDFGNRLMPAFRTPSKIPYSDVNIGTGVAHPPRWTSDSTVAEVTSIQLEFRELSRLTGDKKFQEAVEKVTQHIHGLSGKKDGLVPMFINTHSGLFTHLGVFTLGARADSYYEYLLKQWIQGGKQETQLLEDYVEAIEGVRTHLLRHSEPSKLTFVGELAHGRFSAKMDHLVCFLPGTLALGVYHGLPASHMELAQELMETCYQMNRQMETGLSPEIVHFNLYPQPGRRDVEVKPADRHNLLRPETVESLFYLYRVTGDRKYQDWGWEILQSFSRFTRVSTCPRPAWSRPPGHRHGWAVGLRLAPLLVVAVTWVREGRACRSLGVATLQLGGPGIPIPTELHGCGTQSTWRGWAPLIFISQGLSREGLCCGPSIPPVEEAHAPMTGAPSPLWTRPCFRSRPPRQSVTSWLCCDLGLRPPLPPLPPSALCPVPCAATVRPPEPRFWGRRFLSWSLEGCWHFQVGSGGTTRLRLGVAIIQAPSTLSLRWGPHSLWGGERFGDEAEGGAGCPPCGDEALAAAQVPSGGYSSINNVQDPQKPEPRDKMESFFLGETLKYLFLLFSDDPNLLSLDAYVFNTEAHPLPIWTPA

SEQ ID NO: 1033242 - protein, 142 aa, Homo sapiens [sequence omitted]

SEQ ID NO: 1033243 - protein, 873 aa, Homo sapiens; identical to SEQ ID NO: 1033241

SEQ ID NO: 1033244 - protein, 172 aa, Homo sapiens
MAQQHARHGDAADYEFSSSFALPAFSVDSIFYITPWTDHWKALAFRLEEEQKMRPEIAGLKPANPPVLPAPQKADSDPENLPEISSQKTQRHIQRGPPHLQIRPPSQEDTNHDSRLLKPEQVSVGRPEGGFEVVPGTGVTEWTAQGAALPGLVKPQMSPIQGSGGAAVTPEA

SEQ ID NO: 1033245 - protein, 120 aa, Homo sapiens
MAQQHARHGDAADYEFSSSFALPAFSVDSIFYITPWTDHWKALAFRLEEEQKMRPEIAGLKPANPPVLPAPQKADTTLRTYLPGTGVTEWTAQGAALPGLVKPQMSPIQGSGGAAVTPEA

SEQ ID NO: 1033246 - protein, 122 aa, Homo sapiens
MAQQHARHGDAADYEFSSSFALPAFSVDSIFYITPWTDHWKALAFRLEEEQKMRPEIAGLKPANPPVLPAPQKADSDPENLPEISSQKTQRHIQRGPPHLQIRPPSQAPIQGSGGAAVTPEA

SEQ ID NO: 1033247 - protein, 631 aa, Homo sapiens; identical to SEQ ID NO: 1033240

SEQ ID NO: 1033248 - protein, 728 aa, Homo sapiens
MAQQHARHGDAADYEFSSSFALPAFSVDSIFYITPWTDHWKALAFRLEEEQKMRPEIAGLKPANPPVLPAPQKADSDPENLPEISSQKTQRHIQRGPPHLQIRPPSQDLKDGTQEEATKRQEAPVDPRPEGDPQRTVISWRGAVIEPEQGTELPSRRAEVPTKPPLPPARTQGTPVHLNYRQKGVIDVFLHAWKGYRKFAWGHDELKPVSRSFSEWFGLGLTLIDALDTMWILGLRKEFEEARKWVSKKLHFEKDVDVNLFESTIRILGGLLSAYHLSGDSLFLRKAEDFGNRLMPAFRTPSKIPYSDVNIGTGVAHPPRWTSDSTVAEVTSIQLEFRELSRLTGDKKFQEAVEKVTQHIHGLSGKKDGLVPMFINTHSGLFTHLGVFTLGARADSYYEYLLKQWIQGGKQETQLLEDYVEAIEGVRTHLLRHSEPSKLTFVGELAHGRFSAKMDHLVCFLPGTLALGVYHGLPASHMELAQELMETCYQMNRQMETGLSPEIVHFNLYPQPGRRDVEVKPADRHNLLRPETVESLFYLYRVTGDRKYQDWGWEILQSFSRFTRPGRLRVQHRSPPSAYLDPCLGWMAAGVGTSGGQRHLAGSVAFSKGPRSTGNRQVAQALNWLWAPPRLCFNQDTVRTSEAVSLGVMRGGLGRWSLRLLPPEDTNHDSRLLKPEQVSVGRPEGGFEVVPGTGVTEWTAQGAALPGLVKPQMSPIQGSGGAAVTPEA

SEQ ID NO: 1033249 - protein, 448 aa, Homo sapiens
  misc_feature (112)..(112): Xaa can be any naturally occurring amino acid
  misc_feature (119)..(119): Xaa can be any naturally occurring amino acid
  misc_feature (124)..(126): Xaa can be any naturally occurring amino acid
  misc_feature (129)..(129): Xaa can be any naturally occurring amino acid
  misc_feature (133)..(135): Xaa can be any naturally occurring amino acid
  misc_feature (139)..(139): Xaa can be any naturally occurring amino acid
  misc_feature (146)..(146): Xaa can be any naturally occurring amino acid
  misc_feature (158)..(159): Xaa can be any naturally occurring amino acid
  misc_feature (170)..(170): Xaa can be any naturally occurring amino acid
  misc_feature (179)..(179): Xaa can be any naturally occurring amino acid
  misc_feature (181)..(181): Xaa can be any naturally occurring amino acid
  misc_feature (184)..(184): Xaa can be any naturally occurring amino acid
  misc_feature (191)..(191): Xaa can be any naturally occurring amino acid
  misc_feature (195)..(195): Xaa can be any naturally occurring amino acid
  misc_feature (197)..(197): Xaa can be any naturally occurring amino acid
  misc_feature (201)..(203): Xaa can be any naturally occurring amino acid
  misc_feature (205)..(205): Xaa can be any naturally occurring amino acid
  misc_feature (215)..(215): Xaa can be any naturally occurring amino acid
  misc_feature (221)..(222): Xaa can be any naturally occurring amino acid
RALSAGSQSVLGRGEAELTEPLYSSPCSSALASKPTIPLSAAEAVEKVTQHIHGLSGKKDGLVPMFINTHSGLFTHLGVFTLGARADSYYEYLLKQWIQGGKQETQWRPGPXPPAPAVXPFPLXXXPKXPNSXXXRTSXPPPHSAXGNRSRARPGPGXXGEGGGKHHTPXPQGGRGGQXHXGPXAAQGGTXSPAXAXPAEXXXAXEEPDPKTPRXPKHLSXXSEKTAGVHRLLEDYVEAIEGVRTHLLRHSEPSKLTFVGELAHGRFSAKMDHLVCFLPGTLALGVYHGLPASHMELAQELMETCYQMNRQMETGLSPEIVHFNLYPQPGRRDVEVKPADRHNLLRPETVESLFYLYRVTGDRKYQDWGWEILQSFSRFTRVPSGGYSSINNVQDPQKPEPRDKMESFFLGETLKYLFLLFSDDPNLLSLDAYVFNTEAHPLPIWTPA

SEQ ID NO: 1033250 - protein, 873 aa, Homo sapiens; identical to SEQ ID NO: 1033241

SEQ ID NO: 1033251 - protein, 375 aa, Homo sapiens
MAQQHARHGDAADYEFSSSFALPAFSVDSIFYITPWTDHWKALAFRLEEEQKMRPEIAGLKPANPPVLPAPQKADSDPENLPEISSQKTQRHIQRGPPHLQIRPPSQDLKDGTQEEATKRQEAPVDPRPEGDPQRTVISWRGAVIEPEQGTELPSRRAEVPTKPPLPPARTQGTPVHLNYRQKGVIDVFLHAWKGYRKFAWGHDELKPVSRSFSEWFGLGLTLIDALDTMWILGLRKEFEEARKWVSKKLHFEKDVDVNLFESTIRILGGLLSAYHLSGDSLFLRKAEDFGNRLMPAFRTPSKIPYSDVNIGTGVAHPPRWTSDSTVAEVTSIQLEFRELSRLTGDKKFQVRGQAFWLMQPPWSYLMLITRWPQV

SEQ ID NO: 1033252 - protein, 172 aa, Homo sapiens; identical to SEQ ID NO: 1033244

SEQ ID NO: 1033253 - protein, 873 aa, Homo sapiens; identical to SEQ ID NO: 1033241

SEQ ID NO: 1033254 - protein, 902 aa, Homo sapiens
MAQQHARHGDAADYEFSSSFALPAFSVDSIFYITPWTDHWKALAFRLEEEQKMRPEIAGLKPANPPVLPAPQKADSDPENLPEISSQKTQRHIQRGPPHLQIRPPSQDLKDGTQEEATKRQEAPVDPRPEGDPQRTVISWRGAVIEPEQGTELPSRRAEVPTKPPLPPARTQGTPVHLNYRQKGVIDVFLHAWKGYRKFAWGHDELKPVSRSFSEWFGLGLTLIDALDTMWILGLRKEFEEARKWVSKKLHFEKDVDVNLFESTIRILGGLLSAYHLSGDSLFLRKAEDFGNRLMPAFRTPSKIPYSDVNIGTGVAHPPRWTSDSTVAEVTSIQLEFRELSRLTGDKKFQEAVEKVTQHIHGLSGKKDGLVPMFINTHSGLFTHLGVFTLGARADSYYEYLLKQWIQGGKQETQLLEDYVEAIEGVRTHLLRHSEPSKLTFVGELAHGRFSAKMDHLVCFLPGTLALGVYHGLPASHMELAQELMETCYQMNRQMETGLSPEIVHFNLYPQPGRRDVEVKVGLGLGQGPSGGGCLAGLAFAPELCIRHQPADRHNLLRPETVESLFYLYRVTGDRKYQDWGWEILQSFSRFTRVSTCPRPAWSRPPGHRHGWAVGLRLAPLLVVAVTWVREGRACRSLGVATLQLGGPGIPIPTELHGCGTQSTWRGWAPLIFISQGLSREGLCCGPSIPPVEEAHAPMTGAPSPLWTRPCFRSRPPRQSVTSWLCCDLGLRPPLPPLPPSALCPVPCAATVRPPEPRFWGRRFLSWSLEGCWHFQVGSGGTTRLRLGVAIIQAPSTLSLRWGPHSLWGGERFGDEAEGGAGCPPCGDEALAAAQVPSGGYSSINNVQDPQKPEPRDKMESFFLGETLKYLFLLFSDDPNLLSLDAYVFNTEAHPLPIWTPA

SEQ ID NO: 1033255 - protein, 873 aa, Homo sapiens; identical to SEQ ID NO: 1033241

SEQ ID NO: 1033256 - protein, 152 aa, Homo sapiens
VVSSDVSPSLQLSCTASDPGWELTPAEKYQAVLSLCLKPRQCSHPIRKGLHHKILLANFLAQTEALMRGKSTEEARKELQAAGKSPEDLERLLPHKVSTSAFGFGVHAGVGGVKLWHQAGAWGMPGLSYRMGGPVLTDLHVSAPVAEEVDWY

SEQ ID NO: 1033257 - protein, 256 aa, Homo sapiens [sequence omitted]

SEQ ID NO: 1033258 - protein, 356 aa, Homo sapiens
SLFIIASKTFTTQETITNAEAGLIGEVLQAAKDPSAVAKHFVALSTNTTKVKEFGIDPQNMFEFWDWVGGRYSLWSAIGLSIALHVGFDNFEQLLSGAHWMDQHFRTTPLEKNAPVLLALLGIWYINCFGCETHAMLPYDQYLHRFAAYFQQGDMESNGKYITKSGTRVDHQTGPIVWGEPGTNGQHAFYQLIHQGTKMIPCDFLIPVQTQHPIRKGLHHKILLANFLAQTEALMRGKSTEEARKELQAAGKSPEDLERLLPHKVFEGNRPTNSIVFTKLTPFMLGALVAMYEHKIFVQGIIWDINSFDQWGVELGKQLAKKIEPELDGSAQVTSHDASTNGLINFIKQQREARVQ

SEQ ID NO: 1033259 - protein, 356 aa, Homo sapiens; identical to SEQ ID NO: 1033258

SEQ ID NO: 1033260 - protein, 117 aa, Homo sapiens
MDQHFRTTPLEKNAPVLLALLGIWYINCFGCETHAMLPYDQYLHRFAAYFQQGDMESNGKYITKSGTRVDHQTGPIVWGEPGTNGQHAFYQLIHQGTKMIPCDFLIPVQTQQESRGP

SEQ ID NO: 1033261 - protein, 327 aa, Homo sapiens
SLFIIASKTFTTQETITNAEAGLIGEVLQAAKDPSAVAKHFVALSTNTTKVKEFGIDPQNMFEFWDWVGGRYSLWSAIGLSIALHVGFDNFEQLLSGAHWMDQHFRTTPLEKNAPVLLALLGIWYINCFGCETHAMLPYDQYLHRFAAYFQQGDMESNGKYITKSGTRVDHQTGPIVWGEPGTNGQHAFYQLIHQGTKMIPCDFLIPVQTQHPIRKGLHHKILLANFLAQTEALMRGKSTEEARKELQAAGKSPEDLERLLPHKVFEGNRPTNSIVFTKLTPFMLGALVAMYEHKIFVQGIIWDPPYPANFGILSSEGVLPCWAGWS

SEQ ID NO: 1033262 - protein, 242 aa, Homo sapiens
  misc_feature (12)..(12): Xaa can be any naturally occurring amino acid
DAPFVGLLVFVXLLLWFETHAMLPYDQYLHRFAAYFQQGDMESNGKYITKSGTRVDHQTGPIVWGEPGTNGQHAFYQLIHQGTKMIPCDFLIPVQTQHPIRKGLHHKILLANFLAQTEALMRGKSTEEARKELQAAGKSPEDLERLLPHKVFEGNRPTNSIVFTKLTPFMLGALVAMYEHKIFVQGIIWDINSFDQWGVELGKQLAKKIEPELDGSAQVTSHDASTNGLINFIKQQREARVQ

SEQ ID NO: 1033263 - protein, 356 aa, Homo sapiens; identical to SEQ ID NO: 1033258

SEQ ID NO: 1033264 - protein, 356 aa, Homo sapiens; identical to SEQ ID NO: 1033258

SEQ ID NO: 1033265 - protein, 294 aa, Homo sapiens
GEHNLRLGTRPGWSAIGLSIALHVGFDNFEQLLSGAHWMDQHFRTTPLEKNAPVLLALLGIWYINCFGCETHAMLPYDQYLHRFAAYFQQGDMESNGKYITKSGTRVDHQTGPIVWGEPGTNGQHAFYQLIHQGTKMIPCDFLIPVQTQHPIRKGLHHKILLANFLAQTEALMRGKSTEEARKELQAAGKSPEDLERLLPHKVFEGNRPTNSIVFTKLTPFMLGALVAMYEHKIFVQGIIWDINSFDQWGVELGKQLAKKIEPELDGSAQVTSHDASTNGLINFIKQQREARVQ

SEQ ID NO: 1033266 - protein, 237 aa, Homo sapiens
MMWVHSTALPACETHAMLPYDQYLHRFAAYFQQGDMESNGKYITKSGTRVDHQTGPIVWGEPGTNGQHAFYQLIHQGTKMIPCDFLIPVQTQHPIRKGLHHKILLANFLAQTEALMRGKSTEEARKELQAAGKSPEDLERLLPHKVFEGNRPTNSIVFTKLTPFMLGALVAMYEHKIFVQGIIWDINSFDQWGVELGKQLAKKIEPELDGSAQVTSHDASTNGLINFIKQQREARVQ

SEQ ID NO: 1033267 - protein, 356 aa, Homo sapiens; identical to SEQ ID NO: 1033258

SEQ ID NO: 1033268 - protein, 338 aa, Homo sapiens
SLFIIASKTFTTQETITNAEAGLIGEVLQAAKDPSAVAKHFVALSTNTTKVKEFGIDPQNMFEFWDWVGGRYSLWSAIGLSIALHVGFDNFEQLLSGAHWMDQHFRTTPLEKNAPVLLALLGIWYINCFGCETHAMLPYDQYLHRFAAYFQQGDMESNGKYITKSGTRVDHQTGPIVWGEPGTNGQHAFYQLIHQGTKMIPCDFLIPVQTQHPIRKGLHHKILLANFLAQTEALMRGKSTEEARKELQAAGKSPEDLERLLPHKVFEGNRPTNSIVFTKLTPFMLGALVAMYEHKIFVQGIIWDINSFDQWGVELGKQLAKTNGLINFIKQQREARVQ

SEQ ID NO: 1033269 - protein, 356 aa, Homo sapiens; identical to SEQ ID NO: 1033258

SEQ ID NO: 1033270 - protein, 356 aa, Homo sapiens; identical to SEQ ID NO: 1033258

SEQ ID NO: 1033271 - protein, 427 aa, Homo sapiens
MLSSQAAGLSAAGWDIYFMSRRKVWVFLRVQVGPRLCPSQLQSCFSPILGRVRSLHSGPPLTGGALSRSESSHVVSSGSPCSLPSLQKELCPLPTGRRVWPLLLTLLFVTGFDNFEQLLSGAHWMVVLRLVLCQVLARGACVGPGPPLSPPLSCPSPPRAAAQLPLILLLFQDQHFRTTPLEKNAPVLLALLGIWYINCFGCETHAMLPYDQYLHRFAAYFQQGDMESNGKYITKSGTRVDHQTGPIVWGEPGTNGQHAFYQLIHQGTKMIPCDFLIPVQTQHPIRKGLHHKILLANFLAQTEALMRGKSTEEARKELQAAGKSPEDLERLLPHKVFEGNRPTNSIVFTKLTPFMLGALVAMYEHKIFVQGIIWDINSFDQWGVELGKQLAKKIEPELDGSAQVTSHDASTNGLINFIKQQREARVQ

SEQ ID NO: 1033272 - protein, 167 aa, Homo sapiens
MNRAFSRKKDKTWMHTPEALSKHFIPYNAKFLGSTEVEQPKGTEVVRDAVRKLKFARHIKKSEGQKIPKVELQISIYGVKILEPKTKEVQHNCQLHRISFCADDKTDKRIFTFICKDSESNKHLCYVFDSEKCVSIPDVVGWFVLFYKPGIVLLLALAKYLKMNNFL

SEQ ID NO: 1033273 - protein, 167 aa, Homo sapiens; identical to SEQ ID NO: 1033272

SEQ ID NO: 1033274 - protein, 167 aa, Homo sapiens; identical to SEQ ID NO: 1033272

SEQ ID NO: 1033275 - protein, 167 aa, Homo sapiens; identical to SEQ ID NO: 1033272

SEQ ID NO: 1033276 - protein, 919 aa, Homo sapiens
MAADVFMCSPRRPRSRGRQVLLKPQVSEDDDDSDTDEPSPPPASGAATPARAHASAAPPPPRAGPGREEPPGLQQIIHSGHFMVSSPHREHPPKKGYDFDTVNKQTCQTYSFGKTSSCHLSIDASLTKLFECMTLAYSGKLVSPKWKNFKGLKLQWRDKIRLNNAIWRAWYMQYLEKRKNPVCHFVTPLDGSVDVDEHRRPEAITTEGKYWKSRIEIVIREYHKWRTYFKKRLQQHKDEDLSSLVQDDDMLYWHKHGDGWKTPVPMEEDPLLDTDMLMSEFSDTLFSTLSSHQPVAWPNPREIAHLGNADMIQPGLIPLQPNLDFMDTFEPFQDLFSSSRSIFGSMLPASASAPVPDPNNPPAQESILPTTALPTVSLPDSLIAPPTAPSLAHMDGQGCEHTSRTEDPFIQPTDFGPSEPPLSVPQPFLPVFTMPLLSPSPAPPPISPVLPLVPPPATALNPPAPPTFHQPQKFAGVNKAPSVITHTASATLTHDAPATTFSQSQGLVITTHHPAPSAAPCGLALSPVTRPPQPRLTFVHPKPVSLTGGRPKQPHKIVPAPKPEPVSLVLKNARIAPAAFSGQPQAVIMTSGPLKREGMLASTVSQSNVVIAPAAIARAPGVPEFHSSILVTDLGHGTSSPPAPVSRLFPSTAQDPLGKGEQVPLHGGSPQVTVTGPSRDCPNSGQASPCASEQSPSPQSPQNNCSGKSDPKNVAALKNRQMKHISAEQKRRFNIKMCFDMLNSLISNNSKLTSHAITLQKTVEYITKLQQERGQMQEEARRLREEIEELNATIISCQQLLPATGVPVTRRQFDHMKDMFDEYVKTRTLQNWKFWIFSIIIKPLFESFKGMVSTSSLEELHRTALSWLDQHCSLPILRPMVLSTLRQLSTSTSILTDPAQLPEQASKAVTRIGKRLGES

SEQ ID NO: 1033277 - protein, 919 aa, Homo sapiens; identical to SEQ ID NO: 1033276

SEQ ID NO: 1033278 - protein, 670 aa, Homo sapiens [sequence omitted]

SEQ ID NO: 1033279 - protein, 1022 aa, Homo sapiens
MAADVFMCSPRRPRSRGRQVLLKPQVSEDDDDSDTDEPSPPPASGAATPARAHASAAPPPPRAGPGREEPPGLQQIIHSGHFMVSSPHREHPPKKGYDFDTVNKQTCQTYSFGKTSSCHLSIDASLTKLFECMTLAYSGKLVSPKWKNFKGLKLQWRDKIRLNNAIWRAWYMQYLEKRKNPVCHFVTPLDGSVDVDEHRRPEAITTEGKYWKSRIEIVIREYHKWRTYFKKRLQQHKDEDLSSLVQVGEPGSSEDPHLTGDSRDFGGPPGSPAKGGRPWALPGVSGMAQEAVQLSLLGGLEGAALQMPPPCCLTSTEHPFDEFPQVTGVGILRPTVLFDASSPVLVLCEDDDMLYWHKHGDGWKTPVPMEEDPLLDTDMLMSEFSDTLFSTLSSHQPVAWPNPREIAHLGNADMIQPGLIPLQPNLDFMDTFEPFQDLFSSSRSIFGSMLPASASAPVPDPNNPPAQESILPTTALPTVSLPDSLIAPPTAPSLAHMDGQGCEHTSRTEDPFIQPTDFGPSEPPLSVPQPFLPVFTMPLLSPSPAPPPISPVLPLVPPPATALNPPAPPTFHQPQKFAGVNKAPSVITHTASATLTHDAPATTFSQSQGLVITTHHPAPSAAPCGLALSPVTRPPQPRLTFVHPKPVSLTGGRPKQPHKIVPAPKPEPVSLVLKNARIAPAAFSGQPQAVIMTSGPLKREGMLASTVSQSNVVIAPAAIARAPGVPEFHSSILVTDLGHGTSSPPAPVSRLFPSTAQDPLGKGEQVPLHGGSPQVTVTGPSRDCPNSGQASPCASEQSPSPQSPQNNCSGKSDPKNVAALKNRQMKHISAEQKRRFNIKMCFDMLNSLISNNSKLTSHAITLQKTVEYITKLQQERGQMQEEARRLREEIEELNATIISCQQLLPATGVPVTRRQFDHMKDMFDEYVKTRTLQNWKFWIFSIIIKPLFESFKGMVSTSSLEELHRTALSWLDQHCSLPILRPMVLSTLRQLSTSTSILTDPAQLPEQASKAVTRIGKRLGES

SEQ ID NO: 1033280 - protein, 526 aa, Homo sapiens [sequence omitted]

SEQ ID NO: 1033281 - protein, 772 aa, Homo sapiens
MAADVFMCSPRRPRSRGRQVLLKPQVSEDDDDSDTDEPSPPPASGAATPARAHASAAPPPPRAGPGREEPPGLQQIIHSGHFMVSSPHREHPPKKGYDFDTVNKQTCQTYSFGKTSSCHLSIDASLTKLFECMTLAYSGKLVSPKWKNFKGLKLQWRDKIRLNNAIWRAWYMQYLEKRKNPVCHFVTPLDGSVDVDEHRRPEAITTEGKYWKSRIEIVIREYHKWRTYFKKRLQQHKDEDLSSLVQDDDMLYWHKHGDGWKTPVPMEEDPLLDTDMLMSEFSDTLFSTLSSHQPVAWPNPREIAHLGNADMIQPGLIPLQPNLDFMDTFEPFQDLFSSSRSIFGSMLPASASAPVPDPNNPPAQESILPTTALPTVSLPDSLIAPPTAPSLAHMDGQGCEHTSRTEDPFIQPTDFGPSEPPLSVPQPFLPVFTMPLLSPSPAPPPISPVLPLVPPPATALNPPAPPTFHQPQKFAGVNKAPSVITHTASATLTHDAPATTFSQSQGLVITTHHPAPSAAPCGLALSPVTRPPQPRLTFVHPKPVSLTGGRPKQPHKIVPAPKPEPVSLVLKNARIAPAAFSGQPQAVIMTSGPLKREGMLASTVSQSNVVIAPAAIARAPGVPEFHSSILVTDLGHGTSSPPAPVSRLFPSTAQDPLGKGEQVPLHGGSPQVTVTGPSRDCPNSGQASPCASEQSPSPQSPQNNCSGKSDPKNVAALKNRQMKHISAEQKRRFNIKMCFDMLNSLISNNSKLTSHAITLQKTVEYITKLLLS

SEQ ID NO: 1033282 - protein, 628 aa, Homo sapiens
MAADVFMCSPRRPRSRGRQVLLKPQVSEDDDDSDTDEPSPPPASGAATPARAHASAAPPPPRAGPGREEPPGLQQIIHSGHFMVSSPHREHPPKKGYDFDTVNKQTCQTYSFGKTSSCHLSIDASLTKLFECMTLAYSGKLVSPKWKNFKGLKLQWRDKIRLNNAIWRAWYMQYLEKRKNPVCHFVTPLDGSVDVDEHRRPEAITTEGKYWKSRIEIVIREYHKWRTYFKKRLQQHKDEDLSSLVQDDDMLYWHKHGDGWKTPVPMEEDPLLDTDMLMSEFSDTLFSTLSSHQPVAWPNPREIAHLGNADMIQPGLIPLQPNLDFMDTFEPFQDLFSSSRSIFGSMLPASASAPVPDPNNPPAQESILPTTALPTVSLPDSLIAPPTAPSLAHMDGQGCEHTSRTEDPFIQPTDFGPSEPPLSVPQPFLPVFTMPLLSPSPAPPPISPVLPLVPPPATALNPPAPPTFHQPQKFAGVNKAPSVITHTASATLTHDAPATTFSQSQGLVITTHHPAPSAAPCGLALSPVTRPPQPRLTFVHPKPVSLTGGRPKQPHKIVPAPKPEPVSLVLKNARIAPGEPGGETQCGAPPDPEGCFPIPKAFKLVTTTTTLVCTCMRTHIHLNETKVS

SEQ ID NO: 1033283 - protein, 871 aa, Homo sapiens
MAADVFMCSPRRPRSRGRQVLLKPQVSEDDDDSDTDEPSPPPASGAATPARAHASAAPPPPRAGPGREEPPGLQQIIHSGHFMVSSPHREHPPKKGYDFDTVNKQTCQTYSFGKTSSCHLSIDASLTKLFECMTLAYSGKLVSPKWKNFKGLKLQWRDKIRLNNAIWRAWYMQYLEKRKNPVCHFVTPLDGSVDVDEHRRPEAITTEGKYWKSRIEIVIREYHKWRTYFKKRLQQHKDEDLSSLVQDDDMLYWHKHGDGWKTPVPMEEDPLLDTDMLMSEFSDTLFSTLSSHQPVAWPNPREIAHLGNADMIQPGLIPLQPNLDFMDTFEPFQEESILPTTALPTVSLPDSLIAPPTAPSLAHMDGQGCEHTSRTEDPFIQPTDFGPSEPPLSVPQPFLPRVTISSSSCHCPEPPGSTHLPSATEVCWSNKAPSVITHTASATLTHDAPATTFSQSQGLVITTHHPAPSAAPCGLALSPVTRPPQPRLTFVHPKPVSLTGGRPKQPHKIVPAPKPEPVSLVLKNARIAPAAFSGQPQAVIMTSGPLKREGMLASTVSQSNVVIAPAAIARAPGVPEFHSSILVTDLGHGTSSPPAPVSRLFPSTAQDPLGKGEQVPLHGGSPQVTVTGPSRDCPNSGQASPCASEQSPSPQSPQNNCSGKSDPKNVAALKNRQMKHISAEQKRRFNIKMCFDMLNSLISNNSKLTSHAITLQKTVEYITKLQQERGQMQEEARRLREEIEELNATIISCQQLLPATGVPVTRRQFDHMKDMFDEYVKTRTLQNWKFWIFSIIIKPLFESFKGMVSTSSLEELHRTALSWLDQHCSLPILRPMVLSTLRQLSTSTSILTDPAQLPEQASKAVTRIGKRLGES

SEQ ID NO: 1033284 - protein, 919 aa, Homo sapiens; identical to SEQ ID NO: 1033276

SEQ ID NO: 1033285 - protein, 860 aa, Homo sapiens
MAADVFMCSPRRPRSRGRQVLLKPQVSEDDDDSDTDEPSPPPASGAATPARAHASAAPPPPRAGPGREEPPGLQQIIHSGHFMVSSPHREHPPKKGYDFDTVNKQTCQTYSFGKTSSCHLSIDASLTKLFECMTLAYSGKLVSPKWKNFKGLKLQWRDKIRLNNAIWRAWYMQYLEKRKNPVCHFVTPLDGSVDVDEHRRPEAITTEGKYWKSRIEIVIREYHKWRTYFKKRLQQHKDEDLSSLVQVGEPGSSEDPHLNETAGTSVAHQGALQKDLFSSSRSIFGSMLPASASAPVPDPNNPPAQESILPTTALPTVSLPDSLIAPPTAPSLAHMDGQGCEHTSRTEDPFIQPTDFGPSEPPLSVPQPFLPVFTMPLLSPSPAPPPISPVLPLVPPPATALNPPAPPTFHQPQKFAGVNKAPSVITHTASATLTHDAPATTFSQSQGLVITTHHPAPSAAPCGLALSPVTRPPQPRLTFVHPKPVSLTGGRPKQPHKIVPAPKPEPVSLVLKNARIAPAAFSGQPQAVIMTSGPLKREGMLASTVSQSNVVIAPAAIARAPGVPEFHSSILVTDLGHGTSSPPAPVSRLFPSTAQDPLGKGEQVPLHGGSPQVTVTGPSRDCPNSGQASPCASEQSPSPQSPQNNCSGKSDPKNVAALKNRQMKHISAEQKRRFNIKMCFDMLNSLISNNSKLTSHAITLQKTVEYITKLQQERGQMQEEARRLREEIEELNATIISCQQLLPATGVPVTRRQFDHMKDMFDEYVKTRTLQNWKFWIFSIIIKPLFESFKGMVSTSSLEELHRTALSWLDQHCSLPILRPMVLSTLRQLSTSTSILTDPAQLPEQASKAVTRIGKRLGES

SEQ ID NO: 1033286 - protein, 207 aa, Homo sapiens
MAPADSAYSHSADYIVEILNLPDYPGLPTLRSSPDRAMRVLPQNGPLARTRLHRMREYRGNTHPGGTPTATAPQAHAPPIKQETKEIENQCKTADIQDKTNYSQHETQHQPTEAHTRPLAQTTQDTAHRPLTATCSQHTAGDTGPAGRRTVNPPTTPELRPTNAIKLTHRHTQPHLSASKTPKQEARDKRPCSNKLTRVTRIEHNYT

SEQ ID NO: 1033287 - protein, 119 aa, Homo sapiens
MTLIPPRAHVGSGAPFLQRLGVCQPVAASRGGVERKEWCGSWGERPFLPPSPTSTLSAASRVRKQVVNIPSFIVRLDSQKHIDFSLRSPYGGGRPGRVKRKNAKKGQGGAGAGDDEEED

SEQ ID NO: 1033288 - protein, 256 aa, Homo sapiens
MPVARSWVCRKTYVTPRRPFEKSRLDQELKLIGEYGLRNKREVWRVKFTLAKIRKAARELLTLDEKDPRRLFEGNALLRRLVRIGVLDEGKMKLDYILGLKIEDFLERRLQTQVFKLGLAKSIHHARVGDFWTVTRYQPSEVMGVNSARGYRLHLLVHQFTRKLGQGSGTPIGPARGSLRSRRTTCEGLLQACGELDRVRKQVVNIPSFIVRLDSQKHIDFSLRSPYGGGRPGRVKRKNAKKGQGGAGAGDDEEED

SEQ ID NO: 1033289 - protein, 194 aa, Homo sapiens [sequence omitted]

SEQ ID NO: 1033290 - protein, 194 aa, Homo sapiens [sequence omitted]

SEQ ID NO: 1033291 - protein, 216 aa, Homo sapiens
GRERTELRSCGKFWSPNNAFASGAGLVCGISTCEADKGPCREVWVTVLRELKLIGEYGLRNKREVWRVKFTLAKIRKAARELLTLDEKDPRRLFEGNALLRRLVRIGVLDEGKMKLDYILGLKIEDFLERRLQTQVFKLGLAKSIHHARVVIRTGPFRVRKQVVNIPSFIVRLDSQKHIDFSLRSPYGGGRPGRVKRKNAKKGQGGAGAGDDEEED

SEQ ID NO: 1033292 - protein, 194 aa, Homo sapiens [sequence omitted]

SEQ ID NO: 1033293 - protein, 403 aa, Homo sapiens
MTRAEWQVAEATALVHTLDGWSVVQTMVVSTKTPDRKLIFGKGNFEHLTEKIRGSPDVTCVFLNVERMAAPTKKELEAAWGVEVFDRFTVVLHIFRCNARTKEARLQVALAEMPLHRSNLKRDVAHLYRGVGSRYIMGSGESFMQLQQRLLREKEAKIRKALDRLRKKRHLLRRQRTRREFPVISVVGYTNCGKTTLIKALTGDAAIQPRDQLFATLDVTAHAGTLPSRMTVLYVDTIGFLSQLPHGLIESFSATLEDVAHSDLILHVRDVSHPEAELQKCSVLSTLRGLQLPAPLLDSMVEVHNKVDLVPGYSPTEPNVVPVSALRGHGLQELKAELDAAVLKATGRQILTLRVRLAGAQLSWLYKEATVQEVDVIPEDGAADVRVIISNSAYGKFRKLFPG

SEQ ID NO: 1033294 - protein, 403 aa, Homo sapiens; identical to SEQ ID NO: 1033293

SEQ ID NO: 1033295 - protein, 551 aa, Homo sapiens
GEALVSQPRPHANHEHVMRSGLWAAPAPTFSLRRAMWALRAAVRPGLRLSRVGRGRSAPRAAAPSCPARALAAVGRRSPGNLEGPWGGGRGLRADGGRSRTGDDEEEPEDADENAEEELLRGEPLLPAGTQRVCLVHPDVKWGPGKSQMTRAEWQVAEATALVHTLDGWSVVQTMVVSTKTPDRKLIFGKGNFEHLTEKIRGSPDVTCVFLNVERMAAPTKKELEAAWGVEVFDRFTVVLHIFRCNARTKEARLQVALAEMPLHRSNLKRDVAHLYRGVGSRYIMGSGESFMQLQQRLLREKEAKIRKALDRLRKKRHLLRRQRTRREFPVISVVGYTNCGKTTLIKALTGDAAIQPRDQLFATLDVTAHAGTLPSRMTVLYVDTIGFLSQLPHGLIESFSATLEDVAHSDLILHVRDVSHPEAELQKCSVLSTLRGLQLPAPLLDSMVEVHNKVDLVPGYSPTEPNVVPVSALRGHGLQELKAELDAAVLKATGRQILTLRVRLAGAQLSWLYKEATVQEVDVIPEDGAADVRVIISNSAYGKFRKLFPG

SEQ ID NO: 1033296 - protein, 563 aa, Homo sapiens
GEALVSQPRPHANHEHVMRSGLWAAPAPTFSLRRAMWALRAAVRPGLRLSRVGRGRSAPRAAAPSCPARALAAVGRRSPGNLEGPWGGGRGLRADGGRSRTGDDEEEPEDADENAEEELLRGEPLLPAGTQRVCLVHPDVKWGPGKSQMTRAEWQVAEATALVHTLDGWSVVQTMVVSTKTPDRKLIFGKGNFEHLTEKIRGSPDVTCVFLNVERMAAPTKKELEAAWGVEVFDRFTVVLHIFRCNARTKEARLQVALAEMPLHRSNLKRDVAHLYRGVGSRYIMGSGESFMQLQQRLLREKEAKIRKALDRLRKKRHLLRRQRTRREFPVISVVGYTNCGKTTLIKALTGDAAIQPRDQLFATLDVTAHAGTLPSRMTVLYVDTIGFLSQLPHGLIESFSATLEDVAHSDLILHVRDVSHPEAELQKCSVLSTLRGLQLPAPLLDSMVEVHNKVDLVPGYSPTEPNVVPVSALRGHGLQELKAELDAAVLKATGRQILTLRVRLAGAQLSWLYKEATVQEVDVIAAWGAEALPLCWGQLGVRCSRVLLVWFCTRLAPSHLLG

SEQ ID NO: 1033297 - protein, 596 aa, Homo sapiens
GEALVSQPRPHANHEHVMRSGLWAAPAPTFSLRRAMWALRAAVRPGLRLSRVGRGRSAPRAAAPSCPARALAAVGRRSPGNLEGPWGGGRGLRADGGRSRTGDDEEEPEDADENAEEELLRGEPLLPAGTQRVCLVHPDVKWGPGKSQMTRAEWQVAEATALVHTLDGWSVVQTMVVSTKTPDRKLIFGKGNFEHLTGGSVQTCSFPKPPFLSAATENIQPRHAEVRGSCGARGEAGLSDCPEKIRGSPDVTCVFLNVERMAAPTKKELEAAWGVEVFDRFTVVLHIFRCNARTKEARLQVALAEMPLHRSNLKRDVAHLYRGVGSRYIMGSGESFMQLQQRLLREKEAKIRKALDRLRKKRHLLRRQRTRREFPVISVVGYTNCGKTTLIKALTGDAAIQPRDQLFATLDVTAHAGTLPSRMTVLYVDTIGFLSQLPHGLIESFSATLEDVAHSDLILHVRDVSHPEAELQKCSVLSTLRGLQLPAPLLDSMVEVHNKVDLVPGYSPTEPNVVPVSALRGHGLQELKAELDAAVLKATGRQILTLRVRLAGAQLSWLYKEATVQEVDVIPEDGAADVRVIISNSAYGKFRKLFPG

SEQ ID NO: 1033298 - protein, 424 aa, Homo sapiens
GEALVSQPRPHANHEHVMRSGLWAAPAPTFSLRRAMWALRAAVRPGLRLSRVGRGRSAPRAAAPSCPARALAAVGRRSPGNLEGPWGGGRGLRADGGRSRTGDDEEEPEDADENAEEELLRGEPLLPAGTQRVCLVHPDVKWGPGKSQMTRAEWQVAEATALVHTLDGWSVVQTMVVSTKTPDRKLIFGKGNFEHLTEKIRGSPDVTCVFLNVERMAAPTKKELEAAWGVEVFDRFTVVLHIFRCNARTKEARLQVALAEMPLHRSNLKRDVAHLYRGVGSRYIMGSGESFMQLQQRLLREKEAKIRKALDRLRKKRHLLRRQRTRREFPVISVVGYTNCGKTTLIKALTGDAAIQPRDQLFATLDVTAHAGTLPSRMTVLYVDTTVQEVDVIPEDGAADVRVIISRVLLVWFCTRLAPSHLLG

SEQ ID NO: 1033299 - protein, 494 aa, Homo sapiens
GEALVSQPRPHANHEHVMRSGLWAAPAPTFSLRRAMWALRAAVRPGLRLSRVGRGRSAPRAAAPSCPARALAAVGRRSPGNLEGPWGGGRGLRADGGRSRTGDDEEEPEDADENAEEELLRGEPLLPAGTQRVCLVHPDVKWGPGKSQMTRAEWQVAEATALVHTLDGWSVVQTMVVSTKTPDRKLIFGKGNFEHLTEKIRGSPDVTCVFLNVERMAAPTKKELEAAWGVEVFDRFTVVLHIFRCNARTKEARLQVALAEMPLHRSNLKRDVAHLYRGVGSRYIMGSGESFMQLQQRLLREKEAKIRKALDRLRKKRHLLRRQRTRREFPVISVVGYTNCGKTTLIKALTGDAAIQPRDQLFATLDVTATRDAASALTSCRGTMGSFQLRRPLESFRTVKWPSALPLPLGSWPPQGGPSKYAQAQRMTEMPPPWQRRRGNNGTDVRDNPERSGTSSEHQPKTDGEREHTCSPLRDSEKETTTESGRWCPLAVIA

SEQ ID NO: 1033300 - protein, 238 aa, Homo sapiens
GEALVSQPRPHANHEHVMRSGLWAAPAPTFSLRRAMWALRAAVRPGLRLSRVGRGRSAPRAAAPSCPARALAAVGRRSPGNLEGPWGGGRGLRADGGRSRTGDDEEEPEDADENAEEELLRGEPLLPAGTQRVCLVHPDVKWGPGKSQMTRAEWQVAEATALVHTLDGWSVVQTMVVSTKTPDRKLIFGKGNFEHLTEKIRGSPDVTCVFLNVERMAAPTKKELEAAWGVEVFDRAGR

SEQ ID NO: 1033301 - protein, 171 aa, Homo sapiens
GEALVSQPRPHANHEHVMRSGLWAAPAPTFSLRRAMWALRAAVRPGLRLSRVGRGRSAPRAAAPSCPARALAAVGRRSPGNLEGPWGGGRGLRADGGRSRTGDDEEEPEDADENAEEELLRGEPLLPAGTQRVCLVHPDVKWGPGKSQMTRGDRGRAFGGETGAGDLGAGL

SEQ ID NO: 1033302 - protein, 629 aa, Homo sapiens
GEALVSQPRPHANHEHVMRSGLWAAPAPTFSLRRAMWALRAAVRPGLRLSRVGRGRSAPRAAAPSCPARALAAVGRRSPGNLEGPWGGGRGLRADGGRSRTGDDEEEPEDADENAEEELLRGEPLLPAGTQRVCLVHPDVKWGPGKSQMTRAEWQVAEATALVHTLDGWSVVQTMVVSTKTPDRKLIFGKGNFEHLTEKIRGSPDVTCVFLNVERMAAPTKKELEAAWGVEVFDRFTVVLHIFRCNARTKEARLQVALAEMPLHRSNLKRDVAHLYRGVGSRYIMGSGESFMQLQQRLLREKEAKIRKALDRLRKKRHLLRRQRTRREFPVISVVGYTNCGEHAPRGGAFRGLRVTGEDSPGGGQGVPVVSVVPYDSCGDTCPGEGVPMVAVWGTPAAVRAHPGDGFPVVSVWGTAAKVKTTLIKALTGDAAIQPRDQLFATLDVTAHAGTLPSRMTVLYVDTIGFLSQLPHGLIESFSATLEDVAHSDLILHVRDVSHPEAELQKCSVLSTLRGLQLPAPLLDSMVEVHNKVDLVPGYSPTEPNVVPVSALRGHGLQELKAELDAAVLKATGRQILTLRVRLAGAQLSWLYKEATVQEVDVIPEDGAADVRVIISNSAYGKFRKLFPG

SEQ ID NO: 1033303 - protein, 580 aa, Homo sapiens
GEALVSQPRPHANHEHVMRSGLWAAPAPTFSLRRAMWALRAAVRPGLRLSRVGRGRSAPRAAAPSCPARALAAVGRRSPGNLEGPWGGGRGLRADGGRSRTGDDEEEPEDADENAEEELLRGEPLLPAGTQRVCLVHPDVKWGPGKSQMTRAEWQVAEATALVHTLDGWSVVQTMVVSTKTPDRKLIFGKGNFEHLTEKIRGSPDVTCVFLNVERMAAPTKKELEAAWGVEVFDRFTVVLHIFRCNARTKEARLQVALAEMPLHRSNLKRDVAHLYRGVGSRYIMGSGESFMQLQQRLLREKEAKIRKALDRLRKKRHLLRRQRTRREFPVISVVGYTNCGKTTLIKALTGDAAIQPRDQLFATLDVTAHAGTLPSRMTVLYVDTIGFLSQLPHGLIESFSATLEDVAHSDLILHVRDVSHPEAELQKCSVLSTLRGLQLPAPLLDSMVEVHNKVDLVPGYSPTEPNVVPVSALRGHGLQELKAELDAAVLKATGRQILTLRVRLAGAQLSWLYKEATVQEVDVIRGGFGGGKKTPGFGYLPPPWRKGGGKNPRPEDGAADVRVIISNSAYGKFRKLFPG

SEQ ID NO: 1033304 - protein, 419 aa, Homo sapiens
GEALVSQPRPHANHEHVMRSGLWAAPAPTFSLRRAMWALRAAVRPGLRLSRVGRGRSAPRAAAPSCPARALAAVGRRSPGNLEGPWGGGRGLRADGGRSRTGDDEEEPEDADENAEEELLRGEPLLPAGTQRVCLVHPDVKWGPGKSQMTRAEWQVAEATALVHTLDGWSVVQTMVVSTKTPDRKLIFGKGNFEHLTEKIRGSPDVTCVFLNVERMAAPTKKELEAAWGVEVFDRFTVVLHIFRCNARTKEARLQVALAEMPLHRSNLKRDVAHLYRGVGSRYIMGSGESFMQLQQRLLREKEAKIRKALDRLRKKRHLLRRQRTRREFPVISVVGYTNCGKTTLIKALTGDAAIQPRDQLFATLDVTAHAGTLPSRMTVLYVDTTVQEVDVIPEDGAADVRVIISNSAYGKFRKLFPG

SEQ ID NO: 1033305 - protein, 527 aa, Homo sapiens
GEALVSQPRPHANHEHVMRSGLWAAPAPTFSLRRAMWALRAAVRPGLRLSRVGRGRSAPRAAAPSCPARALAAVGRRSPGNLEGPWGGGRGLRADGGRSRTGDDEEEPEDADENAEEELLRGEPLLPAGTQRVCLVHPDVKWGPGKSQMTRAEWQVAEATALVHTLDGWSVVQTMVVSTKTPDRKLIFGKGNFEHLTEKIRGSPDVTCVFLNVERMAAPTKKELEAAWGVEVFDRFTVVLHIFRCNARTKEARLQVALAEMPLHRSNLKRDVAHLYRGVGSRYIMGSGESFMQLQQRLLREKEAKIRKALDRLRKKRHLLRRQRTRREFPVISVVGYTNCGEHAPRGGAFRGLRVTGEDSPGGGQGVPVVSVVPYDSCGEHVPRRGGSHGRRVGYTSCCESSPRRRVSCGLCVGYSSQGEDVIYPILPSRALPPCLYHNLPSIYTILLSRPSPLPYLYHHPVYTIHPSTPSPLLCLYHPPVYTSTTTPSIPPPRLHNPPVYTINVPFVCTVLLSTLHHMPHLYHTHP

SEQ ID NO: 1033306 - protein, 163 aa, Homo sapiens
GEALVSQPRPHANHEHVMRSGLWAAPAPTFSLQTRHVGPAGRRTPGAAALPRGPRPLGSAGSRAVLPRARASRCRPQEPRESGGAVGRRAGPAGGRRPKPHGSSFQDERTPTEACGVGASLPGELRRYRCVGGSLVSGAAGSSLSGSAPVSLPAICWDDRAGR

SEQ ID NO: 1033307 - protein, 403 aa, Homo sapiens; identical to SEQ ID NO: 1033293

SEQ ID NO: 1033308 - protein, 138 aa, Homo sapiens
MRDWLKNILMQLYEANSEHAGYLNEKQRNKVKKIYLDEKRLLAGDHPIDLLLRDFKKNYHMYVYPVHWQFSELDQHPMDRVLTHSELAPLRASLVPMEHCITRFFEECDPNKDKHITLKEWGHCFGIKEEDIDENLLF

SEQ ID NO: 1033309 - protein, 161 aa, Homo sapiens
MQTGGTKKGHQLQLDYFGACKSIPTCTDFEVIQFPLRMRDWLKNILMQLYEANSEHAGYLNEKQRNKVKKIYLDEKRLLAGDHPIDLLLRDFKKNYHMYVYPVHWQFSELDQHPMDRVLTHSELAPLRASLVPMEHCITRFFEECDPNKDKHITLKEWGQP

SEQ ID NO: 1033310 - protein, 175 aa, Homo sapiens
MQTGGTKKGHQLQLDYFGACKSIPTCTDFEVIQFPLRMRDWLKNILMQLYEANSEHAGYLNEKQRNKVKKIYLDEKRLLAGDHPIDLLLRDFKKNYHMYVYPVHWQFSELDQHPMDRVLTHSELAPLRASLVPMEHCITRFFEECDPNKDKHITLKEWGHCFGIKEEDIDENLLF

SEQ ID NO: 1033311 - protein, 175 aa, Homo sapiens; identical to SEQ ID NO: 1033310

SEQ ID NO: 1033312 - protein, 175 aa, Homo sapiens; identical to SEQ ID NO: 1033310

SEQ ID NO: 1033313 - protein, 516 aa, Homo sapiens
MEREPGAAGVRRALGRRLEAVLASRSEANAVFDILAVLQSEDQEEIQEAVRTCSRLFGALLERGELFVGQLPSEEMVMTGSQGATRKYKVWMRHRYHSCCNRLGELLGHPSFQVKELALSALLKFVQLEGAHPLEKSKWEGNYLFPRELFKLVVGGLLSPEEDQSLLLSQFREYLDYDDTRYHTMQAAVDAVARVTGQHPEVPPAFWNNAFTLLSAVSLPRREPTVSSFYVKRAELWDTWKVAHLKEHRRVFQAMWLSFLKHKLPLSLYKKVLLIVHDAILPQLAQPTLMIDFLTRACDLGGALSLLALNGLFILIHKHNLEYPDFYRKLYGLLDPSVFHVKYRARFFHLADLFLSSSHLPAYLVAAFAKRLARLALTAPPEALLMVLPFICNLLRRHPACRVLVHRPHGPELDADPYDPGEEDPAQSRALESSLWELQALQRHYHPEVSKAASVINQALSMPEVSIAPLLELTAYEIFERDLKKKGPEPVPLEFIPAQGLLGRPGELCAQHFTLS

SEQ ID NO: 1033314 - protein, 552 aa, Homo sapiens
MEREPGAAGVRRALGRRLEAVLASRSEANAVFDILAVLQSEDQEEIQEAVRTCSRLFGALLERGELFVGQLPSEEMVMTGSQGATRKYKVWMRHRYHSCCNRLGELLGHPSFQVKELALSALLKFVQLEGAHPLEKSKWEGNYLFPRELFKLVVGGLLSPEEDQSLLLSQFREYLDYDDTRYHTMQAAVDAVARVTGQHPEVGDGVLSPASCCCLPGRQALGGGVRHSGQAPAVCPPAFLEQLASTACLSLPEALARREPTVSSFYVKRAELWDTWKVAHLKEHRRVFQAMWLSFLKHKLPLSLYKKVLLIVHDAILPQLAQPTLMIDFLTRACDLGGALSLLALNGLFILIHKHNLEYPDFYRKLYGLLDPSVFHVKYRARFFHLADLFLSSSHLPAYLVAAFAKRLARLALTAPPEALLMVLPFICNLLRRHPACRVLVHRPHGPELDADPYDPGEEDPAQSRALESSLWELQALQRHYHPEVSKAASVINQALSMPEVSIAPLLELTAYEIFERDLKKKGPEPVPLEFIPAQGLLGRPGELCAQHFTLS

SEQ ID NO: 1033315 - protein, 516 aa, Homo sapiens; identical to SEQ ID NO: 1033313

SEQ ID NO: 1033316 - protein, 315 aa, Homo sapiens
  misc_feature (315)..(315): Xaa can be any naturally occurring amino acid
MEREPGAAGVRRALGRRLEAVLASRSEANAVFDILAVLQSEDQEEIQEAVRTCSRLFGALLERGELFVGQLPSEEMVMTGSQGATRKYKVWMRHRYHSCCNRLGELLGHPSFQVKELALSALLKFVQLEGAHPLEKSKWEGNYLFPRELFKLVVGGLLSPEEDQSLLLSQFREYLDYDDTRYHTMQAAVDAVARVTGQHPEVPPAFWNNAFTLLSAVSLPRREPTVSSFYVKRAELWDTWKVAHLKEHRRVFQAMWLSFLKHKLPLSLYKKVLLIVHDAICEVGQPVMIDSQPAGPRGAHCGLTVSLMKKLDTDX

SEQ ID NO: 1033317 - protein, 262 aa, Homo sapiens
  misc_feature (4)..(5): Xaa can be any naturally occurring amino acid
  misc_feature (7)..(7): Xaa can be any naturally occurring amino acid
  misc_feature (40)..(40): Xaa can be any naturally occurring amino acid
VQHXXRXGCGRGQQGQRHTPQTYTQCGQGVGWERGHCSSXLCLSVRRGALSLLALNGLFILIHKHNLEYPDFYRKLYGLLDPSVFHVKYRARFFHLADLFLSSSHLPAYLVAAFAKRLARLALTAPPEALLMVLPFICNLLRRHPACRVLVHRPHGPELDADPYDPGEEDPAQSRALESSLWELQALQRHYHPEVSKAASVINQALSMPEVSIAPLLELTAYEIFERDLKKKGPEPVPLEFIPAQGLLGRPGELCAQHFTLS

SEQ ID NO: 1033318 - protein, 516 aa, Homo sapiens; identical to SEQ ID NO: 1033313

SEQ ID NO: 1033319 - protein, 182 aa, Homo sapiens
MIRSDLFPHRARFFHLADLFLSSSHLPAYLVAAFAKRLARLALTAPPEALLMVLPFICNLLRRHPACRVLVHRPHGPELDADPYDPGEEDPAQSRALESSLWELQALQRHYHPEVSKAASVINQALSMPEVSIAPLLELTAYEIFERDLKKKGPEPVPLEFIPAQGLLGRPGELCAQHFTLS

SEQ ID NO: 1033320 - protein, 688 aa, Homo sapiens
LAEQLKQAEELRQYKVLVHSQERELTQLKEKLQEGRDASRSLNEHLQALLTLDEPDKSQGQDLQEQLAEGCRLAQHLVQKAQPREVQKAEESKVPEDSLEECAITCSNSHGPCDSNQPHKNIKITFEEDEVNSTLVVDRESSHDECQDALNILPVPGPTSSATNVSMVVSAGPLSSEKAEMNILEINEKLRPQLAEKKQQFRNLKEKCFLTQLAGFLANQQNKYKYEECKDLIKSMLRNERQFKEEKLAEQLKQAEELRQYKVLVHAQERELTQLREKLREGRDASRSLNEHLQALLTPDEPDKSQGQDLQEQLAEGCRLAQHLVQKLSPENDNDDDEDVQVEVAEKVQKSSAPREMQKAEEKEVPEDSLEECAITCSNSHGPYDSNQPHRKTKITFEEDKVDSTLIGSSSHVEWEDAVHIIPENESDDEEEEEKGPVSPRNLQESEEEEVPQESWDEGYSTLSIPPEMLASYQSYSSTFHSLEEQQVCMAVDIGRHRWDQVKKEDQEATGPRLSRELLDEKGPEVLQDSLDRCYSTPSGCLELTDSCQPYRSAFYVLEQQRVGLAVDMDEIEKYQEVEEDQDPSCPRLSRELLDEKEPEVLQDSLDRCYSTPSGYLELPDLGQPYSSAVYSLEEQYLGLALDVDSEYLTVKVISLHLVFQIGVIFLFQVALTDPRDVIAAGRTYGRI

SEQ ID NO: 1033321 - protein, 867 aa, Homo sapiens
LAEQLKQAEELRQYKVLVHSQERELTQLKEKLQEGRDASRSLNEHLQALLTLDEPDKSQGQDLQEQLAEGCRLAQHLVQKLQPREVQKAEESKVPEDSLEECAITCSNSHGPCDSNQPHKNIKITFEEDEVNSTLVVDRESSHDECQDALNILSVPGPTSSATNVSMVVSAGPLSSEKAEMNILEINEKLRPQLAEKKQQFRNLKEKCFLTQLAGFLANQQNKYKYEECKDLIKSMLRNERQFKEEKLAEQLKQAEELRQYKVLVHAQERELTQLREKLREGRDASRSLNEHLQALLTPDEPDKSQGQDLQEQLAEGCRLAQHLVQKLSPENDNDDDEDVQVEVAEKVQKSSAPREMQKAEEKEVPEDSLEECAITCSNSHGPYDSNQPHRKTKITFEEDKVDSTLIGSSSHVEWEDAVHIIPENESDDEEEEEKGPVSPRNLQESEEEEVPQESWDEGYSTLSIPPEMLASYQSYSSTFHSLEEQQVCMAVDIGRHRWDQVKKEDQEATGPRLSRELLDEKGPEVLQDSLDRCYSTPSGCLELTDSCQPYRSAFYVLEQQRVGLAVDMDEIEKYQEVEEDQDPSCPRLSRELLDEKEPEVLQDSLDRCYSTPSGYLELPDLGQPYSSAVYSLEEQYLGLALDVDRIKKDQEEEEDQGPPCPRLSRELLEVVEPEVLQDSLDRCYSTPSSCLEQPDSCQPYGSSFYALEEKHVGFSLDVGEIEKKGKGKKRRGRRSKKERRRGRKEGEEDQNPPCPRLSRELLDEKGPEVLQDSLDRCYSTPSGCLELTDSCQPYRSAFYILEQQRVGLAVDMDEIEKYQEVEEDQDPSCPRPGSAGSCWMRKSLKSCRTHWIDVIRLLQVILNCLT

SEQ ID NO: 1033322 - protein, 688 aa, Homo sapiens; identical to SEQ ID NO: 1033320

SEQ ID NO: 1033323 - protein, 921 aa, Homo sapiens
MLRNERQFKEEKLAEQLKQAEELRQYKVLVHAQERELTQLREKLREGRDASRSLNEHLQALLTPDEPDKSQGQDLQEQLAEGCRLAQHLVQKLSPENDNDDDEDVQVEVAEKVQKSSAPREMQKAEEKEVPEDSLEECAITCSNSHGPYDSNQPHRKTKITFEEDKVDSTLIGSSSHVEWEDAVHIIPENESDDEEEEEKGPVSPRNLQESEEEEVPQESWDEGYSTLSIPPEMLASYKSYSSTFHSLEEQQVCMAVDIGRHRWDQVKKEDHEATGPRLSRELLDEKGPEVLQDSLDRCYSTPSGCLELTDSCQPYRSAFYVLEQQRVGLAVNMDEIEKYQEVEEDQDPSCPRLSRELLDEKEPEVLQDSLGRCYSTPSGYLELPDLGQPYSSAVYSLEEQYLGLALDVDRIKKDQEEEEDQGPPCPRLSRELLEVVEPEVLQDSLDRCYSTPSSCLEQPDSCQPYGSSFYALEEKHVGFSLDVGEIEKKGKGKKRRGRRSKKERRRGRKEGEEDQNPPCPRLSRELLDEKGPEVLQDSLDRCYSTPSGCLELTDSCQPYRSAFYILEQQRVGLAVDMDEIEKYQEVEEDQDPSCPRLSGELLDEKEPEVLQESLDRCYSTPSGCLELTDSCQPYRSAFYILEQQRVGLAVDMDEIEKYQEVEEDQDPSCPRLSRELLDEKEPEVLQDSLGRCYSTPSGYLELPDLGQPYSSAVYSLEEQYLGLALDVDRIKKDQEEEEDQGPPCPRLSRELLEVVEPEVLQDSLDRCYSTPSSCLEQPDSCQPYGSSFYALEEKHVGFSLDVGEIEKKGKGKKRRGRRSKKERRRGRKEGEEDQNPPCPRLNSMLMEVEEPEVLQDSLDICYSTPSMYFELPDSFQHYRSVFYSFEEEHISFALYVDNRFFTLTVTSLHLVFQMGVIFPQ

SEQ ID NO: 1033324 - protein, 688 aa, Homo sapiens; identical to SEQ ID NO: 1033320

SEQ ID NO: 1033325 - protein, 671 aa, Homo sapiens
LAEQLKQAEELRQYKVLVHSQERELTQLKEKLQEGRDASRSLNEHLQALLTLDEPDKSQGQDLQEQLAEGCRLAQHLVQKAQPREVQKAEESKVPEDSLEECAITCSNSHGPCDSNQPHKNIKITFEEDEVNSTLVVDRESSHDECQDALNILPVPGPTSSATNVSMVVSAGPLSSEKAEMNILEINEKLRPQLAEKKQQFRNLKEKCFLTQLAGFLANQQNKYKYEECKDLIKSMLRNERQFKEEKLAEQLKQAEELRQYKVLVHAQERELTQLREKLREGRDASRSLNEHLQALLTPDEPDKSQGQDLQEQLAEGCRLAQHLVQKLSPENDNDDDEDVQVEVAEKVQKSSAPREMQKAEEKEVPEDSLEECAITCSNSHGPYDSNQPHRKTKITFEEDKVDSTLIGSSSHVEWEDAVHIIPENESDDEEEEEKGPVSPRNLQESEEEEVPQESWDEGYSTLSIPPEMLASYQSYSSTFHSLEEQQVCMAVDIGRHRWDQVKKEDQEATGPRLSRELLDEKGPEVLQDSLDRCYSTPSGCLELTDSCQPYRSAFYVLEQQRVGLAVDMDEIEKYQEVEEDQDPSCPRLSRELLDEKEPEVLQDSLDRCYSTPSGYLELPDLGQPYSSAVYSLEEQYLGLALDVDTELKRTKKRKKTKAHHAPGSAGSCWR

SEQ ID NO: 1033326 - protein, 921 aa, Homo sapiens; identical to SEQ ID NO: 1033323

SEQ ID NO: 1033327 - protein, 921 aa, Homo sapiens; identical to SEQ ID NO: 1033323

SEQ ID NO: 1033328 - protein, 762 aa, Homo sapiens
LAEQLKQAEELRQYKVLVHSQERELTQLKEKLQEGRDASRSLNEHLQALLTLDEPDKSQGQDLQEQLAEGCRLAQHLVQKLQPREVQKAEESKVPEDSLEECAITCSNSHGPCDSNQPHKNIKITFEEDEVNSTLVVDRESSHDECQDALNILSVPGPTSSATNVSMVVSAGPLSSEKAEMNILEINEKLRPQLAEKKQQFRNLKEKCFLTQLAGFLANQQNKYKYEECKDLIKSMLRNERQFKEEKLAEQLKQAEELRQYKVLVHAQERELTQLREKLREGRDASRSLNEHLQALLTPDEPDKSQGQDLQEQLAEGCRLAQHLVQKLSPENDNDDDEDVQVEVAEKVQKSSAPREMQKAEEKEVPEDSLEECAITCSNSHGPYDSNQPHRKTKITFEEDKVDSTLIGSSSHVEWEDAVHIIPENESDDEEEEEKGPVSPRNLQESEEEEVPQESWDEGYSTLSIPPEMLASYQSYSSTFHSLEEQQVCMAVDIGRHRWDQVKKEDQEATGPRLSRELLDEKGPEVLQDSLDRCYSTPSGCLELTDSCQPYRSAFYVLEQQRVGLAVDMDEIEKYQEVEEDQDPSCPRLSRELLDEKEPEVLQDSLDRCYSTPSGYLELPDLGQPYSSAVYSLEEQYLGLALDVDKIEKKGKGKKRRGRRSKKERRRGRKEGEEDQNPPCPRLNGVLMEVEEPEVLQDSLDRCYSTPSMYFELPDSFQHYRSVFYSFEEQHISFALYVDNRFFTLTVTSLHLVFQMGVIFPQ

SEQ ID NO: 1033329 - protein, 1156 aa, Homo sapiens
LAEQLKQAEELRQYKVLVHSQERELTQLKEKLQEGRDASRSLNEHLQALLTLDEPDKSQGQDLQEQLAEGCRLAQHLVQKLQPREVQKAEESKVPEDSLEECAITCSNSHGPCDSNQPHKNIKITFEEDEVNSTLVVDRESSHDECQDALNILSVPGPTSSATNVSMVVSAGPLSSEKAEMNILEINEKLRPQLAEKKQQFRNLKEKCFLTQLAGFLANQQNKYKYEECKDLIKSMLRNERQFKEEKLAEQLKQAEELRQYKVLVHAQERELTQLREKLREGRDASRSLNEHLQALLTPDEPDKSQGQDLQEQLAEGCRLAQHLVQKLSPENDNDDDEDVQVEVAEKVQKSSAPREMQKAEEKEVPEDSLEECAITCSNSHGPYDSNQPHRKTKITFEEDKVDSTLIGSSSHVEWEDAVHIIPENESDDEEEEEKGPVSPRNLQESEEEEVPQESWDEGYSTLSIPPEMLASYQSYSSTFHSLEEQQVCMAVDIGRHRWDQVKKEDQEATGPRLSRELLDEKGPEVLQDSLDRCYSTPSGCLELTDSCQPYRSAFYVLEQQRVGLAVDMDEIEKYQEVEEDQDPSCPRLSRELLDEKEPEVLQDSLDRCYSTPSGYLELPDLGQPYSSAVYSLEEQYLGLALDVDRIKKDQEEEEDQGPPCPRLSRELLEVVEPEVLQDSLDRCYSTPSSCLEQPDSCQPYGSSFYALEEKHVGFSLDVGEIEKKGKGKKRRGRRSKKERRRGRKEGEEDQNPPCPRLSRELLDEKGPEVLQDSLDRCYSTPSGCLELTDSCQPYRSAFYILEQQRVGLAVDMDEIEKYQEVEEDQDPSCPRLSGELLDEKEPEVLQESLDRCYSTPSGCLELTDSCQPYRSAFYILEQQRVGLAVDMDEIEKYQEVEEDQDPSCPRLSRELLDEKEPEVLQDSLDRCYSTPSGYLELPDLGQPYSSAVYSLEEQYLGLALDVDRIKKDQEEEEDQGPPCPRLSRELLEVVEPEVLQDSLDRCYSTPSSCLEQPDSCQPYGSSFYALEEKHVGFSLDVGEIEKKGKGKKRRGRRSKKERRRGRKEGEEDQNPPCPRLNGVLMEVEEPEVLQDSLDRCYSTPSMYFELPDSFQHYRSVFYSFEEQHISFALYVDNRFFTLTVTSLHLVFQMGVIFPQ

SEQ ID NO: 1033330 - protein, 688 aa, Homo sapiens; identical to SEQ ID NO: 1033320

SEQ ID NO: 1033331 - protein, 1156 aa, Homo sapiens; identical to SEQ ID NO: 1033329

SEQ ID NO: 1033332 - protein, 1156 aa, Homo sapiens; identical to SEQ ID NO: 1033329

SEQ ID NO: 1033333 - protein, 1156 aa, Homo sapiens; identical to SEQ ID NO: 1033329

SEQ ID NO: 1033334 - protein, 867 aa, Homo sapiens; identical to SEQ ID NO: 1033321

SEQ ID NO: 1033335 - protein, 792 aa, Homo sapiens
LAEQLKQAEELRQYKVLVHSQERELTQLKEKLQEGRDASRSLNEHLQALLTLDEPDKSQGQDLQEQLAEGCRLAQHLVQKLQPREVQKAEESKVPEDSLEECAITCSNSHGPCDSNQPHKNIKITFEEDEVNSTLVVDRESSHDECQDALNILSVPGPTSSATNVSMVVSAGPLSSEKAEMNILEINEKLRPQLAEKKQQFRNLKEKCFLTQLAGFLANQQNKYKYEECKDLIKSMLRNERQFKEEKLAEQLKQAEELRQYKVLVHAQERELTQLREKLREGRDASRSLNEHLQALLTPDEPDKSQGQDLQEQLAEGCRLAQHLVQKLSPENDNDDDEDVQVEVAEKVQKSSAPREMQKAEEKEVPEDSLEECAITCSNSHGPYDSNQPHRKTKITFEEDKVDSTLIGSSSHVEWEDAVHIIPENESDDEEEEEKGPVSPRNLQESEEEEVPQESWDEGYSTLSIPPEMLASYQSYSSTFHSLEEQQVCMAVDIGRHRWDQVKKEDQEATGPRLSRELLDEKGPEVLQDSLDRCYSTPSGCLELTDSCQPYRSAFYVLEQQRVGLAVDMDEIEKYQEVEEDQDPSCPRLSRELLDEKEPEVLQDSLDRCYSTPSGYLELPDLGQPYSSAVYSLEEQYLGLALDVDRIKKDQEEEEDQGPPCPRLSRELLEVVEPEVLQDSLDRCYSTPSSCLEQPDSCQPYGSSFYALEEKHVGFSLDVGEIEKKGKGKKRRGRRSKKERRRGRKEGEEDQNPPCPRPGSAGSCWMRKSLKSCRTHWIDVIRLLQVILNCLT

SEQ ID NO: 1033336 - protein, 688 aa, Homo sapiens; identical to SEQ ID NO: 1033320

SEQ ID NO: 1033337 - protein, 1081 aa, Homo sapiens
LAEQLKQAEELRQYKVLVHSQERELTQLKEKLQEGRDASRSLNEHLQALLTLDEPDKSQGQDLQEQLAEGCRLAQHLVQKLQPREVQKAEESKVPEDSLEECAITCSNSHGPCDSNQPHKNIKITFEEDEVNSTLVVDRESSHDECQDALNILSVPGPTSSATNVSMVVSAGPLSSEKAEMNILEINEKLRPQLAEKKQQFRNLKEKCFLTQLAGFLANQQNKYKYEECKDLIKSMLRNERQFKEEKLAEQLKQAEELRQYKVLVHAQERELTQLREKLREGRDASRSLNEHLQALLTPDEPDKSQGQDLQEQLAEGCRLAQHLVQKLSPENDNDDDEDVQVEVAEKVQKSSAPREMQKAEEKEVPEDSLEECAITCSNSHGPYDSNQPHRKTKITFEEDKVDSTLIGSSSHVEWEDAVHIIPENESDDEEEEEKGPVSPRNLQESEEEEVPQESWDEGYSTLSIPPEMLASYQSYSSTFHSLEEQQVCMAVDIGRHRWDQVKKEDQEATGPRLSRELLDEKGPEVLQDSLDRCYSTPSGCLELTDSCQPYRSAFYVLEQQRVGLAVDMDEIEKYQEVEEDQDPSCPRLSRELLDEKEPEVLQDSLDRCYSTPSGYLELPDLGQPYSSAVYSLEEQYLGLALDVDRIKKDQEEEEDQGPPCPRLSRELLEVVEPEVLQDSLDRCYSTPSSCLEQPDSCQPYGSSFYALEEKHVGFSLDVGEIEKKGKGKKRRGRRSKKERRRGRKEGEEDQNPPCPRLSGELLDEKEPEVLQESLDRCYSTPSGCLELTDSCQPYRSAFYILEQQRVGLAVDMDEIEKYQEVEEDQDPSCPRLSRELLDEKEPEVLQDSLDRCYSTPSGYLELPDLGQPYSSAVYSLEEQYLGLALDVDRIKKDQEEEEDQGPPCPRLSRELLEVVEPEVLQDSLDRCYSTPSSCLEQPDSCQPYGSSFYALEEKHVGFSLDVGEIEKKGKGKKRRGRRSKKERRRGRKEGEEDQNPPCPRLNGVLMEVEEPEVLQDSLDRCYSTPSMYFELPDSFQHYRSVFYSFEEQHISFALYVDNRFFTLTVTSLHLVFQMGVIFPQ

SEQ ID NO: 1033338 - protein, 663 aa, Homo sapiens
LAEQLKQAEELRQYKVLVHSQERELTQLKEKLQEGRDASRSLNEHLQALLTLDEPDKSQGQDLQEQLAEGCRLAQHLVQKAQPREVQKAEESKVPEDSLEECAITCSNSHGPCDSNQPHKNIKITFEEDEVNSTLVVDRESSHDECQDALNILPVPGPTSSATNVSMVVSAGPLSSEKAEMNILEINEKLRPQLAEKKQQFRNLKEKCFLTQLAGFLANQQNKYKYEECKDLIKSMLRNERQFKEEKLAEQLKQAEELRQYKVLVHAQERELTQLREKLREGRDASRSLNEHLQALLTPDEPDKSQGQDLQEQLAEGCRLAQHLVQKLSPENDNDDDEDVQVEVAEKVQKSSAPREMQKAEEKEVPEDSLEECAITCSNSHGPYDSNQPHRKTKITFEEDKVDSTLIGSSSHVEWEDAVHIIPENESDDEEEEEKGPVSPRNLQESEEEEVPQESWDEGYSTLSIPPEMLASYQSYSSTFHSLEEQQVCMAVDIGRHRWDQVKKEDQEATGPRLSRELLDEKGPEVLQDSLDRCYSTPSGCLELTDSCQPYRSAFYVLEQQRVGLAVDMDEIEKYQEVEEDQDPSCPRLSRELLDEKEPEVLQDSLDRCYSTPSGYLELPDLGQPYSSAVYSLEEQYLGLALDVDRIKKDQEEEEDQGPPCPR

SEQ ID NO: 1033339 - protein, 1155 aa, Homo sapiens
LAEQLKQAEELRQYKVLVHSQERELTQLKEKLQEGRDASRSLNEHLQALLTLDEPDKSQGQDLQEQLAEGCRLAQHLVQKLQPREVQKAEESKVPEDSLEECAITCSNSHGPCDSNQPHKNIKITFEEDEVNSTLVVDRESSHDECQDALNILSVPGPTSSATNVSMVVSAGPLSSEKAEMNILEINEKLRPQLAEKKQQFRNLKEKCFLTQLAGFLANQQNKYKYEECKDLIKSMLRNERQFKEEKLAEQLKQAEELRQYKVLVHAQERELTQLREKLREGRDASRSLNEHLQALLTPDEPDKSQGQDLQEQLAEGCRLAQHLVQKLSPENDNDDDEDVQVEVAEKVQKSSAPREMQKAEEKEVPEDSLEECAITCSNSHGPYDSNQPHRKTKITFEEDKVDSTLIGSSSHVEWEDAVHIIPENESDDEEEEEKGPVSPRNLQESEEEEVPQESWDEGYSTLSIPPEMLASYQSYSSTFHSLEEQQVCMAVDIGRHRWDQVKKEDQEATGPRLSRELLDEKGPEVLQDSLDRCYSTPSGCLELTDSCQPYRSAFYVLEQQRVGLAVDMDEIEKYQEVEEDQDPSCPRLSRELLDEKEPEVLQDSLDRCYSTPSGYLELPDLGQPYSSAVYSLEEQYLGLALDVDRIKKDQEEEEDQGPPCPRLSRELLEVVEPEVLQDSLDRCYSTPSSCLEQPDSCQPYGSSFYALEEKHVGFSLDVGEIEKKGKGKKRRGRRSKKERRRGRKEGEEDQNPPCPRLSRELLDEKGPEVLQDSLDRCYSTPSGCLELTDSCQPYRSAFYILEQQRVGLAVDMDEIEKYQEVEEDQDPSCPRLSGELLDEKEPEVLQESLDRCYSTPSGCLELTDSCQPYRSAFYILEQQRVGLAVDMDEIEKYQEVEEDQDPSCPRLSRELLDEKEPEVLQDSLDRCYSTPSGYLELPDLGQPYSSAVYSLEEQYLGLALDVDRIKRTKKRKKTKATMPQVSRELLEVVEPEVLQDSLDRCYSTPSSCLEQPDSCQPYGSSFYALEEKHVGFSLDVGEIEKKGKGKKRRGRRSKKERRRGRKEGEEDQNPPCPRLNGVLMEVEEPEVLQDSLDRCYSTPSMYFELPDSFQHYRSVFYSFEEQHISFALYVDNRFFTLTVTSLHLVFQMGVIFPQ

SEQ ID NO: 1033340 - protein, 616 aa, Homo sapiens
LAEQLKQAEELRQYKVLVHSQERELTQLKEKLQEGRDASRSLNEHLQALLTLDEPDKSQGQDLQEQLAEGCRLAQHLVQKAQPREVQKAEESKVPEDSLEECAITCSNSHGPCDSNQPHKNIKITFEEDEVNSTLVVDRESSHDECQDALNILPVPGPTSSATNVSMVVSAGPLSSEKAEMNILEINEKLRPQLAEKKQQFRNLKEKCFLTQLAGFLANQQNKYKYEECKDLIKSMLRNERQFKEEKLAEQLKQAEELRQYKVLVHAQERELTQLREKLREGRDASRSLNEHLQALLTPDEPDKSQGQDLQEQLAEGCRLAQHLVQKLSPENDNDDDEDVQVEVAEKVQKSSAPREMQKAEEKEVPEDSLEECAITCSNSHGPYDSNQPHRKTKITFEEDKVDSTLIGSSSHVEWEDAVHIIPENESDDEEEEEKGPVSPRNLQESEEEEVPQESWDEGYSTLSIPPEMLASYQSYSSTFHSLEEQQVCMAVDIGRHRWDQVKKEDQEATGPRLSRELLDEKGPEVLQDSLDRCYSTPSGCLELTDSCQPYRSAFYVLEQQRVGLAVDMDEIEKYQEVEEDQDPSCPRLSRELLDEKEPEVLQDSLDMLFNSFRLS

SEQ ID NO: 1033341 - protein, 688 aa, Homo sapiens; identical to SEQ ID NO: 1033320

SEQ ID NO: 1033342 - protein, 668 aa, Homo sapiens
LAEQLKQAEELRQYKVLVHSQERELTQLKEKLQEGRDASRSLNEHLQALLTLDEPDKSQGQDLQEQLAEGCRLAQHLVQKAQPREVQKAEESKVPEDSLEECAITCSNSHGPCDSNQPHKNIKITFEEDEVNSTLVVDRESSHDECQDALNILPVPGPTSSATNVSMVVSAGPLSSEKAEMNILEINEKLRPQLAEKKQQFRNLKEKCFLTQLAGFLANQQNKYKYEECKDLIKSMLRNERQFKEEKLAEQLKQAEELRQYKVLVHAQERELTQLREKLREGRDASRSLNEHLQALLTPDEPDKSQGQDLQEQLAEGCRLAQHLVQKLSPENDNDDDEDVQVEVAEKVQKSSAPREMQKAEEKEVPEDSLEECAITCSNSHGPYDSNQPHRKTKITFEEDKVDSTLIGSSSHVEWEDAVHIIPENESDDEEEEEKGPVSPRNLQESEEEEVPQESWDEGYSTLSIPPEMLASYQSYSSTFHSLEEQQVCMAVDIGRHRWDQVKKEDQEATGPRLSRELLDEKGPEVLQDSLDRCYSTPSGCLELTDSCQPYRSAFYVLEQQRVGLAVDMDEIEKYQEVEEDQDPSCPRLSRELLDEKEPEVLQDSLDRCYSTPSGYLELPDLGQPYSSAVYSLEEQYLGLALDVDRIKKDQEEEEDQGPPCPQQGAAG

SEQ ID NO: 1033343 - protein, 843 aa, Homo sapiens
LAEQLKQAEELRQYKVLVHSQERELTQLKEKLQEGRDASRSLNEHLQALLTLDEPDKSQGQDLQEQLAEGCRLAQHLVQKAQPREVQKAEESKVPEDSLEECAITCSNSHGPCDSNQPHKNIKITFEEDEVNSTLVVDRESSHDECQDALNILPVPGPTSSATNVSMVVSAGPLSSEKAEMNILEINEKLRPQLAEKKQQFRNLKEKCFLTQLAGFLANQQNKYKYEECKDLIKSMLRNERQFKEEKLAEQLKQAEELRQYKVLVHAQERELTQLREKLREGRDASRSLNEHLQALLTPDEPDKSQGQDLQEQLAEGCRLAQHLVQKLSPENDNDDDEDVQVEVAEKVQKSSAPREMQKAEEKEVPEDSLEECAITCSNSHGPYDSNQPHRKTKITFEEDKVDSTLIGSSSHVEWEDAVHIIPENESDDEEEEEKGPVSPRNLQESEEEEVPQESWDEGYSTLSIPPEMLASYQSYSSTFHSLEEQQVCMAVDIGRHRWDQVKKEDQEATGPRLSRELLDEKGPEVLQDSLDRCYSTPSGCLELTDSCQPYRSAFYVLEQQRVGLAVDMDEIEKYQEVEEDQDPSCPRLSRELLDEKEPEVLQDSLDRCYSTPSGYLELPDLGQPYSSAVYSLEEQYLGLALDVDRIKKDQEEEEDQGPPCPRLSRELLEVVEPEVLQDSLDRCYSTPSSCLEQPDSCQPYGSSFYALEEKHVGFSLDVGEIEKKGKGKKRRGRRSKKERRRGRKEGEEDQNPPCPRLSRELLDEKGPEVLQDSLDRCYSTPSGCLELTDSCQPYRSAFYILEQQRVGLAVDMDEIEKYQEVEEDQDPSCPRTFSNCGCLILC

SEQ ID NO: 1033344 - protein, 1156 aa, Homo sapiens; identical to SEQ ID NO: 1033329

SEQ ID NO: 1033345 - protein, 1156 aa, Homo sapiens; identical to SEQ ID NO: 1033329

SEQ ID NO: 1033346 - protein, 1156 aa, Homo sapiens; identical to SEQ ID NO: 1033329

SEQ ID NO: 1033347 - protein, 1156 aa, Homo sapiens; identical to SEQ ID NO: 1033329

SEQ ID NO: 1033348 - protein, 932 aa, Homo sapiens
LAEQLKQAEELRQYKVLVHSQERELTQLKEKLQEGRDASRSLNEHLQALLTLDEPDKSQGQDLQEQLAEGCRLAQHLVQKAQPREVQKAEESKVPEDSLEECAITCSNSHGPCDSNQPHKNIKITFEEDEVNSTLVVDRESSHDECQDALNILPVPGPTSSATNVSMVVSAGPLSSEKAEMNILEINEKLRPQLAEKKQQFRNLKEKCFLTQLAGFLANQQNKYKYEECKDLIKSMLRNERQFKEEKLAEQLKQAEELRQYKVLVHAQERELTQLREKLREGRDASRSLNEHLQALLTPDEPDKSQGQDLQEQLAEGCRLAQHLVQKLSPENDNDDDEDVQVEVAEKVQKSSAPREMQKAEEKEVPEDSLEECAITCSNSHGPYDSNQPHRKTKITFEEDKVDSTLIGSSSHVEWEDAVHIIPENESDDEEEEEKGPVSPRNLQESEEEEVPQESWDEGYSTLSIPPEMLASYQSYSSTFHSLEEQQVCMAVDIGRHRWDQVKKEDQEATGPRLSRELLDEKGPEVLQDSLDRCYSTPSGCLELTDSCQPYRSAFYVLEQQRVGLAVDMDEIEKYQEVEEDQDPSCPRLSRELLDEKEPEVLQDSLDRCYSTPSGYLELPDLGQPYSSAVYSLEEQYLGLALDVDRIKKDQEEEEDQGPPCPRLSRELLEVVEPEVLQDSLDRCYSTPSSCLEQPDSCQPYGSSFYALEEKHVGFSLDVGEIEKKGKGKKRRGRRSKKERRRGRKEGEEDQNPPCPRLSRELLDEKGPEVLQDSLDRCYSTPSGCLELTDSCQPYRSAFYILEQQRVGLAVDMDEIEKYQEVEEDQDPSCPRLSGELLDEKEPEVLQESLDRCYSTPSGCLELTDSCQPYRSAFYILEQQRVGLAVDMDRIKKDQEEEEDQGPPCPRLSRELLEVVEPEVLQLTDRGAELDS

SEQ ID NO: 1033349 - protein, 688 aa, Homo sapiens; identical to SEQ ID NO: 1033320

SEQ ID NO: 1033350 - protein, 921 aa, Homo sapiens; identical to SEQ ID NO: 1033323

SEQ ID NO: 1033351 - protein, 921 aa, Homo sapiens; identical to SEQ ID NO: 1033323

SEQ ID NO: 1033352 - protein, 921 aa, Homo sapiens; identical to SEQ ID NO: 1033323

SEQ ID NO: 1033353 - protein, 867 aa, Homo sapiens; identical to SEQ ID NO: 1033321

SEQ ID NO: 1033354 - protein, 768 aa, Homo sapiens
LAEQLKQAEELRQYKVLVHSQERELTQLKEKLQEGRDASRSLNEHLQALLTLDEPDKSQGQDLQEQLAEGCRLAQHLVQKLQPREVQKAEESKVPEDSLEECAITCSNSHGPCDSNQPHKNIKITFEEDEVNSTLVVDRESSHDECQDALNILSVPGPTSSATNVSMVVSAGPLSSEKAEMNILEINEKLRPQLAEKKQQFRNLKEKCFLTQLAGFLANQQNKYKYEECKDLIKSMLRNERQFKEEKLAEQLKQAEELRQYKVLVHAQERELTQLREKLREGRDASRSLNEHLQALLTPDEPDKSQGQDLQEQLAEGCRLAQHLVQKLSPENDNDDDEDVQVEVAEKVQKSSAPREMQKAEEKEVPEDSLEECAITCSNSHGPYDSNQPHRKTKITFEEDKVDSTLIGSSSHVEWEDAVHIIPENESDDEEEEEKGPVSPRNLQESEEEEVPQESWDEGYSTLSIPPEMLASYQSYSSTFHSLEEQQVCMAVDIGRHRWDQVKKEDQEATGPRLSRELLDEKGPEVLQDSLDRCYSTPSGCLELTDSCQPYRSAFYVLEQQRVGLAVDMDEIEKYQEVEEDQDPSCPRLSRELLDEKEPEVLQDSLDRCYSTPSGYLELPDLGQPYSSAVYSLEEQYLGLALDVDRIKKDQEEEEDQGPPCPRLSRELLEVVEPEVLQDSLDRCYSTPSSCLEQPDSCQPYGSSFYALEEKHVGFSLDVGEIEKKGKGKKRRGRRSKKERRRGRKEGEEDQNPPCPRTFSNCGCLILC

SEQ ID NO: 1033355 - protein, 688 aa, Homo sapiens; identical to SEQ ID NO: 1033320

SEQ ID NO: 1033356 - protein, 921 aa, Homo sapiens; identical to SEQ ID NO: 1033323

SEQ ID NO: 1033357 - protein, 104 aa, Homo sapiens
MPRVAPNTRNTYHQHELPLSAHPPPKALPAGFDGVMSHRKFSAPRHGSLGFLPRKRSSRHRGKVKSFPKDDPSKPVHLTAFLGYKAGMTHIVRECRQAGIQGEQ

SEQ ID NO: 1033358 - protein, 133 aa, Homo sapiens
MARSSWRKDFSSMKKYCQVIRVIAHTQMRLLPLRQKKAHLMEIQVNGGTVAEKLDWARERLEQQVPVNQVFGQDEMIDVMDEIIHLIRGSQGAGFKRGTNSVGPPRCPKRHPGLAKGGLYWGLDPLRSFSWGP

SEQ ID NO: 1033359 - protein, 104 aa, Homo sapiens; identical to SEQ ID NO: 1033357

SEQ ID NO: 1033360 - protein, 104 aa, Homo sapiens; identical to SEQ ID NO: 1033357

SEQ ID NO: 1033361 - protein, 104 aa, Homo sapiens; identical to SEQ ID NO: 1033357

SEQ ID NO: 1033362 - protein, 104 aa, Homo sapiens
MLKGCVVGTQKEAGAHPLGGFVHYGEVTNDFVMLKGCVVGTKKRVLTLRKSLLVQTKRRALEKIDLKFIDTTSKFGHGRFQTMEEKKAFMGPLKKDRIAKEEGA

SEQ ID NO: 1033363 - protein, 274 aa, Homo sapiens
MTHESCGLVDAKTASSYNEFWANTQFLKKVHGLFNQRYLRRDYCAGMMAWHTYTLLGKDVVGLNTYCLWLVRVIAHTQMRLLPLRQKKAHLMEIQVNGGTVAEKLDWARERLEQQVPVNQVFGQDEMIDVIGVTKGKGYKGVTSRWHTKKLPRKTHRGLRKVACIGAWHPARVAFSVARAGQKGYHHRTEINKKIYKIGQGYLIKDGKLIKNNASTDYDLSDKSINPLGGFVHYGEVTNDFVMLKGCVVGTQKAGAHPPQVLAGADEAAGSGED

SEQ ID NO: 1033364 - protein, 123 aa, Homo sapiens
MANWVARRLQTSTGGSPGGTKAHVEGTWKSGNWVPITCAGFEAPRCAAQKGGPVNDKREGFQTAEDTSFSGTNQPRKGKRPWTPTVHHGSPPIAWTGPPCPGPKRARGPRGLPARGGATWGTF

SEQ ID NO: 1033365 - protein, 88 aa, Homo sapiens
RCSGVSSYGEDDPMTFLAEEAVWWEQKRVLTLRKSLLVQTKRRALEKIDLKFIDTTSKFGHGRFQTMEEKKAFMGPLKKDRIAKEEGA

SEQ ID NO: 1033366 - protein, 104 aa, Homo sapiens; identical to SEQ ID NO: 1033362

SEQ ID NO: 1033367 - protein, 223 aa, Homo sapiens
MARSSWRKDFSSMKKYCQVIRVIAHTQMRLLPLRQKKAHLMEIQVNGGTVAEKLDWARERLEQQVPVNQVFGQDEMIDVIGVTKGKGYKGVTSRWHTKKLPRKTHRGLRKVACIGAWHPARVAFSVARAGQKGYHHRTEINKKIYKIGQGYLIKDGKLIKNNASTDYDLSDKSINPLGGFVHYGEVTNDFVMLKGCVVGTQKAGAHPPQVLAGADEAAGSGED

SEQ ID NO: 1033368 - protein, 104 aa, Homo sapiens; identical to SEQ ID NO: 1033357

SEQ ID NO: 1033369 - protein, 655 aa, Homo sapiens
MTNFISGLQRLHGMLEFLRPSSSNHSVGPMRTRRRVSASRRARAGGSQRTDSARLRAPLDAYFQVSRTQPDLPATTYDSETRNPVSEELQVSSSSDSDSDSSAEYGGVVDQAEESGAVILEEQLAGVSAEQEVTCIDGGKTLPKQPSPQKSEPLLPSASMDEEEGDTCTICLEQWTNAGDHRLSALRCGHLFGYRCISTWLKGQVRKCPQCNKKARHSDIVVLYARTLRALDTSEQERMKSSLLKEQMLRKQAELESAQCRLQLQVLTDKCTRLQRRVQDLQKLTSHQSQNLQQPRGSQAWVLSCSPSSQGQHKHKYHFQKTFTVSQAGNCRIMAYCDALSCLVISQPSPQASFLPGFGVKMLSTANMKSSQYIPMHGKQIRGLAFSSYLRGLLLSASLDNTIKLTSLETNTVVQTYNAGRPVWSCCWCLDEANYIYAGLANGSILVYDVRNTSSHVQELVAQKARCPLVSLSYMPRAASAAFPYGGVLAGTLEDASFWEQKMDFSHWPHVLPLEPGGCIDFQTENSSRHCLVTYRPDKNHTTIRSVLMEMSYRLDDTGNPICSCQPVHTFFGGPTCKLLTKNAIFQSPENDGNILVCTGDEAANSALLWDAASGSLLQDLQTDQPVLDICPFEVNRNSYLATLTEKMVHIYKWE

SEQ ID NO: 1033370 - protein, 69 aa, Homo sapiens
LPEPACLAADALSADSTRSAWFRPLSAYVVRGPYVLRPVETQALSVRGDTPFDMLMIKSGCPGLVSVAE

SEQ ID NO: 1033371 - protein, 294 aa, Homo sapiens [sequence omitted]

SEQ ID NO: 1033372 - protein, 692 aa, Homo sapiens
MAHEAMEYDVQVQLNHAEQQPAPAGMASSQGGPALLQPVPADVVSSQEVPSILQPAPAEVISSQATPPLLQPAPQLSVDLTEVEVLGEDTVENINPRTSEQHRQGSDGNHTIPASSLHSMTNFISGLQRLHGMLEFLRPSSSNHSVGPMRTRRRVSASRRARAGGSQRTDSARLRAPLDAYFQVSRTQPDLPATTYDSETRNPVSEELQVSSSSDSDSDSSAEYGGVVDQAEESGAVILEEQLAGVSAEQEVTCIDGGKTLPKQPSPQKSEPLLPSASMDEEEGDTCTICLEQWTNAGDHRLSALRCGHLFGYRCISTWLKGQVRKCPQCNKKARHSDIVVLYARTLRALDTSEQERMKSSLLKEQMLRKQAELESAQCRLQLQVLTDKCTRLQRRVQDLQKLTSHQSQNLQQPRGSQAWVLSCSPSSQGQHKHKYHFQKTFTVSQAGNCRIMAYCDALSCLVISQPSPQASFLPGFGVKMLSTANMKSSQYIPMHGKQIRGLAFSSYLRGLLLSASLDNTIKLTSLETNTVVQTYNAGRPVWSCCWCLDEANYIYAGLANGSILVYDVRNTSSHVQELVAQKARCPLVSLSYMPRAASAAFPYGGVLAGTLEDASFWEQKMDFSHWPHVLPLEPGGCIDFQTENSSRHCLVTYRPDKNHTTIRSVLMEMSYRLDDTGLGLLASSNPPTSAS

SEQ ID NO: 1033373 - protein, 417 aa, Homo sapiens
MKSSLLKEQMLRKQAELESAQCRLQLQVLTDKCTRLQRRVQDLQKLTSHQSQNLQQPRGSQAWVLSCSPSSQGQHKHKYHFQKTFTVSQAGNCRIMAYCDALSCLVISQPSPQASFLPGFGVKMLSTANMKSSQYIPMHGKQIRGLAFSSYLRGLLLSASLDNTIKLTSLETNTVVQTYNAGRPVWSCCWCLDEANYIYAGLANGSILVYDVRNTSSHVQELVAQKARCPLVSLSYMPRAASAAFPYGGVLAGTLEDASFWEQKMDFSHWPHVLPLEPGGCIDFQTENSSRHCLVTYRPDKNHTTIRSVLMEMSYRLDDTGNPICSCQPVHTFFGGPTCKLLTKNAIFQSPENDGNILVCTGDEAANSALLWDAASGSLLQDLQTDQPVLDICPFEVNRNSYLATLTEKMVHIYKWE

SEQ ID NO: 1033374 - protein, 417 aa, Homo sapiens; identical to SEQ ID NO: 1033373

SEQ ID NO: 1033375 - protein, 417 aa, Homo sapiens; identical to SEQ ID NO: 1033373

SEQ ID NO: 1033376 - protein, 266 aa, Homo sapiens
MVFDFLNAVVKVFCNIHSLETNTVVQTYNAGRPVWSCCWCLDEANYIYAGLANGSILVYDVRNTSSHVQELVAQKARCPLVSLSYMPRAASAAFPYGGVLAGTLEDASFWEQKMDFSHWPHVLPLEPGGCIDFQTENSSRHCLVTYRPDKNHTTIRSVLMEMSYRLDDTGNPICSCQPVHTFFGGPTCKLLTKNAIFQSPENDGNILVCTGDEAANSALLWDAASGSLLQDLQTDQPVLDICPFEVNRNSYLATLTEKMVHIYKWE

SEQ ID NO: 1033377 - protein, 762 aa, Homo sapiens
RSGCWRSPGGGEGCRCLGRRIPEGVVSAPPRPPSPQIAHRSSCVHPRSRQPLAPGLAGRVSGIMCGIFAYLNYHVPRTRREILETLIKGLQRLEYRGYDSAGVGFDGGNDKDWEANACKIQLIKKKGKVKALDEEVHKQQDMDLDIEFDVHLGIAHTRWATHGEPSPVNSHPQRSDKNNEFIVIHNGIITNYKDLKKFLESKGYDFESETDTETIAKLVKYMYDNRESQDTSFTTLVERVIQQLEGAFALVFKSVHFPGQAVGTRRGSPLLIGVRSEHKLSTDHIPILYRTARTQIGSKFTRWGSQGERGKDKKGSCNLSRVDSTTCLFPVEEKAVEYYFASDASAVIEHTNRVIFLEDDDVAAVVDGRLSIHRIKRTAGDHPGRAVQTLQMELQQIMKGNFSSFMQKEIFEQPESVVNTMRGRVNFDDYTVNLGGLKDHIKEIQRCRRLILIACGTSYHAGVATRQVLEELTELPVMVELASDFLDRNTPVFRDDVCFFLSQSGETADTLMGLRYCKERGALTVGITNTVGSSISRETDCGVHINAGPEIGVASTKAYTSQFVSLVMFALMMCDDRISMQERRKEIMLGLKRLPDLIKEVLSMDDEIQKLATELYHQKSVLIMGRGYHYATCLEGALKIKEITYMHSEGILAGELKHGPLALVDKLMPVIMIIMRDHTYAKCQNALQQVVARQGRPVVICDKEDTETIKNTKRTIKVPHSVDCLQGILSVIPLQLLAFHLAVLRGYDVDFPRNLAKSVTVE

SEQ ID NO: 1033378 - protein, 681 aa, Homo sapiens
MCGIFAYLNYHVPRTRREILETLIKGLQRLEYRGYDSAGVGFDGGNDKDWEANACKTQLIKKKGKVKALDEEVHKQQDMDLDIEFDVHLGIAHTRWATHGEPSPVNSHPQRSDKNNEFIVIHNGIITNYKDLKKFLESKGYDFESETDTETIAKLVKYMYDNRESQDTSFTTLVERVIQQLEGAFALVFKSVHFPGQAVGTRRGSPLLIGVRSEHKLSTDHIPILYRTGKDKKGSCNLSRVDSTTCLFPVEEKAVEYYFASDASAVIEHTNRVIFLEDDDVAAVVDGRLSIHRIKRTAGDHPGRAVQTLQMELQQIMKGNFSSFMQKEIFEQPESVVNTMRGRVNFDDYTVNLGGLKDHIKEIQRCRRLILIACGTSYHAGVATRQVLEELTELPVMVELASDFLDRNTPVFRDDVCFFLSQSGETADTLMGLRYCKERGALTVGITNTVGSSISRETDCGVHINAGPEIGVASTKAYTSQFVSLVMFALMMCDDRISMQERRKEIMLGLKRLPDLIKEVLSMDDEIQKLATELYHQKSVLIMGRGYHYATCLEGALKIKEITYMHSEGILAGELKHGPLALVDKLMPVIMIIMRDHTYAKCQNALQQVVARQGRPVVICDKEDTETIKNTKRTIKVPHSVDCLQGILSVIPLQLLAFHLAVLRGYDVDFPRNLAKSVTVE

SEQ ID NO: 1033379 - protein, 639 aa, Homo sapiens
RSGCWRSPGGGEGCRCLGRRIPEGVVSAPPRPPSPQIAHRSSCVHPRSRQPLAPGLAGRVSGIMCGIFAYLNYHVPRTRREILETLIKGLQRLEYRGYDSAGVGFDGGNDKDWEANACKIQLIKKKGKVKALDEEVHKQQDMDLDIEFDVHLGIAHTRWATHGEPSPVNSHPQRSDKNNEFIVIHNGIITNYKDLKKFLESKGYDFESETDTETIAKLVKYMYDNRESQDTSFTTLVERVIQQLEGAFALVFKSVHFPGQAVGTRRGSPLLIGVRSEHKLSTDHIPILYRTGKDKKGSCNLSRVDSTTCLFPVEEKAVEYYFASDASAVIEHTNRVIFLEDDDVAAVVDGRLSIHRIKRTAGDHPGRAVQTLQMELQQIMKGNFSSFMQKEIFEQPESVVNTMRGRVNFDDYTVNLGGLKDHIKEIQRCRRLILIACGTSYHAGVATRQVLEELTELPVMVELASDFLDRNTPVFRDDVCFFLSQSGETADTLMGLRYCKERGALTVGITNTVGSSISRETDCGVHINAGPEIGVASTKAYTSQFVSLVMFALMMCDDRISMQERRKEIMLGLKRLPDLIKEVLSMDDEIQKLATELYHQKSVLIMGRGYHYATCLEGALKIKEITYMHSEGILAALLC

SEQ ID NO: 1033380 - protein, 681 aa, Homo sapiens; identical to SEQ ID NO: 1033378

SEQ ID NO: 1033381 - protein, 112 aa, Homo sapiens
RGGCWRSPGGGEGCRCLGRRIPEGVVSAPPRPPSPQIAHRSSCVHPRSRQPLAPGLAGRVSGIMCGIFAYLNYHVPRTRREILETLIKGLQRLEYRGYDSAGTLKKILMDFA

SEQ ID NO: 1033382 - protein, 798 aa, Homo sapiens
RGGCWRSPGGGEGCRCLGRRIPEGVVSAPPRPPSPQIAHRSSCVHPRSRQPLAPGLAGRVSGIMCGIFAYLNYHVPRTRREILETLIKGLQRLEYRGYDSADLSPKLYSRPPTSFFLDDHDILNFACSKIELRPGVVTTPVIPALWEAEVDGSLGGVGFDGGNDKDWEANACKIQLIKKKGKVKALDEEVHKQQDMDLDIEFDVHLGIAHTRWATHGEPSPVNSHPQRSDKNNEFIVIHNGIITNYKDLKKFLESKGYDFESETDTETIAKLVKYMYDNRESQDTSFTTLVERVIQQLEGAFALVFKSVHFPGQAVGTRRGSPLLIGVRSEHKLSTDHIPILYRTGKDKKGSCNLSRVDSTTCLFPVEEKAVEYYFASDASAVIEHTNRVIFLEDDDVAAVVDGRLSIHRIKRTAGDHPGRAVQTLQMELQQIMKGNFSSFMQKEIFEQPESVVNTMRGRVNFDDYTVNLGGLKDHIKEIQRCRRLILIACGTSYHAGVATRQVLEELTELPVMVELASDFLDRNTPVFRDDVCFFLSQSGETADTLMGLRYCKERGALTVGITNTVGSSISRETDCGVHINAGPEIGVASTKAYTSQFVSLVMFALMMCDDRISMQERRKEIMLGLKRLPDLIKEVLSMDDEIQKLATELYHQKSVLIMGRGYHYATCLEGALKIKEITYMHSEGILAGELKHGPLALVDKLMPVIMIIMRDHTYAKCQNALQQVVARQGRPVVICDKEDTETIKNTKRTIKVPHSVDCLQGILSVIPLQLLAFHLAVLRGYDVDFPRNLAKSVTVE

SEQ ID NO: 1033383 - protein, 681 aa, Homo sapiens; identical to SEQ ID NO: 1033378

SEQ ID NO: 1033384 - protein, 768 aa, Homo sapiens
SSGINAECPLRPEESLRRSVGTVWVSESKPTLLTITYNPFLFKMPEEVHHGEEEVETFAFQAEIAQLMSLIINTFYSNKEIFLRELISNASDALDKIRYESLTDPSKLDSGKELKIDIIPNPQERTLTLVDTGIGMTKADLINNLGTIAKSGTKAFMEALQAGADISMIGQFGVGFYSAYLVAEKVVVITKHNDDEQYAWESSAGGSFTVRADHGEPIGRGTKVILHLKEDQTEYLEERRVKEVVKKHSQFIGYPITLYLEKEREKEISDDEAEEEKGEKEEEDKDDEEKPKIEDVGSDEEDDSGKDKKKKTKKIKEKYIDQEELNKTKPIWTRNPDDITQEEYGEFYKSLTNDWEDHLAVKHFSVEGQLEFRALLFIPRRAPFDLFENKKKKNNIKLYVRRVFIMDSCDELIPEYLNFIRGVVDSEDLPLNISREMLQQSKILKVIRKTHCQEGALSSSLSWQKTRENYKKFYEAFSKNLKLGIHEDSTNRRRLSELLRYHTSQSGDEMTSLSEYVSRMKETQKSIYYITGESKEQVANSAFVERVRKRGFEVVYMTEPIDEYCVQQLKEFDGKSLVSVTKEGLELPEDEEEKKKMEESKAKFENLCKLMKEILDKKVEKVTISNRLVSSPCCIVTSTYGWTANMERIMKAQALRDNSTMGYMMAKKHLEINPDHPIVETLRQKAEADKNDKAVKDLVVLLFETALLSSGFSLEDPQTHSNRIYRMIKLGLGIDEDEVAAEEPNAAVPDEIPPLEGDEDASRMEEVD

SEQ ID NO: 1033385 - protein, 292 aa, Homo sapiens
ANGCARDSDVETPLNGFGWSELLRYHTSQSGDEMTSLSEYVSRMKETQKSIYYITGESKEQVANSAFVERVRKRGFEVVYMTEPIDEYCVQQLKEFDGKSLVSVTKEGLELPEDEEEKKKMEESKAKFENLCKLMKEILDKKVEKVTISNRLVSSPCCIVTSTYGWTANMERIMKAQALRDNSTMGYMMAKKHLEINPDHPIVETLRQKAEADKNDKAVKDLVVLLFETALLSSGFSLEDPQTHSNRIYRMIKLGLGIDEDEVAAEEPNAAVPDEIPPLEGDEDASRMEEVD

SEQ ID NO: 1033386 - protein, 768 aa, Homo sapiens; identical to SEQ ID NO: 1033384

SEQ ID NO: 1033387 - protein, 619 aa, Homo sapiens
SSGINAECPLRPEESLRRSVGTVWVSESKPTLLTITYNPFLFKMPEEVHHGEEEVETFAFQAEIAQLMSLIINTFYSNKEIFLRELISNASDALDKIRYESLTDPSKLDSGKELKIDIIPNPQERTLTLVDTGIGMTKADLINNLGTIAKSGTKAFMEALQAGADISMIGQFGVGFYSAYLVAEKVVVITKHNDDEQYAWESSAGGSFTVRADHGEPIGRGTKVILHLKEDQTEYLEERRVKEVVKKHSQFIGYPITLYLEKEREKEISDDEAEEEKGEKEEEDKDDEEKPKIEDVGSDEEDDSGKDKKKKTKKIKEKYIDQEELNKTKPIWTRNPDDITQEEYGEFYKSLTNDWEDHLAVKHFSVEGQLEFRALLFIPRRAPFDLFENKKKKNNIKLYVRRVFIMDSCDELIPEYLNFIRGVVDSEDLPLNISREMLQQSKILKVIRKTHCQEGALSSSLSWQKTRENYKKFYEAFSKNLKLGIHEDSTNRRRLSELLRYHTSQSGDEMTSLSEYVSRMKETQKSIYYITGESKEQVANSAFVERVPRAPVPPGSPCWCLVFFSLSCPCVEGSKLRVSSPIPSLLLTAGLDVGYWGLFYSAFVLNKCTGAAGVVWGWG

SEQ ID NO: 1033388 - protein, 624 aa, Homo sapiens
  misc_feature (595)..(595): Xaa can be any naturally occurring amino acid
SSGINAECPLRPEESLRRSVGTVWVSESKPTLLTITYNPFLFKMPEEVHHGEEEVETFAFQAEIAQLMSLIINTFYSNKEIFLRELISNASDALDKIRYESLTDPSKLDSGKELKIDIIPNPQERTLTLVDTGIGMTKADLINNLGTIAKSGTKAFMEALQAGADISMIGQFGVGFYSAYLVAEKVVVITKHNDDEQYAWESSAGGSFTVRADHGEPIGRGTKVILHLKEDQTEYLEERRVKEVVKKHSQFIGYPITLYLEKEREKEISDDEAEEEKGEKEEEDKDDEEKPKIEDVGSDEEDDSGKDKKKKTKKIKEKYIDQEELNKTKPIWTRNPDDITQEEYGEFYKSLTNDWEDHLAVKHFSVEGQLEFRALLFIPRRAPFDLFENKKKKNNIKLYVRRVFIMDSCDELIPEYLNFIRGVVDSEDLPLNISREMLQQSKILKVIRKTHCQEGALSSSLSWQKTRENYKKFYEAFSKNLKLGIHEDSTNRRRLSELLRYHTSQSGDEMTSLSEYVSRMKETQKSIYYITGESKEQVANSAFVERVRKRGFEVVYMTEPIDEYCVQQLKEFDGKSLVSVTKEGLELPEDEEEKXERNLGQRRSQSAKFENLCNGLQLEKTEKS

SEQ ID NO: 1033389 - protein, 148 aa, Homo sapiens
AESARTTLGWSVIDLQVLFGHYIANMERIMKAQALRDNSTMGYMMAKKHLEINPDHPIVETLRQKAEADKNDKAVKDLVVLLFETALLSSGFSLEDPQTHSNRIYRMIKLGLGIDEDEVAAEEPNAAVPDEIPPLEGDEDASRMEEVD

SEQ ID NO: 1033390 - protein, 367 aa, Homo sapiens
ESRAPGGNVRWRSSNAKRWYESVADFGSGLCSSRDRLVELLRVVGQDAEYQNLQRQFPPGLISENVLTAWAWSYAKVVNYTFSNQETLCATLVTVYRGEDVYHCPDWFLAKINDNLMELVIMINACKMASASRVTAVIPCFPYARQDKKDKSRAPISAKLVANMLSVAGADHIITMDLHASQIQGFFDIPVDNLYAEPAVLKWIRENISEWRNCTIVSPDAGGAKRVTSIADRLNVDFALIHKERKKANEVDRMVLVGDVKDRVAILVDDMADTCGTICHAADKLLSAGATRVYAILTHGIFSGPAISRINNACFEAVVVTNTIPQEDKMKHCSKIQVIDISMILAEAIRRTHNGESVSYLFSHVPL

SEQ ID NO: 1033391 - protein, 367 aa, Homo sapiens; identical to SEQ ID NO: 1033390

SEQ ID NO: 1033392 - protein, 367 aa, Homo sapiens; identical to SEQ ID NO: 1033390

SEQ ID NO: 1033393 - protein, 367 aa, Homo sapiens; identical to SEQ ID NO: 1033390

SEQ ID NO: 1033394 - protein, 266 aa, Homo sapiens
GQTYGHAGPPLQPLSIQPHLWTQPARRSRALLRTDGHQGMAWAGPGLPPHSSPLGRQPDAREGGPAMRACTPEAAPLSTAGPPDSLTQASPYQPQGLPAEPPLTAPSQDGNVVIACLVQGFFPQEPLSVTWSESGQGVTARNFPPSQDASGDLYTTSSQLTLPATQCLADGKSVTCHVKHYTNPSQDVTVPCPVPSTPPTPSPSTPPTPSPSCCHPRLSLHRPALEDLLLGSEANLTCTLTGLRDASGVTFTWDAHRAGIPRVTVG

SEQ ID NO: 1033395 - protein, 169 aa, Homo sapiens
TDSSTNTGYIELRVLSSDDTAVYYCARDVRGDTSMIVVDFPPLDHWGQGTLVHGHRLLSIPDQPQGLPAEPPLTAPSQDGNVVIACLVQGFFPQEPLSVTWSESGQGVTARNFPPSQDASGDLYTTSSQLTLPATQCLADGKSVTCHVSSTTRIADSIVPVSKPRPTKS

SEQ ID NO: 1033396 - protein, 102 aa, Homo sapiens
VFYCARLISWGCLGPCAIDFWGQGTMVTVSSASPTSPKVFPLSLAAPPRWERGHRLPGPGLLPPGATQCDLERKRTGRDRQKLPTQPDAYRGPMYEKGIPQG

SEQ ID NO: 1033397 - protein, 336 aa, Homo sapiens
PCITCARGGYDFRRPKFYYYSMDVWGQGTTGHRLLSIPDQPQGLPAEPPLTAPSQDGNVVIACLVQGFFPQEPLSVTWSESGQGVTARNFPPSQDASGDLYTTSSQLTLPATQCLADGKSVTCHVKHYTNPSQDVTVPCPVPSTPPTPSPSTPPTPSPSCCHPRLSLHRPALEDLLLGSEANLTCTLTGLRDASGVTFTWDALKVGRALFKDHLRRDLCGCYSVSSVLPGCAEPWNHGKTFTCTAAYPEVQDPANRHPSQNPETHSGPEGPPAAAAVGGAGPERAGDAERAWHAASAPKDVLVRWLQGSQELPREKYLTWAFPAGAQPGHHPTLSL

SEQ ID NO: 1033398 - protein, 317 aa, Homo sapiens
MVPLTLGPGTLGHRLLSIPDQPQGLPAEPPLTAPSQDGNVVIACLVQGFFPQEPLSVTWSESGQGVTARNFPPSQDASGDLYTTSSQLTLPATQCLADGKSVTCHVKHYTNPSQDVTVPCPVPSTPPTPSPSTPPTPSPSCCHPRLSLHRPALEDLLLGSEANLTCTLTGLRDASGVTFTWDALKVGRALFKDHLRRDLCGCYSVSSVLPGCAEPWNHGKTFTCTAAYPEVQDPANRHPSQNPETHSGPEGPPAAAAVGGAGPERAGDAERAWHAASAPKDVLVRWLQGSQELPREKYLTWAFPAGAQPGHHPTLSL

SEQ ID NO: 1033399 - protein, 342 aa, Homo sapiens
NSLRTEDTGIYYCIRDSRGGYSSGYPRFDPWGQGTLGHRLLSIPDQPQGLPAEPPLTAPSQDGNVVIACLVQGFFPQEPLSVTWSESGQGVTARNFPPSQDASGDLYTTSSQLTLPATQCLADGKSVTCHVKHYTNPSQDVTVPCPVPSTPPTPSPSTPPTPSPSCCHPRLSLHRPALEDLLLGSEANLTCTLTGLRDASGVTFTWDALKVGRALFKDHLRRDLCGCYSVSSVLPGCAEPWNHGKTFTCTAAYPEVQDPANRHPSQNPETHSGPEGPPAAAAVGGAGPERAGDAERAWHAASAPKDVLVRWLQGSQELPREKYLTWAFPAGAQPGHHPTLSL

SEQ ID NO: 1033400 - protein, 324 aa, Homo sapiens
AFTPWTKTGYFTTGVGNPGHRLLSIPDQPQGLPAEPPLTAPSQDGNVVIACLVQGFFPQEPLSVTWSESGQGVTARNFPPSQDASGDLYTTSSQLTLPATQCLADGKSVTCHVKHYTNPSQDVTVPCPVPSTPPTPSPSTPPTPSPSCCHPRLSLHRPALEDLLLGSEANLTCTLTGLRDASGVTFTWDALKVGRALFKDHLRRDLCGCYSVSSVLPGCAEPWNHGKTFTCTAAYPEVQDPANRHPSQNPETHSGPEGPPAAAAVGGAGPERAGDAERAWHAASAPKDVLVRWLQGSQELPREKYLTWAFPAGAQPGHHPTLSL

SEQ ID NO: 1033401 - protein, 336 aa, Homo sapiens; identical to SEQ ID NO: 1033397

SEQ ID NO: 1033402 - protein, 252 aa, Homo sapiens
SSVPPRLARQDASGDLYTTSSQLTLPATQCLADGKSVTCHVKHYTNPSQDVTVPCPVPSTPPTPSPSTPPTPSPSCCHPRLSLHRPALEDLLLGSEANLTCTLTGLRDASGVTFTWDALKVGRALFKDHLRRDLCGCYSVSSVLPGCAEPWNHGKTFTCTAAYPEVQDPANRHPSQNPETHSGPEGPPAAAAVGGAGPERAGDAERAWHAASAPKDVLVRWLQGSQELPREKYLTWAFPAGAQPGHHPTLSL

SEQ ID NO: 1033403 - protein, 163 aa, Homo sapiens
MSFSKADITRLCTLTGLRDASGVTFTWDALKVGRALFKDHLRRDLCGCYSVSSVLPGCAEPWNHGKTFTCTAAYPEVQDPANRHPSQNPETHSGPEGPPAAAAVGGAGPERAGDAERAWHAASAPKDVLVRWLQGSQELPREKYLTWAFPAGAQPGHHPTLSL

SEQ ID NO: 1033404 - protein, 336 aa, Homo sapiens; identical to SEQ ID NO: 1033397

SEQ ID NO: 1033405 - protein, 336 aa, Homo sapiens; identical to SEQ ID NO: 1033397

SEQ ID NO: 1033406 - protein, 291 aa, Homo sapiens
PCITCARGGYDFRRPKFYYYSMDVWGQGTTGHRLLSIPDQPQGLPAEPPLTAPSQDGNVVIACLVQGFFPQEPLSVTWSESGQGVTARNFPPSQDASGDLYTTSSQLTLPATQCLADGKSVTCHVKHYTNPSQDVTVPCPVPSTPPTPSPSTPPTPSPSCCHPRLSLHRPALEDLLLGSEANLTCTLTGLRDASGVTFTWDALKVGRALFKDHLRRDLCGCYSVSSVLPGCAEPWNHGKTFTCTAAYPEVQDPANRHPSQNPETHSGPEGPPAAAAVGGKLGPLKRRLGEG

SEQ ID NO: 1033407 - protein, 172 aa, Homo sapiens
MPREALHESQPGCPVPSTPPTPSPSTPPTPSPSCCHPRLSLHRPALEDLLLGSEANLTCTLTGLRDASGVTFTWDALKVGRALFKDHLRRDLCGCYSVSSVLPGCAEPWNHGKTFTCTAAYPEVQDPANRHPSQLALNELVTLNVPGTRLQPPRTCWFAGCRGHRSCPARST

SEQ ID NO: 1033408 - protein, 255 aa, Homo sapiens
PCITCARGGYDFRRPKFYYYSMDVWGQGTTGHRLLSIPDQPQGLPAEPPLTAPSQDGNVVIACLVQGFFPQEPLSVTWSESGQGVTARNFPPSQDASGDLYTTSSQLTLPATQCLADGKSVTCHVKHYTNPSQDVTVPCPVPSTPPTPSPSTPPTPSPSCCHPRLSLHRPALEDLLLGSEANLTCTLTGLRDASGVTFTWDALKVGRALFKDHLRRDLCGCYSVSSVLPGCAEPWNHGKTFTCTAAYPESKTPHR

SEQ ID NO: 1033409 - protein, 249 aa, Homo sapiens
PCITCARGGYDFRRPKFYYYSMDVWGQGTTGHRLLSIPDQPQGLPAEPPLTAPSQDGNVVIACLVQGFFPQEPLSVTWSESGQGVTARNFPPSQDASGDLYTTSSQLTLPATQCLADGKSVTCHVKHYTNPSQDVTVPCPVPSTPPTPSPSTPPTPSPSCCHPRLSLHRPALEDLLLGSEANLTCTLTGLRDASGVTFTWDALKVGRALFKDHLRRDLCGCYSVSSVLPGCAEPWKPWEVLLVEGYQLI

SEQ ID NO: 1033410 - protein, 213 aa, Homo sapiens
AVYYLCAGGYDFRRPKFYYYSMDVWGQGTTGHRLLSIPDQPQGLPAEPPLTAPSQDGNVVIACLVQGFFPQEPLSVTWSESGQGVTARNFPPSQDASGDLYTTSSQLTLPATQCLADGKSVTCHVKHYTNPSQDVTVPCPVPSTPPTPSPSTPPTPSPSCCHPRLSLHRPALEDLLLGSEANLTCTLTGLRDASGVTFTWDAHRAGIPRVTVG

SEQ ID NO: 1033411 - protein, 163 aa, Homo sapiens
REIESARGILLAGPRPTTVWTSGAKGPLVTVSSASPTSPKVFPLSLAAPPRWERGHRLPGPGLLPPGATQCDLERKRTGRDRQKLPTQPGRSPARAPPHPFAVTSILRVAAEDWKKGDTFLLHGWATRPCRWPSHRRPSTAWRGKPTHVNVSVVMAEVDGTCY

SEQ ID NO: 1033412 - protein, 41 aa, Homo sapiens
MPREALHESQPGCDCALPSSLNSTYLLRGYSRITISITVHC

SEQ ID NO: 1033413 - protein, 104 aa, Homo sapiens
MYCALPSSPPPPCCHPRLSLHRPALEDLLLGSEANLTCTLTGLRDASGVTFTWDALKVGRALFKDHLRRDLCGCYSVSSVQPRQCTMPRNNGETVFPHCKRNTP

SEQ ID NO: 1033414 - protein, 69 aa, Homo sapiens
MPREALHESQPGCTVNALSSLNSTYPISLNSTYPISLIAKTSSQDYGKCPRCGYGCTTDSWLLCSHCAL

SEQ ID NO: 1033415 - protein, 116 aa, Homo sapiens
KEGTTTSGWYGSFDYWGQGTWSLGHRLLSIPDQPQGLPAEPPLTAPSQDGNVVIACLVQGFFPQEPLSVKTLGLVGDAEGDIVTRVTWPPGVEVVMGEKLFVDKGAKGVHVIRRLY

SEQ ID NO: 1033416 - protein, 152 aa, Homo sapiens
MGETRRIVAPGPCTTGSREPVVTVSSASPTSPKVFPLSLQHPPDGNVVIACLVQGFFPQEPLSVTWSESGQGVTARNFPPSQDASGDLYTTSSQLTLPATQCLADGKSVTCHVKHYTNPSQDVYDCSLPVPINSTYPMVLSIPYSYPGAELI

SEQ ID NO: 1033417 - protein, 159 aa, Homo sapiens
LGIGRKVNIKEVYTFASEPNDVFFKLVDKSTELNEEPLMRFGRLLPSFVSSENAFYLSPDIRKQCDWFQGDQPTKNLVKFGHKQVEVIIIIVLKIVALQGMHRSSNHPLTLYPDAVNCPDAVNCPDAVNCPDAVNCPDAVNCPDAVNCPDAVNCPDAVN

SEQ ID NO: 1033418 - protein, 333 aa, Homo sapiens
RDRVGERDSSGWSPAHNGMDVWGQGTTGHRLLSIPDQPQGLPAEPPLTAPSQDGNVVIACLVQGFFPQEPLSVTWSESGQGVTARNFPPSQDASGDLYTTSSQLTLPATQCLADGKSVTCHVKHYTNPSQDVTVPCPVPSTPPTPSPSTPPTPSPSCCHPRLSLHRPALEDLLLGSEANLTCTLTGLRDASGVTFTWDALKVGRALFKDHLRRDLCGCYSVSSVLPGCAEPWNHGKTFTCTAAYPEVQDPANRHPSQNPETHSGPEGPPAAAAVGGAGPERAGDAERAWHAASAPKDVLVRWLQGSQELPREKYLTWAFPAGAQPGHHPTLSL

SEQ ID NO: 1033419 - protein, 334 aa, Homo sapiens
VKSDDTAVYYCVRDGRGWSFDLWGQGARGHRLLSIPDQPQGLPAEPPLTAPSQDGNVVIACLVQGFFPQEPLSVTWSESGQGVTARNFPPSQDASGDLYTTSSQLTLPATQCLADGKSVTCHVKHYTNPSQDVTVPCPVPSTPPTPSPSTPPTPSPSCCHPRLSLHRPALEDLLLGSEANLTCTLTGLRDASGVTFTWDALKVGRALFKDHLRRDLCGCYSVSSVLPGCAEPWNHGKTFTCTAAYPEVQDPANRHPSQNPETHSGPEGPPAAAAVGGAGPERAGDAERAWHAASAPKDVLVRWLQGSQELPREKYLTWAFPAGAQPGHHPTLSL

SEQ ID NO: 1033420 - protein, 336 aa, Homo sapiens; identical to SEQ ID NO: 1033397

SEQ ID NO: 1033421 - protein, 323 aa, Homo sapiens
MRALTATPQEMTGARNPGHRLLSIPDQPQGLPAEPPLTAPSQDGNVVIACLVQGFFPQEPLSVTWSESGQGVTARNFPPSQDASGDLYTTSSQLTLPATQCLADGKSVTCHVKHYTNPSQDVTVPCPVPSTPPTPSPSTPPTPSPSCCHPRLSLHRPALEDLLLGSEANLTCTLTGLRDASGVTFTWDALKVGRALFKDHLRRDLCGCYSVSSVLPGCAEPWNHGKTFTCTAAYPEVQDPANRHPSQNPETHSGPEGPPAAAAVGGAGPERAGDAERAWHAASAPKDVLVRWLQGSQELPREKYLTWAFPAGAQPGHHPTLSL

SEQ ID NO: 1033422 - protein, 331 aa, Homo sapiens
REIESARGILLAGPRPTTVWTSGAKGPLVTVSSASPTSPKVFPLSLQHPPDGNVVIACLVQGFFPQEPLSVTWSESGQGVTARNFPPSQDASGDLYTTSSQLTLPATQCLADGKSVTCHVKHYTNPSQDVTVPCPVPSTPPTPSPSTPPTPSPSCCHPRLSLHRPALEDLLLGSEANLTCTLTGLRDASGVTFTWDALKVGRALFKDHLRRDLCGCYSVSSVLPGCAEPWNHGKTFTCTAAYPEVQDPANRHPSQNPETHSGPEGPPAAAAVGGAGPERAGDAERAWHAASAPKDVLVRWLQGSQELPREKYLTWAFPAGAQPGHHPTLSL

SEQ ID NO: 1033423 - protein, 376 aa, Homo sapiens
GQTYGHAGPPLQPLSIQPHLWTQPARRSRALLRTDGHQGMAWAGPGLPPHSSPLGRQPDAREGGPAMRACTPEAAPLSTAGPPGHRLLSIPDQPQGLPAEPPLTAPSQDGNVVIACLVQGFFPQEPLSVTWSESGQGVTARNFPPSQDASGDLYTTSSQLTLPATQCLADGKSVTCHVKHYTNPSQDVTVPCPVPPPPPCCHPRLSLHRPALEDLLLGSEANLTCTLTGLRDASGVTFTWDALKVGRALFKDHLRRDLCGCYSVSSVLPGCAEPWNHGKTFTCTAAYPEVQDPANRHPSQNPETHSGPEGPPAAAAVGGAGPERAGDAERAWHAASAPKDVLVRWLQGSQELPREKYLTWAFPAGAQPGHHPTLSL

SEQ ID NO: 1033424 - protein, 210 aa, Homo sapiens
MPREALHESQPGCPVPSTPPTPSPSTPPTPSPSCCHPRLSLHRPALEDLLLGSEANLTCTLTGLRDASGVTFTWDALKVGRALFKDHLRRDLCGCYSVSSVLPGCAEPWNHGKTFTCTAAYPEVQDPANRHPSQNPETHSGPEGPPAAAAVGGAGPERAGDAERAWHAASAPKDVLVRWLQGSQELPREKYLTWAFPAGAQPGHHPTLSL

SEQ ID NO: 1033425 - protein, 336 aa, Homo sapiens; identical to SEQ ID NO: 1033397

SEQ ID NO: 1033426 - protein, 336 aa, Homo sapiens; identical to SEQ ID NO: 1033397

SEQ ID NO: 1033427 - protein, 336 aa, Homo sapiens; identical to SEQ ID NO: 1033397

SEQ ID NO: 1033428 - protein, 297 aa, Homo sapiens
PCITCARGGYDFRRPKFYYYSMDVWGQGTTGHRLLSIPDQPQGLPAEPPLTAPSQDGNVVIACLVQGFFPQEPLSVTWSESGQGVTARNFPPSQDASGDLYTTSSQLTLPATQCLADGKSVTCHVKHYTNPSQDVTVPCPVPSTPPTPSPSTPPTPSPSCCHPRLSLHRPALEDLLLGSEANLTCTLTGLRDASGVTFTWDALKVGRALFKDHLRRDLCGCYSVSSVLPGCAEPWNHGKTFTCTAAYPESKTPREVPDCATRPCRWPSHRRPSTAWRGKPTHVNVSVVMAEVDGTCY

SEQ ID NO: 1033429 - protein, 237 aa, Homo sapiens
PCITCARGGYDFRRPKFYYYSMDVWGQGTTGHRLLSIPDQPQGLPAEPPLTAPSQDGNVVIACLVQGFFPQEPLSVTWSESGQGVTARNFPPSQDASGDLYTTSSQLTLPATQCLADGKSVTCHVKHYTNPSQDVTVPCPVPSTPPTPSPSTPPTPSPSCCHPRLSLHRPALEDLLLGSEANLTCTLTGLRDASGVTFTWDALKVGRALFKDHLRRDLCGCYSVSSVLPGCAEPTVE

SEQ ID NO: 1033430 - protein, 224 aa, Homo sapiens
PCITCARGGYDFRRPKFYYYSMDVWGQGTTGHRLLSIPDQPQGLPAEPPLTAPSQDGNVVIACLVQGFFPQEPLSVTWSESGQGVTARNFPPSQDASGDLYTTSSQLTLPATQCLADGKSVTCHVKHYTNPSQDVTVPCPVPSTPPTPSPSTPPTPSPSCCHPRLSLHRPALEDLLLGSEANLTCTLTGLRDASGVTFTWGRPSSGEGAVFQGTNLSVELLLGC

SEQ ID NO: 1033431 - protein, 135 aa, Homo sapiens
MVPLTLGPGTLGHRLLSIPDQPQGLPAEPPLTAPSQDGNVVIACLVQGFFPQEPLSVTWSESGQGVTARNFPPSQDASGDLYTTSSQLTLPATQCLADGKSVTCHVKHYTNPSQDVTVPCPVPPPPTILSPSTEA

SEQ ID NO: 1033432 - protein, 35 aa, Homo sapiens
MPREALHESQPGCDCALPSSLNSTDPTPRQSVSAE

SEQ ID NO: 1033433 - protein, 107 aa, Homo sapiens
MPREALHESQPGCPPPPCCHPRLSLHRPALEDLLLGSEANLTCTLTGLRDASGVTFTWDALKVGRALFKDHLRRDLCGCYSVSSVLPGVAQPGKQWRNHSQRETWRK

SEQ ID NO: 1033434 - protein, 104 aa, Homo sapiens
REIESARGILLAGPRPTTVWTSGAKGPLVTVSSASPTSPKVFPLSLAAPPRWERGHRLPGPGLLPPGATQCDLERKRTGRDRQKLPTQPDAYRGPMYEKGIPQG

SEQ ID NO: 1033435 - protein, 329 aa, Homo sapiens
KEGTTTSGWYGSFDYWGQGTWSLGHRLLSIPDQPQGLPAEPPLTAPSQDGNVVIACLVQGFFPQEPLSVTWSESGQGVTARNFPPSQDASGDLYTTSSQLTLPATQCLADGKSVTCHVKHYTNPSQDVTVPCPVPSTPPTPSPSTPPTPSPSCCHPRLSLHRPALEDLLLGSEANLTCTLTGLRDASGVTFTWDALKVGRALFKDHLRRDLCGCYSVSSVLPGCAEPWNHGKTFTCTAAYPEVQDPANRHPSQNPETHSGPEGPPAAAAVGGAGPERAGDAERAWHAASAPKDVLVRWLQGSQELPREKYLTWAFPAGAQPGHHPTLSL

SEQ ID NO: 1033436 - protein, 299 aa, Homo sapiens
MAAPQGLPAEPPLTAPSQDGNVVIACLVQGFFPQEPLSVTWSESGQGVTARNFPPSQDASGDLYTTSSQLTLPATQCLADGKSVTCHVKHYTNPSQDVTVPCPVPSTPPTPSPSTPPTPSPSCCHPRLSLHRPALEDLLLGSEANLTCTLTGLRDASGVTFTWDALKVGRALFKDHLRRDLCGCYSVSSVLPGCAEPWNHGKTFTCTAAYPEVQDPANRHPSQNPETHSGPEGPPAAAAVGGAGPERAGDAERAWHAASAPKDVLVRWLQGSQELPREKYLTWAFPAGAQPGHHPTLSL

SEQ ID NO: 1033437 - protein, 304 aa, Homo sapiens
MVPLTLGPGTLGHRLLSIPDQPQGLPAEPPLTAPSQDGNVVIACLVQGFFPQEPLSVTWSESGQGVTARNFPPSQDASGDLYTTSSQLTLPATQCLADGKSVTCHVKHYTNPSQDVTVPCPVPPPPPCCHPRLSLHRPALEDLLLGSEANLTCTLTGLRDASGVTFTWDALKVGRALFKDHLRRDLCGCYSVSSVLPGCAEPWNHGKTFTCTAAYPEVQDPANRHPSQNPETHSGPEGPPAAAAVGGAGPERAGDAERAWHAASAPKDVLVRWLQGSQELPREKYLTWAFPAGAQPGHHPTLSL

SEQ ID NO: 1033438 - protein, 336 aa, Homo sapiens; identical to SEQ ID NO: 1033397

SEQ ID NO: 1033439 - protein, 237 aa, Homo sapiens
VSHQEFSKMKQSNNEANFKRRSLKNLATAYDNLLNCSYLKEGTKFYNELTEILVRFQNKCSDIVFARKTERDELLKDLQQSIAREPSAPSIPTPAYQSSPAGGHAPTPPTPAPRTMPPTKPQPPARPPPPVLPANRAPSATAPSPVGAGTAAPAPSQTPGSAPPPQAQGPPYPTYPGYPGYCQMPMPMGYNPYAYGQYNMPYPPVYHQSPGQAPYPGPQQPSYPFPQPPQQSYYPQQ

SEQ ID NO: 1033440 - protein, 237 aa, Homo sapiens; identical to SEQ ID NO: 1033439

SEQ ID NO: 1033441 - protein, 237 aa, Homo sapiens; identical to SEQ ID NO: 1033439

SEQ ID NO: 1033442 - protein, 237 aa, Homo sapiens; identical to SEQ ID NO: 1033439

SEQ ID NO: 1033443 - protein, 172 aa, Homo sapiens
MLIFNTLSLIKDLQQSIAREPSAPSIPTPAYQSSPAGGHAPTPPTPAPRTMPPTKPQPPARPPPPVLPANRAPSATAPSPVGAGTAAPAPSQTPGSAPPPQAQGPPYPTYPGYPGYCQMPMPMGYNPYAYGQYNMPYPPVYHQSPGQAPYPGPQQPSYPFPQPPQQSYYPQQ

SEQ ID NO: 1033444 - protein, 617 aa, Homo sapiens
EELCNKEEAKEVFENDPETDYFDPKYLVVFALFKLGYSLLQRQSTNAYPDLRSCVNAIPDQCSPLPCNEDGYMSCKDGKASFTCTCKPGWQGEKCEFDINECKDPSNINGGCSQICDNTPGSYHCSCKNGFVMLSNKKDCKDVDECSLKPSICGTAVCKNIPGDFECECPEGYRYNLKSKSCEDIDECSENMCAQLCVNYPGGYTCYCDGKKGFKLAQDQKSCEVVSVCLPLNLDTKYELLYLAEQFAGVVLYLKFRLPEISRFSAEFDFRTYDSEGVILYAESIDHSAWLLIALRGGKIEVQLKNEHTSKITTGGDVINNGLWNMVSVEELEHSISIKIAKEAVMDINKPGPLFKPENGLLETKVYFAGFPRKVESELIKPINPRLDGCIRSWNLMKQGASGIKEIIQEKQNKHCLVTVEKGSYYPGSGIAQFHIDYNNVSSAEGWHVNVTLNIRPSTGTGVMLALVSGNNTVPFAVSLVDSTSEKSQDILLSVENTVIYRIQALSLCSDQQSHLEFRVNRNNLELSTPLKIETISHEDLQRQLAVLDKAMKAKVATYLGGLPDVPFSATPVNAFYNGCMEVNINGVQLDLDEAISKHNDIRAHSCPSVWKKTKNS

SEQ ID NO: 1033445 - protein, 617 aa, Homo sapiens; identical to SEQ ID NO: 1033444

SEQ ID NO: 1033446 - protein, 617 aa, Homo sapiens; identical to SEQ ID NO: 1033444

SEQ ID NO: 1033447 - protein, 617 aa, Homo sapiens; identical to SEQ ID NO: 1033444

SEQ ID NO: 1033448 - protein, 617 aa, Homo sapiens; identical to SEQ ID NO: 1033444

SEQ ID NO: 1033449 - protein, 617 aa, Homo sapiens; identical to SEQ ID NO: 1033444

SEQ ID NO: 1033450 - protein, 617 aa, Homo sapiens; identical to SEQ ID NO: 1033444

SEQ ID NO: 1033451 - protein, 86 aa, Homo sapiens
DPRKGARSVLSFWRGNLANVIRYFPTQALNFAFKDKYKQIFLVGRGQCTRSSGRYFCGQPPACRWPGKALEKGRIAIQPSAADSVS

SEQ ID NO: 1033452 - protein, 298 aa, Homo sapiens
MTEQAISFAKDFLAGGIAAAISKTAVAPIERVKLLLQVQHASKQIAADKQYKGIVDCIVRIPKEQGVLSFWRGNLANVIRYFPTQALNFAFKDKYKQIFLGGVDKHTQFWRYFAGNLASGGAAGATSLCFVYPLDFARTRLAADVGKSGTEREFRGLGDCLVKITKSDGIRGLYQGFSVSVQGIIIYRAAYFGVYDTAKGMLPDPKNTHIVVSWMIAQTVTAVAGVVSYPFDTVRRRMMMQFGRKGADIMYTGTVDCWRKIFRDEGGKAFFKGAWSNVLRGMGGAFVLVLYDELKKVI

SEQ ID NO: 1033453 - protein, 298 aa, Homo sapiens
MTEQAISFAKDFLAGGIAAAISKTAVAPIERVKLLLQVQHASKQIAADKQYKGIVDCIVRIPKEQGVLSFWRGNLANVIRYFPTQALNFAFKDKYKQIFLGGVDKHTQFWRYFAGNLASGGAAGATSLCFVYPLDFARTRLAADVGKSGTEREFRGLGDCLVKITKSDGIRGLYQGFSVSVQGIIIYRAAYFGVYDTAKGMLPDPKNTHIVVSWMIAQTVTAVAGVVSYPFDTVRRRMMMQSGRKGADIMYTGTVDCWRKIFRDEGGKAFFKGAWSNVLRGMGGAFVLVLYDELKKVI

SEQ ID NO: 1033454 - protein, 298 aa, Homo sapiens; identical to SEQ ID NO: 1033452

SEQ ID NO: 1033455 - protein, 298 aa, Homo sapiens; identical to SEQ ID NO: 1033453

SEQ ID NO: 1033456 - protein, 298 aa, Homo sapiens; identical to SEQ ID NO: 1033453

SEQ ID NO: 1033457 - protein, 298 aa, Homo sapiens; identical to SEQ ID NO: 1033453

SEQ ID NO: 1033458 - protein, 289 aa, Homo sapiens
RIGSGTEPRPRVKPPQASRGAPRVHAGSGRGLPTHDPGECLKGRSCPEAAAGLSQRRPPFTLRARSPAVLPFRCPPCHHDGTGHLLRQRLLGRRHSAAAISKTAVAPIERVKLLLQGPARQQADRRRQCSTMGIVDCIVLHPQGAGRACPSGGATLPTSFATSPLKPSTSPSRISTSRSSWRGVDNAHAVLGGTFAGNLGLRRFAGRRDLPLLRVPAWHFARTRLAADRGKRQGTEREFLRPGETAWVKDHQVPSGIPGALYQGFQVSPVPGAIHPSNPGRAYFPGVYE

SEQ ID NO: 1033459 - protein, 166 aa, Homo sapiens
MNNNTTPRRPERHHKRGHKTQRRTTRRTEKKTKQPPEPVETKKKRQKKRQHEKKTAKHTRTNKEQEPRRNDQHSAARGTPTRRQDKRTTRAAGTSGKDRRGGDEAERSRADRGTEPKNAEGEERGKRTKRGEEDGEGEAGGTKKEGAKGRGKKERQRRRRQGTAGS

SEQ ID NO: 1033460 - protein, 289 aa, Homo sapiens; identical to SEQ ID NO: 1033458

SEQ ID NO: 1033461 - protein, 289 aa, Homo sapiens; identical to SEQ ID NO: 1033458

SEQ ID NO: 1033462 - protein, 289 aa, Homo sapiens; identical to SEQ ID NO: 1033458

SEQ ID NO: 1033463 - protein, 289 aa, Homo sapiens; identical to SEQ ID NO: 1033458

SEQ ID NO: 1033464 - protein, 289 aa, Homo sapiens; identical to SEQ ID NO: 1033458

SEQ ID NO: 1033465 - protein, 289 aa, Homo sapiens; identical to SEQ ID NO: 1033458

SEQ ID NO: 1033466 - protein, 289 aa, Homo sapiens; identical to SEQ ID NO: 1033458

SEQ ID NO: 1033467 - protein, 289 aa, Homo sapiens; identical to SEQ ID NO: 1033458

SEQ ID NO: 1033468 - protein, 289 aa, Homo sapiens; identical to SEQ ID NO: 1033458

SEQ ID NO: 1033469 - protein, 258 aa, Homo sapiens
GTTKLRLGTRLGGESAEAAAGLSQRRPPFTLRARSPAVLPFRCPPCHHDGTGHLLRQRLLGRRHSAAAISKTAVAPIERVKLLLQGPARQQADRRRQCSTMGIVDCIVLHPQGAGRACPSGGATLPTSFATSPLKPSTSPSRISTSRSSWRGVDNAHAVLGGTFAGNLGLRRFAGRRDLPLLRVPAWHFARTRLAADRGKRQGTEREFLRPGETAWVKDHQVPSGIPGALYQGFQVSPVPGAIHPSNPGRAYFPGVYE

SEQ ID NO: 1033470 - protein, 289 aa, Homo sapiens; identical to SEQ ID NO: 1033458

SEQ ID NO: 1033471 - protein, 289 aa, Homo sapiens; identical to SEQ ID NO: 1033458

SEQ ID NO: 1033472 - protein, 289 aa, Homo sapiens; identical to SEQ ID NO: 1033458

SEQ ID NO: 1033473 - protein, 289 aa, Homo sapiens; identical to SEQ ID NO: 1033458

SEQ ID NO: 1033474 - protein, 289 aa, Homo sapiens; identical to SEQ ID NO: 1033458

SEQ ID NO: 1033475 - protein, 289 aa, Homo sapiens; identical to SEQ ID NO: 1033458

SEQ ID NO: 1033476 - protein, 289 aa, Homo sapiens; identical to SEQ ID NO: 1033458

SEQ ID NO: 1033477 - protein, 289 aa, Homo sapiens; identical to SEQ ID NO: 1033458

SEQ ID NO: 1033478 - protein, 289 aa, Homo sapiens; identical to SEQ ID NO: 1033458

SEQ ID NO: 1033479 - protein, 289 aa, Homo sapiens; identical to SEQ ID NO: 1033458

SEQ ID NO: 1033480 - protein, 289 aa, Homo sapiens; identical to SEQ ID NO: 1033458

SEQ ID NO: 1033481 - protein, 289 aa, Homo sapiens; identical to SEQ ID NO: 1033458

SEQ ID NO: 1033482 - protein, 289 aa, Homo sapiens; identical to SEQ ID NO: 1033458

SEQ ID NO: 1033483 - protein, 289 aa, Homo sapiens; identical to SEQ ID NO: 1033458

SEQ ID NO: 1033484 - protein, 289 aa, Homo sapiens; identical to SEQ ID NO: 1033458

SEQ ID NO: 1033485 - protein, 298 aa, Homo sapiens; identical to SEQ ID NO: 1033452

SEQ ID NO: 1033486 - protein, 298 aa, Homo sapiens; identical to SEQ ID NO: 1033452

SEQ ID NO: 1033487 - protein, 298 aa, Homo sapiens; identical to SEQ ID NO: 1033453

SEQ ID NO: 1033488 - protein, 298 aa, Homo sapiens; identical to SEQ ID NO: 1033452

SEQ ID NO: 1033489 - protein, 298 aa, Homo sapiens; identical to SEQ ID NO: 1033453

SEQ ID NO: 1033490 - protein, 298 aa, Homo sapiens; identical to SEQ ID NO: 1033452

SEQ ID NO: 1033491 - protein, 298 aa, Homo sapiens; identical to SEQ ID NO: 1033453

SEQ ID NO: 1033492 - protein, 289 aa, Homo sapiens; identical to SEQ ID NO: 1033458

SEQ ID NO: 1033493 - protein, 289 aa, Homo sapiens; identical to SEQ ID NO: 1033458

SEQ ID NO: 1033494 - protein, 289 aa, Homo sapiens; identical to SEQ ID NO: 1033458

SEQ ID NO: 1033495 - protein, 289 aa, Homo sapiens; identical to SEQ ID NO: 1033458

SEQ ID NO: 1033496 - protein, 289 aa, Homo sapiens; identical to SEQ ID NO: 1033458

SEQ ID NO: 1033497 - protein, 289 aa, Homo sapiens; identical to SEQ ID NO: 1033458

SEQ ID NO: 1033498 - protein, 289 aa, Homo sapiens; identical to SEQ ID NO: 1033458

SEQ ID NO: 1033499 - protein, 289 aa, Homo sapiens; identical to SEQ ID NO: 1033458

SEQ ID NO: 1033500 - protein, 502 aa, Homo sapiens; identical to SEQ ID NO: 771214

SEQ ID NO: 1033501 - protein, 401 aa, Homo sapiens
MSFSKTHSTATMPPPINPILASLQHNSILTPTRVSSSATKQKVLSPPHIKADFNLADFECEEDPFDNLELKTIDEKEELRNILVGTTGPIMAQLLDNNLPRGGSGSVLQDEEVLASLERATLDFKPLHKPNGFITLPQLGNCEKMSLSSKVSLPPIPAVSNIKSLSFPKLDSDDSNQKTAKLASTFHSTSCLRNGTFQNSLKPSTQSSASELNGHHTLGLSALNLDSGTEMPALTSSQMPSLSVLSVCTEESSPPNTGPTVTPPNFSVSQVPNMPSCPQAYSELQMLSPSERQCVETVVNMGYSYECVLRAMKKKGENIEQILDYLFAHGQLCEKGFDPLLVEEALEMHQCSEEKMMEFLQLMSKFKEMGFELKDIKEVLLLHNNDQDNALEDLMARAGAS

SEQ ID NO: 1033502 - protein, 461 aa, Homo sapiens
MASKKLGADFHQYDFSLEKKTIEWAEEIKKIEEAEREAECKIAEAEAKVNSKSGPEGDSKMSFSKTHSTATMPPPINPILASLQHNSILTPTRVSSSATKQKVLSPPHIKADFNLADFECEEDPFDNLELKTIDEKEELRNILVGTTGPIMAQLLDNNLPRGGSGSVLQDEEVLASLERATLDFKPLHKPNGFITLPQLGNCEKMSLSSKVSLPPIPAVSNIKSLSFPKLDSDDSNQKTAKLASTFHSTSCLRNGTFQNSLKPSTQSSASELNGHHTLGLSALNLDSGTEMPALTSSQMPSLSVLSVCTEESSPPNTGPTVTPPNFSVSQVPNMPSCPQAYSELQMLSPSERQCVETVVNMGYSYECVLRAMKKKGENIEQILDYLFAHGQLCEKGFDPLLVEEALEMHQCSEEKMMEFLQLMSKFKEMGFELKDIKEVLLLHNNDQDNALEDLMARAGAS

SEQ ID NO: 1033503 - protein, 502 aa, Homo sapiens; identical to SEQ ID NO: 771214

SEQ ID NO: 1033504 - protein, 502 aa, Homo sapiens; identical to SEQ ID NO: 771214

SEQ ID NO: 1033505 - protein, 224 aa, Homo sapiens
AETQETGSDGFNIRIVQKSTIQAPERKLYDIINTTGGHCYIHYHALNVLLFLKLPALTSSQMPSLSVLSVCTEESSPPNTGPTVTPPNFSVSQVPNMPSCPQAYSELQMLSPSERQCVETVVNMGYSYECVLRAMKKKGENIEQILDYLFAHGQLCEKGFDPLLVEEALEMHQCSEEKMMEFLQLMSKFKEMGFELKDIKEVLLLHNNDQDNALEDLMARAGAS

SEQ ID NO: 1033506 - protein, 502 aa, Homo sapiens; identical to SEQ ID NO: 771214

SEQ ID NO: 1033507 - protein, 245 aa, Homo sapiens
MASKKLGADFHGTFSYLDDVPFKTGDKFKTPAKVGLPIGFSLPDCLQVVREVQYDFSLEKKTIEWAEEIKKIEEAEREAECKIAEAEAKVNSKSGPEGDSKMSFSKTHSTATMPPPINPILASLQHNSILTPTRVSSSATKQKVLSPPHIKADFNLADFECEEDPFDNLELKTIDEKEELRNILVGTTGPIMAQLLDNNLPRGGSGSVLQDEEVLFSGNEKAYIECPLINPEGAIAYYERPLVKL

SEQ ID NO: 1033508 - protein, 502 aa, Homo sapiens; identical to SEQ ID NO: 771214

SEQ ID NO: 1033509 - protein, 502 aa, Homo sapiens; identical to SEQ ID NO: 771214

SEQ ID NO: 1033510 - protein, 460 aa, Homo sapiens
MASKKLGADFHGTFSYLDDVPFKTGDKFKTPAKVGLPIGFSLPDCLQVVREVQYDFSLEKKTIEWAEEIKKIEEAEREAECKIAEAEAKVNSKSGPEGDSKMSFSKTHSTATMPPPINPILASLQHNSILTPTRVSSSATKQKVLSPPHIKADFNLADFECEEDPFDNLELKTIDEKEELRNILVGTTGPIMAQLLDNNLPRGGSGSVLQDEEVLASLERATLDFKPLHKPNGFITLPQLGNCEKMSLSSKVSLPPIPAVSNIKSLSFPKLDSDDSNQKTAKLASTFHSTSCLRNGTFQNSLKPSTQSSASELNGHHTLGLSALNLDSGTEMPALTSSQMPSLSVLSVCTEESSPPNTGPTVTPPNFSVSQVPNMPSCPQAYSELQMLSPSERQCVETVVNMGYSYECVLRAMKKKGENIEQILDYLFAHGQLCEKGFDPLLVEEALEMHQCSEERAERH

SEQ ID NO: 1033511 - protein, 502 aa, Homo sapiens; identical to SEQ ID NO: 771214

SEQ ID NO: 1033512 - protein, 502 aa, Homo sapiens; identical to SEQ ID NO: 771214

SEQ ID NO: 1033513 - protein, 87 aa, Homo sapiens
  misc_feature (23)..(23): Xaa can be any naturally occurring amino acid
  misc_feature (28)..(29): Xaa can be any naturally occurring amino acid
PCGCSELRALMPPGRWGPCSLVXPFPPXXPVCPAPVCGVCWAPRYSLQRRGASPDPFGPPPQVPSRPSRAPPGVPSQPIGSGKSIPS

SEQ ID NO: 1033514 - protein, 118 aa, Homo sapiens
  misc_feature (114)..(114): Xaa can be any naturally occurring amino acid
  misc_feature (116)..(117): Xaa can be any naturally occurring amino acid
MFVGGLSWDTSKKDLKDYFTKFGEVVDCTIKMDPNTGRSRGLGFILFKDAASVEKVLDQKEHRLDGRVIDPKKAMAMKKDPVKKSSWGSESEATEEKIREYFGELGRLRALNCXWXXS

SEQ ID NO: 1033515 - protein, 102 aa, Homo sapiens
MFVGGLSWDTSKKDLKDYFTKFGEVVDCTIKMDPNTGRSRGLGFILFKDAASVEKVLDQKEHRLDGRVIDPKKAMAMKKDPAIHACAPPGLRTLLPHLLQST

SEQ ID NO: 1033516 - protein, 102 aa, Homo sapiens; identical to SEQ ID NO: 1033515

SEQ ID NO: 1033517 - protein, 170 aa, Homo sapiens
  misc_feature (22)..(22): Xaa can be any naturally occurring amino acid
  misc_feature (28)..(28): Xaa can be any naturally occurring amino acid
  misc_feature (30)..(30): Xaa can be any naturally occurring amino acid
  misc_feature (36)..(36): Xaa can be any naturally occurring amino acid
  misc_feature (46)..(46): Xaa can be any naturally occurring amino acid
  misc_feature (51)..(51): Xaa can be any naturally occurring amino acid
MSEAGEEQPMEKKGANEKGNEXVPKGVXGXGWKGGXGGGWRGEGGXPRGNXKGVEGDQIKERKKEEEEGKMLVGGLSWDTSKKDLKDYFTKFGEVVDCTIKMDPNTGRSRGLGFILFKDAASVEKVLDQKEHRLDGRVIDPKKAMAMKKDPVKKSSWGSESEATEEKIRE

SEQ ID NO: 1033518 - protein, 86 aa, Homo sapiens
QTSRGFPCIFEQDKPKPSGPSSVGFILFKDAASVEKVLDQKEHRLDGRVLLHMPWPFYGSMTRPSSLCSSWSKDLASTLASIDVTG

SEQ ID NO: 1033519 - protein, 81 aa, Homo sapiens
MDPNTGRSRGLGFILFKDAASVEKVLDQKEHRLDGRVIDPKKAMAMKKDPVKENLRWGSGILKPLEEKDQGEYFWAKLGEQ

SEQ ID NO: 1033520 - protein, 722 aa, Homo sapiens
QSSVRISEKFPSSPKALESVTNENAIIPLPTIKWKPLIHSPSRTPVLVGSDEFDKCLSNDKFSHEEYSNGALSILQYPYDNGYYLPYYKRERNKRSTQITVRFLDNPHYNKNIRKKDPVLLLHWWKEIVATILFCIIATTFIVRRLFHPHPHRQRKESETQCQTENKYDSVSGEANDSSWNDINKLWIYITISNWILSQFNAWDVVALELFLKLTNKVDDCNYAIKRIRRPQLGELARDKVHAKKVKALAKLEHPGIVRYFNAWLEAPPEKWQEKMDEIWLKDESTDWPLSSPSPMDAPSVKIRRMDPFSTKEHIEIIAPSPQRSRSFSVGISCDQTSSSESQFSPLEFSGMDHEDISESVDAAYNLQDSCLTDCDVEDGTMDGNDEGHSFELCPSEASPYVRSRERTSSSIVFEDSGCDNASSKEEPKTNRLHIGNHCANKLTAFKPTSSKSSSEATLSISPPRPTTLSLDLTKNTTEKPQPSSPKVYLYIQMQLCRKENLKDWMNGRCTIEERERSVCLHIFLQIAEAVEFLHSKGLMHRDLKPSNIFFTMDDVVKVGDFGLVTAMDQDEEEQTVLTPMPAYARHTGQVGTKLYMSPEQIHGNSYSHKVDIFSLGLILFELLYPFSTQMERVRTLTDVRNLKFPPLFTQKYPCEYVMVQDMLSPSPMERPEAINIIENAVFEDLDFPGKTVLRQRSRSLSSSGTKHSRQSNNSHSPLPSN

SEQ ID NO: 1033521 - protein, 296 aa, Homo sapiens
LLLVGLKAVSLLAQWLPICNRLVFGSSLLEATLSISPPRPTTLSLDLTKNTTEKPQPSSPKVYLYIQMQLCRKENLKDWMNGRCTIEERERSVCLHIFLQIAEAVEFLHSKGLMHRDLKPSNIFFTMDDVVKVGDFGLVTAMDQDEEEQTVLTPMPAYARHTGQVGTKLYMSPEQIHGNSYSHKVDIFSLGLILFELLYPFSTQMERVRTLTDVRNLKFPPLFTQKYPCEYVMVQDMLSPSPMERPEAINIIENAVFEDLDFPGKTVLRQRSRSLSSSGTKHSRQSNNSHSPLPSN

SEQ ID NO: 1033522 - protein, 447 aa, Homo sapiens
QSSVRISEKFPSSPKALESVTNENAIIPLPTIKWKPLIHSPSRTPVLVGSDEFDKCLSNDKFSHEEYSNGALSILQYPYDNGYYLPYYKRERNKRSTQITVRFLDNPHYNKNIRKKDPVLLLHWWKEIVATILFCIIATTFIVRRLFHPHPHRQRKESETQCQTENKYDSVSGEANDSSWNDINKLWIYITISNWILSQFNAWDVVALELFLKLTNKVDDCNYAIKRIRRPQLGELARDKVHAKKVKALAKLEHPGIVRYFNAWLEAPPEKWQEKMDEIWLKDESTDWPLSSPSPMDAPSVKIRRMDPFSTKEHIEIIAPSPQRSRSFSVGISCDQTSSSESQFSPLEFSGMDHEDISESVDAAYNLQDSCLTDCDVEDGTMDGNDEGHSFELCPSEASPYVRSRERTSSSIVFEDSGCDNASSKEEPKTNRLHIGNHCANKLTVLF

SEQ ID NO: 1033523 - protein, 631 aa, Homo sapiens
QSSVRISEKFPSSPKALESVTNENAIIPLPTIKWKPLIHSPSRTPVLVGSDEFDKCLSNDKFSHEEYSNGALSILQYPYDNGYYLPYYKRERNKRSTQITVRFLDNPHYNKNIRKKDPVLLLHWWKEIVATILFCIIATTFIVRRLFHPHPHRQRKESETQCQTENKYDSVSGEANDSSWNDINKLWIYITISNWILSQFNAWDVVALELFLKLTNKVDDCNYAIKRIRRPQLGELARDKVHAKKVKALAKLEHPGIVRYFNAWLEAPPEKWQEKMDEIWLKDESTDWPLSSPSPMDAPSVKIRRMDPFSTKEHIEIIAPSPQRSRSFSVGISCDQTSSSESQFSPLEFSGMDHEDISESVDAAYNLQDSCLTDCDVEDGTMDGNDEGHSFELCPSEASPYVRSRERTSSSIVFEDSGCDNASSKEEPKTNRLHIGNHCANKLTAFKPTSSKSSSEATLSISPPRPTTLSLDLTKNTTEKPQPSSPKVYLYIQMQLCRKENLKDWMNGRCTIEERERSVCLHIFLQIAEAVEFLHSKGLMHRDLKPSNIFFTMDDVVKVGDFGLVTAMDQDEEEQTVLTPMPAYARHTGQVGTKLYMSPEQVSFSDLYLLAQQQMYLMNLFSMFSLKYPVI

SEQ ID NO: 1033524 - protein, 427 aa, Homo sapiens
MDAPSVKIRRMDPFSTKEHIEIIAPSPQRSRSFSVGISCDQTSSSESQFSPLEFSGMDHEDISESVDAAYNLQDSCLTDCDVEDGTMDGNDEGHSFELCPSEASPYVRSRERTSSSIVFEDSGCDNASSKEEPKTNRLHIGNHCANKLTAFKPTSSKSSSEATLSISPPRPTTLSLDLTKNTTEKPQPSSPKVYLYIQMQLCRKENLKDWMNGRCTIEERERSVCLHIFLQIAEAVEFLHSKGLMHRDLKPSNIFFTMDDVVKVGDFGLVTAMDQDEEEQTVLTPMPAYARHTGQVGTKLYMSPEQIHGNSYSHKVDIFSLGLILFELLYPFSTQMERVRTLTDVRNLKFPPLFTQKYPCEYVMVQDMLSPSPMERPEAINIIENAVFEDLDFPGKTVLRQRSRSLSSSGTKHSRQSNNSHSPLPSN

SEQ ID NO: 1033525 - protein, 722 aa, Homo sapiens; identical to SEQ ID NO: 1033520

SEQ ID NO: 1033526 - protein, 139 aa, Homo sapiens
MLFRTNTSTVTPVTVMVRSRDGSRSETPNTSSNWGWPGAAPRRGPADSWRRPAAPPGRRGTGRDPDTHAREDKSAGGPRRLGPRRLARSPRRAVVGGLSLTSRWLWVSPAPRAALHHEAGGALSRGVLPLLRCPSAPSA

SEQ ID NO: 1033527 - protein, 97 aa, Homo sapiens
PTTASSAGTDLVGKDEGHPGPVTGVLGDVANELQHGCDAWNTVSEQPAFSLSLKPTVPDLQQASYLPPAQVILFSLLSPKLKAGNSPSFWFSFLMQQ

SEQ ID NO: 1033528 - protein, 101 aa, Homo sapiens
DRFETLEPEVSHEETEHSYHVEETDSSEPVVEDERLHHDTDDVTYQVYEEQAVYEPLENEGIEITEVTAPPEDNPVEDSQVIVEEVSIFPVEEQQEVPPDT

SEQ ID NO: 1033529 - protein, 139 aa, Homo sapiens; identical to SEQ ID NO: 1033526

SEQ ID NO: 1033530 - protein, 204 aa, Homo sapiens
DRFETLEPEVSHEETEHSYHVEETDSSEPVVEDERLHHDTDDVTYQVYEEQAVYEPLENEGIEITEVTAPPEDNPVEDSQVIVEEVSIFPVEEQQEVPPETNRKTDDPEQQSQNVTERRTPKTFTHNTSDQDYYQLNLMLQKNSVTQGEQIDGNSSELHLKNKYANTLRVHDARYGKAQPAERMTLRLTTQAERNEVLRGAIEN

SEQ ID NO: 1033531 - protein, 101 aa, Homo sapiens; identical to SEQ ID NO: 1033528

SEQ ID NO: 1033532 - protein, 101 aa, Homo sapiens; identical to SEQ ID NO: 1033528

SEQ ID NO: 1033533 - protein, 115 aa, Homo sapiens
DRFETLEPEVSHEETEHSYHVEETDSSEPVVEDERLHHDTDDVTYQVYEEQAVYEPLENEGIEITEVTAPPEDNPVEDSQVIVEEVSIFPVEEQQEVPPETNRKTDDSRTTKQIC

SEQ ID NO: 1033534 - protein, 938 aa, Homo sapiens
MSTMRLLTLALLFSCSVARAACDPKIVNIGAVLSTRKHEQMFREAVNQANKRHGSWKIQLNATSVTHKPNAIQMALSVCEDLISSQVYAILVSHPPTPNDHFTPTPVSYTAGFYRIPVLGLTTRMSIYSDKSIHLSFLRTVPPYSHQSSVWFEMMRVYSWNHIILLVSDDHEGRAAQKRLETLLEERESKAEKVLQFDPGTKNVTALLMEAKELEARVIILSASEDDAATVYRAAAMLNMTGSGYVWLVGEREISGNALRYAPDGILGLQLINGKNESAHISDAVGVVAQAVHELLEKENITDPPRGCVGNTNIWKTGPLFKRVLMSSKYADGVTGRVEFNEDGDRKFANYSIMNLQNRKLVQVGIYNGTHVIPNDRKIIWPGGETEKPRGYQMSTRLKIVTIHQEPFVYVKPTLSDGTCKEEFTVNGDPVKKVICTGPNDTSPGSPRHTVPQCCYGFCIDLLIKLARTMNFTYEVHLVADGKFGTQERVNNSNKKEWNGMMGELLSGQADMIVAPLTINNERAQYIEFSKPFKYQGLTILVKKEIPRSTLDSFMQPFQSTLWLLVGLSVHVVAVMLYLLDRFSPFGRFKVNSEEEEEDALTLSSAMWFSWGVLLNSGIGEGAPRSFSARILGMVWAGFAMIIVASYTANLAAFLVLDRPEERITGINDPRLRNPSDKFIYATVKQSSVDIYFRRQVELSTMYRHMEKHNYESAAEAIQAVRDNKLHAFIWDSAVLEFEASQKCDLVTTGELFFRSGFGIGMRKDSPWKQNVSLSILKSHENGFMEDLDKTWVRYQECDSRSNAPATLTFENMAGVFMLVAGGIVAGIFLIFIEIAYKRHKDARRKQMQLAFAAVNVWRKNLQDRKSGRAEPDPKKKATFRAITSTLASSFKRRRSSKDTSTGGGRGALQNQKDTVLPRRAIEREEGQLQLCSRHRES

SEQ ID NO: 1033535 - protein, 940 aa, Homo sapiens
MRLLTLALLFSCSVARAACDPKIVNIGAVLSTRKHEQMFREAVNQANKRHGSWKIQLNATSVTHKPNAIQMALSVCEDLISSQVYAILVSHPPTPNDHFTPTPVSYTAGFYRIPVLGLTTRMSIYSDKSIHLSFLRTVPPYSHQSSVWFEMMRVYSWNHIILLVSDDHEGRAAQKRLETLLEERESKSKKRNYENLDQLSYDNKRGPKAEKVLQFDPGTKNVTALLMEAKELEARVIILSASEDDAATVYRAAAMLNMTGSGYVWLVGEREISGNALRYAPDGILGLQLINGKNESAHISDAVGVVAQAVHELLEKENITDPPRGCVGNTNIWKTGPLFKRVLMSSKYADGVTGRVEFNEDGDRKFANYSIMNLQNRKLVQVGIYNGTHVIPNDRKIIWPGGETEKPRGYQMSTRLKIVTIHQEPFVYVKPTLSDGTCKEEFTVNGDPVKKVICTGPNDTSPGSPRHTVPQCCYGFCIDLLIKLARTMNFTYEVHLVADGKFGTQERVNNSNKKEWNGMMGELLSGQADMIVAPLTINNERAQYIEFSKPFKYQGLTILVKKEIPRSTLDSFMQPFQSTLWLLVGLSVHVVAVMLYLLDRFSPFGRFKVNSEEEEEDALTLSSAMWFSWGVLLNSGIGEGAPRSFSARILGMVWAGFAMIIVASYTANLAAFLVLDRPEERITGINDPRLRNPSDKFIYATVKQSSVDIYFRRQVELSTMYRHMEKHNYESAAEAIQAVRDNKLHAFIWDSAVLEFEASQKCDLVTTGELFFRSGFGIGMRKDSPWKQNVSLSILKSHENGFMEDLDKTWVRYQECDSRSNAPATLTFENMAGVFMLVAGGIVAGIFLIFIEIAYKRHKDARRKQMQLAFAAVNVWRKNLQDRKSGRAEPDPKKKATFRAITSTLASSFKRRRSSKDTQYHPTDITGPLNLSDPSVSTVV

SEQ ID NO: 1033536 - protein, 959 aa, Homo sapiens
MRLLTLALLFSCSVARAACDPKIVNIGAVLSTRKHEQMFREAVNQANKRHGSWKIQLNATSVTHKPNAIQMALSVCEDLISSQVYAILVSHPPTPNDHFTPTPVSYTAGFYRIPVLGLTTRMSIYSDKSIHLSFLRTVPPYSHQSSVWFEMMRVYSWNHIILLVSDDHEGRAAQKRLETLLEERESKSKKRNYENLDQLSYDNKRGPKAEKVLQFDPGTKNVTALLMEAKELEARVIILSASEDDAATVYRAAAMLNMTGSGYVWLVGEREISGNALRYAPDGILGLQLINGKNESAHISDAVGVVAQAVHELLEKENITDPPRGCVGNTNIWKTGPLFKRVLMSSKYADGVTGRVEFNEDGDRKFANYSIMNLQNRKLVQVGIYNGTHVIPNDRKIIWPGGETEKPRGYQMSTRLKIVTIHQEPFVYVKPTLSDGTCKEEFTVNGDPVKKVICTGPNDTSPGSPRHTVPQCCYGFCIDLLIKLARTMNFTYEVHLVADGKFGTQERVNNSNKKEWNGMMGELLSGQADMIVAPLTINNERAQYIEFSKPFKYQGLTILVKKEIPRSTLDSFMQPFQSTLWLLVGLSVHVVAVMLYLLDRFSPFGRFKVNSEEEEEDALTLSSAMWFSWGVLLNSGIGEGAPRSFSARILGMVWAGFAMIIVASYTANLAAFLVLDRPEERITGINDPRLRNPSDKFIYATVKQSSVDIYFRRQVELSTMYRHMEKHNYESAAEAIQAVRDNKLHAFIWDSAVLEFEASQKCDLVTTGELFFRSGFGIGMRKDSPWKQNVSLSILKSHENGFMEDLDKTWVRYQECDSRSNAPATLTFENMAGVFMLVAGGIVAGIFLIFIEIAYKRHKDARRKQMQLAFAAVNVWRKNLQDRKSGRAEPDPKKKATFRAITSTLASSFKRRRSSKDTSTGGGRGALQNQKDTVLPRRAIEREGAGAHRPTPTSRCMQW

SEQ ID NO: 1033537 - protein, 233 aa, Homo sapiens
TQGRAELMCELLTQGAVLPNSVAELLTQGRAANSGELHAFIWDSAVLEFEASQKCDLVTTGELFFRSGFGIGMRKDSPWKQNVSLSILKSHENGFMEDLDKTWVRYQECDSRSNAPATLTFENMAGVFMLVAGGIVAGIFLIFIEIAYKRHKDARRKQMQLAFAAVNVWRKNLQDRKSGRAEPDPKKKATFRAITSTLASSFKRRRSSKDTQYHPTDITGPLNLSDPSVSTVV

SEQ ID NO: 1033538 - protein, 131 aa, Homo sapiens
MRLLTLALLFSCSVARAACDPKIVNIGAVLSTRKHEQMFREAVNQANKRHGSWKIQLNATSVTHKPNAIQMALSVCEDLISSQVYAILVSHPPTPNDHFTPTPVSYTAGFYRIPVLGLTTRMSKQNMRPKK

SEQ ID NO: 1033539 - protein, 886 aa, Homo sapiens
MRLLTLALLFSCSVARAACDPKIVNIGAVLSTRKHEQMFREAVNQANKRHGSWKIQLNATSVTHKPNAIQMALSVCEDLISSQVYAILVSHPPTPNDHFTPTPVSYTAGFYRIPVLGLTTRMSIYSDKSIHLSFLRTVPPYSHQSSVWFEMMRVYSWNHIILLVSDDHEGRAAQKRLETLLEERESKSKKRNYENLDQLSYDNKRGPKAEKVLQFDPGTKNVTALLMEAKELEARVIILSASEDDAATVYRAAAMLNMTGSGYVWLVGEREISGNALRYAPDGILGLQLINGKNESAHISDAVGVVAQAVHELLEKENITDPPRGCVGNTNIWKTGPLFKRVLMSSKYADGVTGRVEFNEDGDRKFANYSIMNLQNRKLVQVGIYNGTHVIPNDRKIIWPGGETEKPRGYQMSTRLKIVTIHQEPFVYVKPTLSDGTCKEEFTVNGDPVKKVICTGPNDTSPGSPRHTVPQCCYGFCIDLLIKLARTMNFTYEVHLVADGKFGTQERVNNSNKKEWNGMMGELLSGQADMIVAPLTINNERAQYIEFSKPFKYQGLTILVKKEIPRSTLDSFMQPFQSTLWLLVGLSVHVVAVMLYLLDRFSPFGRFKVNSEEEEEDALTLSSAMWFSWGVLLNSGIGEGAPRSFSARILGMVWAGFAMIIVASYTANLAAFLVLDRPEERITGINDPRLRNPSDKFIYATVKQSSVDIYFRRQVELSTMYRHMEKHNYESAAEAIQAVRDNKLHAFIWDSAVLEFEASQKCDLVTTGELFFRSGFGIGMRKDSPWKQNVSLSILKSHENGFMEDLDKTWVRYQECDSRSNAPATLTFENMAGVFMLVAGGIVAGIFLIFIEIAYKRHKDARRKQMQLAFAAVNVWRKNLQAVPSH

SEQ ID NO: 1033540 - protein, 347 aa, Homo sapiens
TQGRAELMCELLTQGAVLPNSGAELLTQGRAANSGGGVLLNSGIGEGAPRSFSARILGMVWAGFAMIIVASYTANLAAFLVLDRPEERITGINDPRLRNPSDKFIYATVKQSSVDIYFRRQVELSTMYRHMEKHNYESAAEAIQAVRDNKLHAFIWDSAVLEFEASQKCDLVTTGELFFRSGFGIGMRKDSPWKQNVSLSILKSHENGFMEDLDKTWVRYQECDSRSNAPATLTFENMAGVFMLVAGGIVAGIFLIFIEIAYKRHKDARRKQMQLAFAAVNVWRKNLQDRKSGRAEPDPKKKATFRAITSTLASSFKRRRSSKDTQYHPTDITGPLNLSDPSVSTVV

SEQ ID NO: 1033541 - protein, 885 aa, Homo sapiens
MSTMRLLTLALLFSCSVARAACDPKIVNIGAVLSTRKHEQMFREAVNQANKRHGSWKIQLNATSVTHKPNAIQMALSVCEDLISSQVYAILVSHPPTPNDHFTPTPVSYTAGFYRIPVLGLTTRMSIYSDKSIHLSFLRTVPPYSHQSSVWFEMMRVYSWNHIILLVSDDHEGRAAQKRLETLLEERESKAEKVLQFDPGTKNVTALLMEAKELEARVIILSASEDDAATVYRAAAMLNMTGSGYVWLVGEREISGNALRYAPDGILGLQLINGKNESAHISDAVGVVAQAVHELLEKENITDPPRGCVGNTNIWKTGPLFKRVLMSSKYADGVTGRVEFNEDGDRKFANYSIMNLQNRKLVQVGIYNGTHVIPNDRKIIWPGGETEKPRGYQMSTRLKIVTIHQEPFVYVKPTLSDGTCKEEFTVNGDPVKKVICTGPNDTSPGSPRHTVPQCCYGFCIDLLIKLARTMNFTYEVHLVADGKFGTQERVNNSNKKEWNGMMGELLSGQADMIVAPLTINNERAQYIEFSKPFKYQGLTILVKKEIPRSTLDSFMQPFQSTLWLLVGLSVHVVAVMLYLLDRFSPFGRFKVNSEEEEEDALTLSSAMWFSWGVLLNSGIGEGAPRSFSARILGMVWAGFAMIIVASYTANLAAFLVLDRPEERITGINDPRLRNPSDKFIYATVKQSSVDIYFRRQVELSTMYRHMEKHNYESAAEAIQAVRDNKLHAFIWDSAVLEFEASQKCDLVTTGELFFRSGFGIGMRKDSPWKQNVSLSILKSHENGFMEDLDKTWVRYQECDSRSNAPATLTFENMAGVFMLVAGGIVAGIFLIFIEIAYKRHKDARRKQMQLAFAAVNVWRKNLQQYHPTDITGPLNLSDPSVSTVV

SEQ ID NO: 1033542 - protein, 882 aa, Homo sapiens
MRLLTLALLFSCSVARAACDPKIVNIGAVLSTRKHEQMFREAVNQANKRHGSWKIQLNATSVTHKPNAIQMALSVCEDLISSQVYAILVSHPPTPNDHFTPTPVSYTAGFYRIPVLGLTTRMSIYSDKSIHLSFLRTVPPYSHQSSVWFEMMRVYSWNHIILLVSDDHEGRAAQKRLETLLEERESKAEKVLQFDPGTKNVTALLMEAKELEARVIILSASEDDAATVYRAAAMLNMTGSGYVWLVGEREISGNALRYAPDGILGLQLINGKNESAHISDAVGVVAQAVHELLEKENITDPPRGCVGNTNIWKTGPLFKRVLMSSKYADGVTGRVEFNEDGDRKFANYSIMNLQNRKLVQVGIYNGTHVIPNDRKIIWPGGETEKPRGYQMSTRLKIVTIHQEPFVYVKPTLSDGTCKEEFTVNGDPVKKVICTGPNDTSPGSPRHTVPQCCYGFCIDLLIKLARTMNFTYEVHLVADGKFGTQERVNNSNKKEWNGMMGELLSGQADMIVAPLTINNERAQYIEFSKPFKYQGLTILVKKEIPRSTLDSFMQPFQSTLWLLVGLSVHVVAVMLYLLDRFSPFGRFKVNSEEEEEDALTLSSAMWFSWGVLLNSGIGEGAPRSFSARILGMVWAGFAMIIVASYTANLAAFLVLDRPEERITGINDPRLRNPSDKFIYATVKQSSVDIYFRRQVELSTMYRHMEKHNYESAAEAIQAVRDNKLHAFIWDSAVLEFEASQKCDLVTTGELFFRSGFGIGMRKDSPWKQNVSLSILKSHENGFMEDLDKTWVRYQECDSRSNAPATLTFENMAGVFMLVAGGIVAGIFLIFIEIAYKRHKDARRKQMQLAFAAVNVWRKNLQEHRGWTRRFAKPKRHSAAATRY

SEQ ID NO: 1033543 - protein, 968 aa, Homo sapiens
MRLLTLALLFSCSVARAACDPKIVNIGAVLSTRKHEQMFREAVNQANKRHGSWKIQLNATSVTHKPNAIQMALSVCEDLISSQVYAILVSHPPTPNDHFTPTPVSYTAGFYRIPVLGLTTRMSIYSDKSIHLSFLRTVPPYSHQSSVWFEMMRVYSWNHIILLVSDDHEGRAAQKRLETLLEERESKSKKRNYENLDQLSYDNKRGPKAEKVLQFDPGTKNVTALLMEAKELEARVIILSASEDDAATVYRAAAMLNMTGSGYVWLVGEREISGNALRYAPDGILGLQLINGKNESAHISDAVGVVAQAVHELLEKENITDPPRGCVGNTNIWKTGPLFKRVLMSSKYADGVTGRVEFNEDGDRKFANYSIMNLQNRKLVQVGIYNGTHVIPNDRKIIWPGGETEKPRGYQMSTRLKIVTIHQEPFVYVKPTLSDGTCKEEFTVNGDPVKKVICTGPNDTSPGSPRHTVPQCCYGFCIDLLIKLARTMNFTYEVHLVADGKFGTQERVNNSNKKEWNGMMGELLSGQADMIVAPLTINNERAQYIEFSKPFKYQGLTILVKKEIPRSTLDSFMQPFQSTLWLLVGLSVHVVAVMLYLLDRFSPFGRFKVNSEEEEEDALTLSSAMWFSWGVLLNSGIGEGAPRSFSARILGMVWAGFAMIIVASYTANLAAFLVLDRPEERITGINDPRLRNPSDKFIYATVKQSSVDIYFRRQVELSTMYRHMEKHNYESAAEAIQAVRDNKLHAFIWDSAVLEFEASQKCDLVTTGELFFRSGFGIGMRKDSPWKQNVSLSILKSHENGFMEDLDKTWVRYQECDSRSNAPATLTFENMAGVFMLVAGGIVAGIFLIFIEIAYKRHKDARRKQMQLAFAAVNVWRKNLQVGQATLRGLGARALAGHGPPPSPEGRGHWDSGLWWGRELEIASQWPGAVAEWLPRARGTKPNEGHSMKVDSPLQKPGTEGKARHHET

SEQ ID NO: 1033544 - protein, 142 aa, Homo sapiens [sequence omitted]

SEQ ID NO: 1033545 - protein, 142 aa, Homo sapiens [sequence omitted]

SEQ ID NO: 1033546 - protein, 136 aa, Homo sapiens
APVLSCAQALIESGMKYEDAIQFIRQKRRGAINSKQLTYLEKYRPKKQRLRFKDPHTHKHMRFLITHNPTNATLSTFIEDLKKYGATTVVRVCEVTYDKTPLEKDGITVVDWPFDDRPRPDKVVNGREGILSSRPQ

SEQ ID NO: 1033547 - protein, 173 aa, Homo sapiens
MARMNRPAPVEVSYKHMRFLITHNPTNATLSTFIEDLKKYGATTVVRVCEVTYDKTPLEKDGITVVDWPFDDGAPPPGKVVEDWLSLVKAKFCEAPGSCVAVHCVAGLGRAPVLVALALIESGMKYEDAIQFIRQKRRGRINSKQLTYLEKYRPKQRLRFKDPHTHKTRCCVM

SEQ ID NO: 1033548 - protein, 148 aa, Homo sapiens
MARMNRPAPVEVSYKHMRFLITHNPTNATLSTFIEDLKKYGATTVVRVCEVTYDKTPLEKDGITVVDWPFDDGAPPPGKVVEDWLSLVKAKFCEAPGSCVAVHCVAGLGRKRRGAINSKQLTYLEKYRPKQRLRFKDPHTHKTRCCVM

SEQ ID NO: 1033549 - protein, 264 aa, Homo sapiens
  misc_feature (113)..(113): Xaa can be any naturally occurring amino acid
  misc_feature (123)..(123): Xaa can be any naturally occurring amino acid
  misc_feature (131)..(131): Xaa can be any naturally occurring amino acid
  misc_feature (134)..(134): Xaa can be any naturally occurring amino acid
  misc_feature (137)..(137): Xaa can be any naturally occurring amino acid
  misc_feature (144)..(144): Xaa can be any naturally occurring amino acid
  misc_feature (146)..(146): Xaa can be any naturally occurring amino acid
  misc_feature (149)..(149): Xaa can be any naturally occurring amino acid
  misc_feature (151)..(151): Xaa can be any naturally occurring amino acid
  misc_feature (153)..(154): Xaa can be any naturally occurring amino acid
  misc_feature (163)..(163): Xaa can be any naturally occurring amino acid
  misc_feature (166)..(166): Xaa can be any naturally occurring amino acid
  misc_feature (176)..(176): Xaa can be any naturally occurring amino acid
  misc_feature (180)..(180): Xaa can be any naturally occurring amino acid
  misc_feature (182)..(182): Xaa can be any naturally occurring amino acid
  misc_feature (185)..(185): Xaa can be any naturally occurring amino acid
MARMNRPAPVEVSYKHMRFLITHNPTNATLSTFIEDLKKYGATTVVRVCEVTYDKTPLEKDGITVVDWPFDDGAPPPGKVVEDWLSLVKAKFCEAPGSCVAVHCVAGLGRAPXRGRGPRESGXKNEDATQXTRXKRXFFFFFFXFXTFXLXKXXLKTDVGVDXLNXLYNDPGAAGXARRXLXRGXGRLGSVRTLAGPGGPAQPCSAQPSRGSRPWLAPHRLFLPDTSVHLCPRSEEPLGPWVASGPFLLSPPLPLAALAVALSL

SEQ ID NO: 1033550 - protein, 173 aa, Homo sapiens
MARMNRPAPVEVSYKHMRFLITHNPTNATLSTFIEDLKKYGATTVVRVCEVTYDKTPLEKDGITVVDWPFDDGAPPPGKVVEDWLSLVKAKFCEAPGSCVAVHCVAGLGRAPVLVALALIESGMKYEDAIQFIRQKRRGAINSKQLTYLEKYRPKQRLRFKDPHTHKTRCCVM

SEQ ID NO: 1033551 - protein, 75 aa, Homo sapiens
APVLSCAQALIESGMKYEDAIQFIRQKRRGAINSKQLTYLEKYRPKKGCGSKTHTRTRPGAALCSSGPWLGLVVM

SEQ ID NO: 1033552 - protein, 155 aa, Homo sapiens
MARMNRPAPVEVSYKHMRFLITHNPTNATLSTFIEDLKKYGATTVVRVCEVTYDGAPPPGKVVEDWLSLVKAKFCEAPGSCVAVHCVAGLGRAPVLVALALIESGMKYEDAIQFIRQKRRGAINSKQLTYLEKYRPKQRLRFKDPHTHKTRCCVM

SEQ ID NO: 1033553 - protein, 173 aa, Homo sapiens; identical to SEQ ID NO: 1033550

SEQ ID NO: 1033554 - protein, 138 aa, Homo sapiens
MARMNRPAPVEVSYKHMRFLITHNPTNATLSTFIEDLKKYGATTVVRVCEVTYDKTPLEKDGITVVDWPFDDLRHSLWRRWPWLCLSEVGRAPSARPLPHQPGWSPLACLLWGGGIFCNHWAPSPSFATPCPDLFSAP

SEQ ID NO: 1033555 - protein, 148 aa, Homo sapiens; identical to SEQ ID NO: 1033548

SEQ ID NO: 1033556 - protein, 173 aa, Homo sapiens; identical to SEQ ID NO: 1033547

SEQ ID NO: 1033557 - protein, 173 aa, Homo sapiens; identical to SEQ ID NO: 1033547

SEQ ID NO: 1033558 - protein, 173 aa, Homo sapiens; identical to SEQ ID NO: 1033547

SEQ ID NO: 1033559 - protein, 173 aa, Homo sapiens; identical to SEQ ID NO: 1033547

SEQ ID NO: 1033560 - protein, 173 aa, Homo sapiens; identical to SEQ ID NO: 1033550

SEQ ID NO: 1033561 - protein, 419 aa, Homo sapiens
RGEAPYFYNDTVTFKCYSGFTLKDNSQIHCKADTTWDPEIPVCEKETCQHVRQSLQELPAGSRVELVNTSCQDGYQLTGHAYQMCQDAENGIWFKKIPLCKVIHCHPPPVIVNGKHTGMMAENFLYGNEVSYECDQGFYLLGEKKLQCRSDSKGHGSWSGPSPQCLRSPPVTRCPNPEVKHGYKLNKTHSAYSHNDIVYVDCNPGFIMNGSRVIRCHTDNTWVPGVPTCIKKAFIGCPPPPKTPNGNHTGGNIARFSPGMSILYSCDQGYLLVGEALLLCTHEGTWSQPAPHCKEVNCSSPADMDGIQKGLEPRKMYQYGAVVTLECEDGYMLEGSPQSQCQSDHQWNPPLAVCRSRSLAPVLCGIAAGLILLTFLIVITLYVISKHRERNYYTDTSQKEAFHLEAREVYSVDPYNPAS

SEQ ID NO: 1033562 - protein, 98 aa, Homo sapiens
DAPAPRVAIQSVRCYSHGSQETDEEFDARWVTYFNKPDIDAWELRKGINTLVTYDMVPEPKIIDAALRACRRLNDFASTVRILEVVKDKAGPPSPRIY

SEQ ID NO: 1033563 - protein, 124 aa, Homo sapiens
DAPAPRVAIQSVRCYSHGSQETDEEFDARWVTYFNKPDIDAWELRKGINTLVTYDMVPEPKIIDAALRACRRLNDFASTVRILEVVKDKAGPHKEIYPYVIQELRPTLNELGISTPEELGLDKV

SEQ ID NO: 1033564 - protein, 124 aa, Homo sapiens; identical to SEQ ID NO: 1033563

SEQ ID NO: 1033565 - protein, 124 aa, Homo sapiens; identical to SEQ ID NO: 1033563

SEQ ID NO: 1033566 - protein, 124 aa, Homo sapiens; identical to SEQ ID NO: 1033563

SEQ ID NO: 1033567 - protein, 98 aa, Homo sapiens
VIASPPEVEIRRSFKVGRKFLDDIGVDFLMVPEPKIIDAALRACRRLNDFASTVRILEVVKDKAGPHKEIYPYVIQELRPTLNELGISTPEELGLDKV

SEQ ID NO: 1033568 - protein, 124 aa, Homo sapiens; identical to SEQ ID NO: 1033563

SEQ ID NO: 1033569 - protein, 269 aa, Homo sapiens
GTRVFALNALHNIPHDNVEDLIRGGADVNCTHGTLKPLHCACMVSDADCVELLLEKGAEVNALDGYNRTALHYAAEKDEACVEVLLEYGANPNALDGNRDTPLHWAAFKNNAECVRALLESGASVNALDYNNDTPLSWAAMKGNLESVSILLDYGAEVRVINLIGQTPISRLVALLVRGLGTEKEDSCFELLHRAVGHFELRKNGTMPREVARDPQLCEKLTVLCSAPGTLKTLARYAVRRSLGLQYLPDAVKGLPLPASLKEYLLLLE

SEQ ID NO: 1033570 - protein, 300 aa, Homo sapiens
LDIDIILLEKETGTSTVSDKIVRVRTLCPLDSVLNSVLLGKPELNTLTEVVFCPQGADVNCTHGTLKPLHCACMVSDADCVELLLEKGAEVNALDGYNRTALHYAAEKDEACVEVLLEYGANPNALDGNRDTPLHWAAFKNNAECVRALLESGASVNALDYNNDTPLSWAAMKGNLESVSILLDYGAEVRVINLIGQTPISRLVALLVRGLGTEKEDSCFELLHRAVGHFELRKNGTMPREVARDPQLCEKLTVLCSAPGTLKTLARYAVRRSLGLQYLPDAVKGLPLPASLKEYLLLLE

SEQ ID NO: 1033571 - protein, 293 aa, Homo sapiens
MWYIMQSIQSKYSLSERLIRTIAAIRSFPHDNVEDLIRGGADVNCTHGTLKPLHCACMVSDADCVELLLEKGAEVNALWNWGFNKNPENKAPPLLTYAAEKDEACVEVLLEYGANPNALDGNRDTPLHWAAFKNNAECVRALLESGASVNALDYNNDTPLSWAAMKGNLESVSILLDYGAEVRVINLIGQTPISRLVALLVRGLGTEKEDSCFELLHRAVGHFELRKNGTMPREVARDPQLCEKLTVLCSAPGTLKTLARYAVRRSLGLQYLPDAVKGLPLPASLKEYLLLLE

SEQ ID NO: 1033572 - protein, 318 aa, Homo sapiens
MWYIMQSIQSKYSLSERLIRTIAAIRSFPHDNVEDLIRGSMVAIESGLLVQLFLPDDKVSSALIHKIVFSDVTGADVNCTHGTLKPLHCACMVSDADCVELLLEKGAEVNALDGYNRTALHYAAEKDEACVEVLLEYGANPNALDGNRDTPLHWAAFKNNAECVRALLESGASVNALDYNNDTPLSWAAMKGNLESVSILLDYGAEVRVINLIGQTPISRLVALLVRGLGTEKEDSCFELLHRAVGHFELRKNGTMPREVARDPQLCEKLTVLCSAPGTLKTLARYAVRRSLGLQYLPDAVKGLPLPASLKEYLLLLE

SEQ ID NO: 1033573 - protein, 318 aa, Homo sapiens; identical to SEQ ID NO: 1033572

SEQ ID NO: 1033574 - protein, 288 aa, Homo sapiens
MSSSMWYIMQSIQSKYSLSERLIRTIAAIRSFPHDNVEDLIRGGADVNCTHGTLKPLHCACMVSDADCVELLLEKGAEVNALDGYNRTALHYAAEKDEACVEVLLEYGANPNALDGNRDTPLHWAAFKNNAECVRALLESGASVNALDYNNDTPLSWAAMKGNLESVSILLDYGAEVRVINLIGQTPISRLVALLVRGLGTEKEDSCFELLHRAVGHFELRKNGTMPREVARDPQLCEKLTVLCSAPGTLKTLARYAVRRSLGLQYLPDAVKGLPLPASLKEYLLLLE

SEQ ID NO: 1033575 - protein, 284 aa, Homo sapiens [sequence omitted]

SEQ ID NO: 1033576 - protein, 211 aa, Homo sapiens
MLTVWSYFWKKEPRYAAEKDEACVEVLLEYGANPNALDGNRDTPLHWAAFKNNAECVRALLESGASVNALDYNNDTPLSWAAMKGNLESVSILLDYGAEVRVINLIGQTPISRLVALLVRGLGTEKEDSCFELLHRAVGHFELRKNGTMPREVARDPQLCEKLTVLCSAPGTLKTLARYAVRRSLGLQYLPDAVKGLPLPASLKEYLLLLE

SEQ ID NO: 1033577 - protein, 129 aa, Homo sapiens
MKGNLESVSILLDYGAEVRVINLIGQTPISRLVALLVRGLGTEKEDSCFELLHRAVGHFELRKNGTMPREVARDPQLCEKLTVLCSAPGTLKTLARYAVRRSLGLQYLPDAVKGLPLPASLKEYLLLLE

SEQ ID NO: 1033578 - protein, 293 aa, Homo sapiens
LHSTRMRGCPANAAAAPSAAEALLFDSLATVKLKSFRPEANEMGPPEGGSSRAEVAERRGEWRRKAGFGPTTPLFLLLLLGSVTADITDGNSEHLKREHSLIKPYQGVGSSSMPLWDFQGSTMLTSQYVRLTPDERSKEGSIWNHQPCFLKDWEMHVHFKVHGTGKKNLHGDGIALWYTRDRLVPGPVFGSKDNFHGLAIFLDTYPNDETTERVFPYISVMVNNGSLSYDHSKDGRWTELAGCTADFRNRDHDTFLAVRYSRGRLTVMTGGLSLGPGANVNFFFYRDYKRTTR

SEQ ID NO: 1033579 - protein, 176 aa, Homo sapiens
LHSTRMRGCPANAAAAPSAAEALLFDSLATVKLKSFRPEANRWDPRKAEVQGGSGREERRMAAEGWIWRWGWGRRCLGRPGLLGPGPGPTTPLFLLLLLGSVTADITDGNSEHLKREHSLIKPGVAGVPAAAVRSPGHRCLRRGGGRGVPEAAGAEQALLLSGASGGACPWAQEPM

SEQ ID NO: 1033580 - protein, 331 aa, Homo sapiens
LHSTRMRGCPANAAAAPSAAEALLFDSLATVKLKSFRPEANRWDPRKAEVQGGSGREERRMAAEGWIWRWGWGRRCLGRPGLLGPGPGPTTPLFLLLLLGSVTADITDGNSEHLKREHSLIKPYQGVGSSSMPLWDFQGSTMLTSQYVRLTPDERSKEGSIWNHQPCFLKDWEMHVHFKVHGTGKKNLHGDGIALWYTRDRLVPGPVFGSKDNFHGLAIFLDTYPNDETTERVFPYISVMVNNGSLSYDHSKDGRWTELAGCTADFRNRDHDTFLAVRYSRGRLTVMTDLEDKNEWKNCIDITGVRLPTGYYFGASAGTGDPVLTIMTSSP

SEQ ID NO: 1033581 - protein, 356 aa, Homo sapiens
MAAEGWIWRWGWGRRCLGRPGLLGPGPGPTTPLFLLLLLGSVTADITDGNSEHLKREHSLIKPYQGVGSSSMPLWDFQGSTMLTSQYVRLTPDERSKEGSIWNHQPCFLKDWEMHVHFKVHGTGKKNLHGDGIALWYTRDRLVPGPVFGSKDNFHGLAIFLDTYPNDETTERVFPYISVMVNNGSLSYDHSKDGRWTELAGCTADFRNRDHDTFLAVRYSRGRLTVMTDLEDKNEWKNCIDITGVRLPTGYYFGASAGTGDLSDNHDIISMKLFQLMVEHTPDEESIDWTKIEPSVNFLKSPKDNVDDPTGNFRSGPLTGWRVFLLLLCALLGIVVCAVVGAVVFQKRQERNKRFY

SEQ ID NO: 1033582 - protein, 331 aa, Homo sapiens; identical to SEQ ID NO: 1033580

SEQ ID NO: 1033583 - protein, 327 aa, Homo sapiens
LHSTRMRGCPANAAAAPSAAEALLFDSLATVKLKSFRPEANRWDPRKAEVQGGSGREERRMAAEGWIWRWGWGRRCLGRPGLLGPGPGPTTPLFLLLLLGSVTADITDGNSEHLKREHSLIKPYQGVGSSSMPLWDFQGSTMLTSQYVRLTPDERSKEGSIWNHQPCFLKDWEMHVHFKVHGTGKKNLHGDGIALWYTRDRLVPGPVFGSKDNFHGLAIFLDTYPNDETTERVFPYISVMVNNGSLSYDHSKDGRWTELAGCTADFRNRDHDTFLAVRYSRGRLTVMTDLEDKNEWKNCIDITGVRLPTGYYFGASAGTGDPVCCSS

SEQ ID NO: 1033584 - protein, 323 aa, Homo sapiens
LHSTRMRGCPANAAAAPSAAEALLFDSLATVKLKSFRPEANRWDPRKAEVQGGSGREERRMAAEGWIWRWGWGRRCLGRPGLLGPGPGPTTPLFLLLLLGSVTADITDGNSEHLKREHSLIKPYQGVGSSSMPLWDFQGSTMLTSQYVRLTPDERSKEGSIWNHQPCFLKDWEMHVHFKVHGTGKKNLHGDGIALWYTRDRLVPGPVFGSKDNFHGLAIFLDTYPNDETTERVFPYISVMVNNGSLSYDHSKDGRWTELAGCTADFRNRDHDTFLAVRYSRGRLTVMTDLEDKNEWKNCIDITGVRLPTGYYFGACPWAQEPM

SEQ ID NO: 1033585 - protein, 188 aa, Homo sapiens
ATAITGVSYCAWPNVNQFLSVQPCFLKDWEMHVHFKVHGTGKKNLHGDGIALWYTRDRLVPGPVFGSKDNFHGLAIFLDTYPNDETTERVFPYISVMVNNGSLSYDHSKDGRWTELAGCTADFRNRDHDTFLAVRYSRGRLTVMTDLEDKNEWKNCIDITGVRLPTGYYFGASAGTGDPVLTIMTSSP

SEQ ID NO: 1033586 - protein, 323 aa, Homo sapiens; identical to SEQ ID NO: 1033584

SEQ ID NO: 1033587 - protein, 305 aa, Homo sapiens
AEETVQCGVGGAQSGREAEWQKQGPARPQLLHPQPGELGKVSVFSPPVQGSVPVGPIPGWAGPVGTLCGGERLWAGVECGTQVLGDPPGGLPRASSCGLGEPVTRAALLQKGPSDHSVGVGLGYVDSWASPYPELDSEEPRSLVLTGFLQQKAAQACRWGPGSLWAWSSLCPTLPWGLQSWLGWASPDLCPSPVRGVSTTGLPTVAGCPVPSPLPSCSPLIPVPCCRFSSPVSSPPDNVDDPTGNFRSGPPDGVAGVPAAAVRSPGHRCLRRGGGRGVPEAAGAEQALLLSGASGGACPWAQEPM

SEQ ID NO: 1033588 - protein, 303 aa, Homo sapiens
LHSTRMRGCPANAAAAPSAAEALLFDSLATVKLKSFRPEANRWDPRKAEVQGGSGREERRMAAEGWIWRWGWGRRCLGRPGLLGPGPGPTTPLFLLLLLGSVTADITDGNSEHLKREHSLIKPYQGVGSSSMPLWDFQGSTMLTSQYVRLTPDERSKEGSIWNHQPCFLKDWEMHVHFKVHGTGKKNLHGDGIALWYTRDRLVPGPVFGSKDNFHGLAIFLDTYPNDETTERVFPYISVMVNNGSLSYDHSKDGRWTELAGCGPCRQLLNTGGSPGPHWGGLLRTWGSDFVLWCVARVATDKA

SEQ ID NO: 1033589 - protein, 219 aa, Homo sapiens
LHSTRMRGCPANAAAAPSAAEALLFDSLATVKLKSFRPEANRWDPRKAEVQGGSGREERRMAAEGWIWRWGWGRRCLGRPGLLGPGPGPTTPLFLLLLLGSVTADITDGNSEHLKREHSLIKPYQGVGSSSMPLWDFQGSTMLTSQYVRLTPDERSKEGSIWNHQPCFLKDWEMHVHFKVHGTGKKNLHGDGIALWYTRDRLVPGPVSTDWAVAPAGSC

SEQ ID NO: 1033590 - protein, 326 aa, Homo sapiens
LHSTRMRGCPANAAAAPSAAEALLFDSLATVKLKSFRPEANRWDPRKAEVQGGSGREERRMAAEGWIWRWGWGRRCLGRPGLLGPGPGPTTPLFLLLLLGSVTADITDGNSEHLKREHSLIKPYQGVGSSSMPLWDFQGSTMLTSQYVRLTPDERSKEGSIWNHQPCFLKDWEMHVHFKVHGTGKKNLHGDGIALWYTRDRLVPGPVFGSKDNFHGLAIFLDTYPNDETTERVFPYISVMVNNGSLSYDHSKDGRWTELAGCTADFRNRDHDTFLAVRYSRGRLTVMTAWGQNRGDWFGSGWPSPVYFGPRPDRFVWSSRVSFCAP

SEQ ID NO: 1033591 - protein, 91 aa, Homo sapiens
QGPAQKSRAPTLTTKFAAASNILLLAQQGQVAEPRLRVWHPPQLETEALLGLVSQEQGSVSTDGLWPLQAAVEHWRVPRTTLGWAPEDVGK

SEQ ID NO: 1033592 - protein, 125 aa, Homo sapiens
SAPYTSQTGQTYGEDRCVTGRSCRLCWKQDNFHGLAIFLDTYPNDETTERVFPYISVMVNNGSLSYDHSKDGRWTELAGCTADFRNRDHDTFLAVRYSRGRLTVMTDPEGQETSGKKLALTITGE

SEQ ID NO: 1033593 - protein, 331 aa, Homo sapiens; identical to SEQ ID NO: 1033580

SEQ ID NO: 1033594 - protein, 331 aa, Homo sapiens; identical to SEQ ID NO: 1033580

SEQ ID NO: 1033595 - protein, 312 aa, Homo sapiens
LHSTRMRGCPANAAAAPSAAEALLFDSLATVKLKSFRPEANEMGPPEGGSSRAEVAERRGEWRRKAGFGPTTPLFLLLLLGSVTADITDGNSEHLKREHSLIKPYQGVGSSSMPLWDFQGSTMLTSQYVRLTPDERSKEGSIWNHQPCFLKDWEMHVHFKVHGTGKKNLHGDGIALWYTRDRLVPGPVFGSKDNFHGLAIFLDTYPNDETTERVFPYISVMVNNGSLSYDHSKDGRWTELAGCTADFRNRDHDTFLAVRYSRGRLTVMTDLEDKNEWKNCIDITGVRLPTGYYFGASAGTGDPVLTIMTSSP

SEQ ID NO: 1033596 - protein, 298 aa, Homo sapiens
LHSTRMRGCPANAAAAPSAAEALLFDSLATVKLKSFRPEANRWDPRKAEVQGGSGREERRMAAEGWIWVTADITDGNSEHLKREHSLIKPYQGVGSSSMPLWDFQGSTMLTSQYVRLTPDERSKEGSIWNHQPCFLKDWEMHVHFKVHGTGKKNLHGDGIALWYTRDRLVPGPVFGSKDNFHGLAIFLDTYPNDETTERVFPYISVMVNNGSLSYDHSKDGRWTELAGCTADFRNRDHDTFLAVRYSRGRLTVMTDLEDKNEWKNCIDITGVRLPTGYYFGASAGTGDPVLTIMTSSP

SEQ ID NO: 1033597 - protein, 337 aa, Homo sapiens
LHSTRMRGCPANAAAAPSAAEALLFDSLATVKLKSFRPEANRWDPRKAEVQGGSGREERRMAAEGWIWRWGWGRRCLGRPGLLGPGPGPTTPLFLLLLLGSVTADITDGNSEHLKREHSLIKPYQGVGSSSMPLWDFQGSTMLTSQYVRLTPDERSKEGSIWNHQPCFLKDWEMHVHFKVHGTGKKNLHGDGIALWYTRDRLVPGPVFGSKDNFHGLAIFLDTYPNDETTERVFPYISVMVNNGSLSYDHSKDGRWTELAGCTADFRNRDHDTFLAVRYSRGRLTVMTDLEDKNEWKNCIDITGVRLPTGYYFGIVVCAVVGAVVFQKRQERNKRFY

SEQ ID NO: 1033598 - protein, 190 aa, Homo sapiens
MLTSQYVRLTPDERSKEGSIWNHQPCFLKDWEMHVHFKVHGTGKKNLHGDGIALWYTRDRLVPGPVFGSKDNFHGLAIFLDTYPNDETTERVFPYISVMVNNGSLSYDHSKDGRWTELAGCTADFRNRDHDTFLAVRYSRGRLTVMTDLEDKNEWKNCIDITGVRLPTGYYFGASAGTGDPVLTIMTSSP

SEQ ID NO: 1033599 - protein, 229 aa, Homo sapiens
LHSTRMRGCPANAAAAPSAAEALLFDSLATVKLKSFRPEANEMGPPEGGSSRAEVAERRGEWRRKAGFGVGAGAGGAWEGLGFSAPALAPLHLSFFFCCWGLGPVFGSKDNFHGLAIFLDTYPNDETTERVFPYISVMVNNGSLSYDHSKDGRWTELAGCTADFRNRDHDTFLAVRYSRGRLTVMTDLEDKNEWKNCIDITGVRLPTGYYFGASAGTGDPVLTIMTSSP

SEQ ID NO: 1033600 - protein, 111 aa, Homo sapiens
ATITEMYREHALSGLIIGVEVNNGSLSYDHSKDGRWTELAGCTADFRNRDHDTFLAVRYSRGRLTVMTDLEDKNEWKNCIDITGVRLPTGYYFGASAGTGDPVLTIMTSSP

SEQ ID NO: 1033601 - protein, 269 aa, Homo sapiens
LHSTRMRGCPANAAAAPSAAEALLFDSLATVKLKSFRPEANRWDPRKAEVQGGSGREERRMAAEGWIWRWGWGRRCLGRPGLLGPGPGPTTPLFLLLLLGSVTADITDGNSEHLKREHSLIKPYQGVGSSSMPLWDFQGSTMLTSQYVRLTPDERSKEGSIWNHQPCFLKDWEMHVHFKVHGTGKKNLHGDGIALWYTRDRLVPGPVFGSKDNFHGLAIFLDTYPNDETTERVFPYISVIGVPEAAGAEQALLLSGASGGACPWAQEPM

SEQ ID NO: 1033602 - protein, 257 aa, Homo sapiens
LHSTRMRGCPANAAAAPSAAEALLFDSLATVKLKSFRPEANRWDPRKAEVQGGSGREERRMAAEGWIWRWGWGRRCLGRPGLLGPGPGPTTPLFLLLLLGSVTADITDGNSEHLKREHSLIKPYQGVGSSSMPLWDFQGSTMLTSQYVRLTPDERSKEGSIWNHQPCFLKDWEMHVHFKVHGTGKKNLHGDGIALWYTRDRLVPGPVFGSKDNFHGLAIFLDTYPNDETTERVFPYISVMVNNGSLSYDLTIMTSSP

SEQ ID NO: 1033603 - protein, 269 aa, Homo sapiens; identical to SEQ ID NO: 1033601

SEQ ID NO: 1033604 - protein, 144 aa, Homo sapiens
LHSTRMRGCPANAAAAPSAAEALLFDSLATVKLKSFRPEANRWDPRKAEVQGGSGREERRMAAEGWIWRWGWGRRCLGRPGLLGPGPGPTTPLFLLLLLGSVTADITDGNSEHLKREHSLIKPYQGVGSSLVFQKRQERNKRFY

SEQ ID NO: 1033605 - protein, 356 aa, Homo sapiens; identical to SEQ ID NO: 1033581

SEQ ID NO: 1033606 - protein, 315 aa, Homo sapiens
KIASDQCSLYFVTGEVVENSWIWRWGWGRRCLGRPGLLGPGPGPTTPLFLLLLLGSVTADITDGNSEHLKREHSLIKPYQGVGSSSMPLWDFQGSTMLTSQYVRLTPDERSKEGSIWNHQPCFLKDWEMHVHFKVHGTGKKNLHGDGIALWYTRDRLVPGPVFGSKDNFHGLAIFLDTYPNDETTERVFPYISVMVNNGSLSYDHSKDGRWTELAGCTADFRNRDHDTFLAVRYSRGRLTVMTDLEDKNEWKNCIDITGVRLPTGYYFYYFGARGGRRHVDNHDSSPEVSSEGAHSRERLVANWPRQSQGQKGGP

SEQ ID NO: 1033607 - protein, 186 aa, Homo sapiens
LHSTRMRGCPANAAAAPSAAEALLFDSLATVKLKSFRPEANRWDPRKAEVQGGSGREERRMAAEGWIWRWGWGRRCLGRPGLLGPGPGPTTPLFLLLLLGSVTADITDGNSEHLKREHSLIKPYQGVGSSSMPLWDFQGSTMLTSQYVRLTPDERSKEGSIWNHRDGVLLLLPRLVLNSLAQANLP

SEQ ID NO: 1033608 - protein, 356 aa, Homo sapiens; identical to SEQ ID NO: 1033581

SEQ ID NO: 1033609 - protein, 286 aa, Homo sapiens
KIASDQCSLYFVTGEVVENSWIWRWGWGRRCLGRPGLLGPGPGPTTPLFLLLLLGSVTADITDGNSEHLKREHSLIKPYQGVGSSSMPLWDFQGSTMLTSQYVRLTPDERSKEGSIWNHQPCFLKDWEMHVHFKVHGTGKKNLHGDGIALWYTRDRLVPGPVFGSKDNFHGLAIFLDTYPNDETTERVFPYISVMVNNGSLSYDHSKDGRWTELAGCTADFRNRDHDTFLAVRYSRGRLTVMTDLEDKNEWKNCIDITGVRLPTGYYFGASAGTGDPVLTIMTSSP

SEQ ID NO: 1033610 - protein, 239 aa, Homo sapiens
DAWVDPRVPVTADITDGNSEHLKREHSLIKPYQGVGSSSMPLWDFQGSTMLTSQYVRLTPDERSKEGSIWNHQPCFLKDWEMHVHFKVHGTGKKNLHGDGIALWYTRDRLVPGPVFGSKDNFHGLAIFLDTYPNDETTERVFPYISVMVNNGSLSYDHSKDGRWTELAGCTADFRNRDHDTFLAVRYSRGRLTVMTDLEDKNEWKNCIDITGVRLPTGYYFGASAGTGDPVLTIMTSSP

SEQ ID NO: 1033611 - protein, 321 aa, Homo sapiens
LHSTRMRGCPANAAAAPSAAEALLFDSLATVKLKSFRPEANRWDPRKAEVQGGSGREERRMAAEGWIWRWGWGRRCLGRPGLLGPGPGPTTPLFLLLLLGSVTADITDGNSEHLKREHSLIKPYQGVGSSSMLTSQYVRLTPDERSKEGSIWNHQPCFLKDWEMHVHFKVHGTGKKNLHGDGIALWYTRDRLVPGPVFGSKDNFHGLAIFLDTYPNDETTERVFPYISVMVNNGSLSYDHSKDGRWTELAGCTADFRNRDHDTFLAVRYSRGRLTVMTDLEDKNEWKNCIDITGVRLPTGYYFGASAGTGDPVLTIMTSSP

SEQ ID NO: 1033612 - protein, 324 aa, Homo sapiens
LHSTRMRGCPANAAAAPSAAEALLFDSLATVKLKSFRPEANRWDPRKAEVQGGSGREERRMAAEGWIWRWGWGRRCLGRPGLLGPGPGPTTPLFLLLLLGSVTADITDGNSEHLKREHSLIKPYQGVGSSSMPLWDFQGSTMLTSQYVRLTPDERSKEGSIWNHQPCFLKDWEMHVHFKVHGTGKKNLHGDGIALWYTRDRLVPDNFHGLAIFLDTYPNDETTERVFPYISVMVNNGSLSYDHSKDGRWTELAGCTADFRNRDHDTFLAVRYSRGRLTVMTDLEDKNEWKNCIDITGVRLPTGYYFGASAGTGDPVLTIMTSSP

SEQ ID NO: 1033613 - protein, 312 aa, Homo sapiens
LHSTRMRGCPANAAAAPSAAEALLFDSLATVKLKSFRPEANRWDPRKAEVQGGSGREERRMAAEGWIWRWGWGRRCLGRPGLLGPGPGPTTPLFLLLLLGSVTADITDGNSEHLKREHSLIKPYQGVGSSSMPLWDFQGSTMLTSQYVRLTPDERSKEGSIWNHQPCFLKDWEMHVHFKVHGTGKKNLHGDGIALWYTRDRLVPGPVFGSKDNFHGLAIFLDTYPNDETTERVFPYISVMVNNGSLSYDHSKDGRWTELAGCTADFRNRDHDTFLAVRYSRGRLTVMTGGLSLGPGANVNFFFYRDYKRTTR

SEQ ID NO: 1033614 - protein, 303 aa, Homo sapiens; identical to SEQ ID NO: 1033588

SEQ ID NO: 1033615 - protein, 280 aa, Homo sapiens
  misc_feature (271)..(271): Xaa can be any naturally occurring amino acid
  misc_feature (278)..(278): Xaa can be any naturally occurring amino acid
  misc_feature (280)..(280): Xaa can be any naturally occurring amino acid
LIYSFFWAFNIINVSLSGGTNEEILESIRAKKGDIDNVKSPTGEETEKDKNETENDSKDAEKNREEFEDQSLEKDSDDKTPDDDPEQGKSEEEEPNKTCESSNTSATTTSIQPNLENSNSSSELNSSQSESAKAADDPENGERESHTPVSIQEEIVGDFKSEKSNGELSESPGAGKGASGSTRIITRLRNPDSKLSQLKSQQVAAAAHEANKLFKEGKEVLVVNSQGEISRLSTKKEVIMKGNINIILNGQEGKYRVYHNQYFTNSLLSIXTSTEKTXIX

SEQ ID NO: 1033616 - protein, 343 aa, Homo sapiens
  misc_feature (335)..(335): Xaa can be any naturally occurring amino acid
  misc_feature (342)..(342): Xaa can be any naturally occurring amino acid
FNLQFLLGLFNIINVSLSGGTNEEILESIRAKKGDIDNVKSPTGEETEKDKNETENDSKDAEKNREEFEDQSLEKDSDDKTPDDDPEQGKSEEPTEVGDKGNSVSANLGDNTTNATSEETSPSEGRSPVGCLSETPDSSNMAEKKVASELPQDVPEEPNKTCESSNTSATTTSIQPNLENSNSSSELNSSQSESAKAADDPENGERESHTPVSIQEEIVGDFKSEKSNGELSESPGAGKGASGSTRIITRLRNPDSKLSQLKSQQVAAAAHEANKLFKEGKEVLVVNSQGEISRLSTKKEVIMKGNINNYFKWVKKGSIASTTINTSPIHCFEYXTSTEKTXI

SEQ ID NO: 1033617 - protein, 280 aa, Homo sapiens
  misc_feature (271)..(271): Xaa can be any naturally occurring amino acid
  misc_feature (278)..(278): Xaa can be any naturally occurring amino acid
  misc_feature (280)..(280): Xaa can be any naturally occurring amino acid
LIYSFFWAFNIINVSLSGGTNEEILESIRAKKGDIDNVKSPTGEETEKDKNETENDSKDAEKNREEFEDQSLEKDSDDKTPDDDPEQGKSEEPTEVGDKGNSVSANLGDNTTNATSEETSPSEGRSPVGCLSETPDSSNMAEKKVASELPQDVPVGDFKSEKSNGELSESPGAGKGASGSTRIITRLRNPDSKLSQLKSQQVAAAAHEANKLFKEGKEVLVVNSQGEISRLSTKKEVIMKGNINNYFKWVKKGSIASTTINTSPIHCFEYXTSTEKTXIX

SEQ ID NO: 1033618 - protein, 177 aa, Homo sapiens
PPKKVFVGGLSPDTSEEQIKEYFGAFGEIENIELPMDTKTNERRGFCFITYTDEEPVKKLLESRYHQIGSGKCEIKVHNPKRYIGSNSNNKKVEEVLQLVDEVVRGVVAEVRAKTGTKDLITIMIKDMEITIVPMVVIKTIVAMADMIILGITMGTMDMDRDMQTTVANRALMARHL

SEQ ID NO: 1033619 - protein, 240 aa, Homo sapiens
MFCHLRPMRRLCLEKIFPHWFPFSRALSGAEAVNALRPFYFAVHPDFFGQHPVEREINENSLKRLSVYLENLQKPGFKSLKPTQLTFYVRETDQSSSDGQEPFSTSGFRAVKFTLHTRDLLSTVLYILNSCSLSVEHIQSLNTNMHTQPLKEAKRMPDRPIKWDKSYYSFTGFKDPDEDLEQVSRVETTLTSWLDNNGKSAVKKLKNSLPLRKELDCLKDELSSTIATLRYQVAKELGHR

SEQ ID NO: 1033620 - protein, 115 aa, Homo sapiens
MFCHLRPMRRLCLEKIFPHWFPFSRALSGAEAVNALRPFYFAVHPDFFGQHPVEREINENSLKRLSVYLENLQKPGFKSLKPTQLTFYVRETDQSSSDGQEPFSTSVYLLNISKA

SEQ ID NO: 1033621 - protein, 150 aa, Homo sapiens
MPKSKELVSSSSSGSDSDSEVDKKLKRKKQVAPEKPVKKQKTGETSRALSSSKQSSSSRDDNMFQIGKMRYVSVRDFKGKVLIASFSSHIIGMGIPAQVHTRKPRQAQRSFPFNIQETNGSQLHRQPAISGTLACMRSQAHNVFNNSAAT

SEQ ID NO: 1033622 - protein, 127 aa, Homo sapiens; identical to SEQ ID NO: 772424

SEQ ID NO: 1033623 - protein, 127 aa, Homo sapiens; identical to SEQ ID NO: 772424

SEQ ID NO: 1033624 - protein, 127 aa, Homo sapiens; identical to SEQ ID NO: 772424

SEQ ID NO: 1033625 - protein, 129 aa, Homo sapiens
MPKSKELVSSSSSGSDSDSEVDKKLKRKKQVAPEKPVKKQKTGETSRALSSSKQSSSSRDDNMFQIGKMRYVSVRDFKGKVLIDIREYWMDPEGEMKPGRKVNSGQCGCNEIQYLGQYSDPSMTSVALV

SEQ ID NO: 1033626 - protein, 386 aa, Homo sapiens
MEPGRGGTETVGKFEFSRKDLIGHGAFAVVFKGRHREKHDLEVAVKCINKKNLAKSQTLLGKEIKILKELKHENIVALYDFQEMANSVYLVMEYCNGGDLADYLHAMRTLSEDTIRLFLQQIAGAMRLLHSKGIIHRDLKPQNILLSNPAGRRANPNSIRVKIADFGFARYLQSNMMAATLCGSPMYMAPEVIMSQHYDGKADLWSIGTIVYQCLTGKAPFQASSPQDLRLFYEKNKTLVPTIPRETSAPLRQLLLALLQRNHKDRMDFDEFFHHPFLDASPSVRKSPPVPVPSYPSSGSGSSSSSSSTSHLASPPSLGEMQQLQKTLASPADTAGFLHSSRDSGGSKDSSCDTDDFVMVPAQFPGDLVAEAPSAKPPPDSLMCSG

SEQ ID NO: 1033627 - protein, 784 aa, Homo sapiens
MDFDEFFHHPFLDASPSVRKSPPVPVPSYPSSGSGSSSSSSSTSHLASPPSLGEMQQLQKTLASPADTAGFLHSSRDSGGSKDSSCDTDDFVMVPAQFPGDLVAEAPSAKPPPDSLMCSGSSLVASAGLESHGRTPSPSPPCSSSPSPSGRAGPFSSSRCGASVPIPVPTQVQNYQRIERNLQSPTQFQTPRSSAIRRSGSTSPLGFARASPSPPAHAEHGGVLARKMSLGGGRPYTPSPQVGTIPERPGWSGTPSPQGAEMRGGRSPRPGSSAPEHSPRTSGLGCRLHSAPNLSDLHVVRPKLPKPPTDPLGAVFSPPQASPPQPSHGLQSCRNLRGSPKLPDFLQRNPLPPILGSPTKAVPSFDFPKTPSSQNLLALLARQGVVMTPPRNRTLPDLSEVGPFHGQPLGPGLRPGEDPKGPFGRSFSTSRLTDLLLKAAFGTQAPDPGSTESLQEKPMEIAPSAGFGGSLHPGARAGGTSSPSPVVFTVGSPPSGSTPPQGPRTRMFSAGPTGSASSSARHLVPGPCSEAPAPELPAPGHGCSFADPIAANLEGAVTFEAPDLPEETLMEQEHTEILRGLRFTLLFVQHVLEIAALKGSASEAAGGPEYQLQESVVADQISLLSREWGFAEQLVLYLKVAELLSSGLQSAIDQIRAGKLCLSSTVKQVVRRLNELYKASVVSCQGLSLRLQRFFLDKQRLLDRIHSITAERLIFSHAVQMVQSAALDEMFQHREGCVPRYHKALLLLEGLQHMLSDQADIENVTKCKLCIERRLSALLTGICA

SEQ ID NO: 1033628 - protein, 125 aa, Homo sapiens
  misc_feature (8)..(8): Xaa can be any naturally occurring amino acid
QAVPPPRXGISSTHAARYKASVVSCQGLSLRLQRFFLDKQRLLDRIHSITAERLIFSHAVQMVQSAALDEMFQHREGCVPRYHKALLLLEGLQHMLSDQADIENVTKCKLCIERRLSALLTGICA

SEQ ID NO: 1033629 - protein, 105 aa, Homo sapiens
MQTHARAPQARAPDHVAAQVWTSAGELAPGGVGPCARGRGSSLFKRSSGDRQQRHRVLSALDTSCNLSHFIPKTCLIFMQLIFSLKEKTCRCLRIGFGRARTGPG

SEQ ID NO: 1033630 - protein, 230 aa, Homo sapiens
LKPVEGEGSVRETPRVPSPQPSRALTLGDVLDVGLVREHVLQPLQEQQGLVERGTQPLTVLEHLVQGSRLHHLHSVAEDEPLGSDAVNAVQEPLLVQEEALQPQAQPRRTGKGLRPLPTQSQSELLLRAGQQALCPGRACGLGVPQSPGASPSEIPTQLCQSPKHFMHIETEPGPHQGLLGSDSWQWPGVCTYTYADTCQGPPSPSTGPRCCPGLDLSGRTGSGGSGALR

SEQ ID NO: 1033631 - protein, 257 aa, Homo sapiens
MEPGRGGTETVGKFEFSRKDLIGHGAFAVVFKGRHREKHDLEVAVKCINKKNLAKSQTLLGKEIKILKELKHENIVALYDFQEMANSVYLVMEYCNGGDLADYLHAMRTLSEDTIRLFLQQIAGAMRLLHSKGIIHRDLKPQNILLSNPAGRRANPNSIRVKIADFGFARYLQSNMMAATLCGSPMYMAPEVIMSQHYDGKADLWSIGTIVYQSAGGSGGAMDPCGGFQGHTPHNRQKYTHVCFSLQYLKYCHCAWT

SEQ ID NO: 1033632 - protein, 376 aa, Homo sapiens
AVRSIVICCGSETMALAVFSTSRLTDLLLKAAFGTQAPDPGSTESLQEKPMEIAPSAGFGGSLHPGARAGGTSSPSPVVFTVGSPPSGSTPPQGPRTRMFSAGPTGSASSSARHLVPGPCSEAPAPELPAPGHGCSFADPIAANLEGAVTFEAPDLPEETLMEQEHTEILRGLRFTLLFVQHVLEIAALKGSASEAAGGPEYQLQESVVADQISLLSREWGFAEQLVLYLKVAELLSSGLQSAIDQIRAGKLCLSSTVKQVVRRLNELYKASVVSCQGLSLRLQRFFLDKQRLLDRIHSITAERLIFSHAVQMVQSAALDEMFQHREGCVPRYHKALLLLEGLQHMLSDQADIENVTKCKLCIERRLSALLTGICA

SEQ ID NO: 1033633 - protein, 586 aa, Homo sapiens
MEPGRGGTETVGKFEFSRKDLIGHGAFAVVFKGRHREKHDLEVAVKCINKKNLAKSQTLLGKEIKILKELKHENIVALYDFQEMANSVYLVMEYCNGGDLADYLHAMRTLSEDTIRLFLQQIAGAMRLLHSKGIIHRDLKPQNILLSNPAGRRANPNSIRVKIADFGFARYLQSNMMAATLCGSPMYMAPEVIMSQHYDGKADLWSIGTIVYQCLTGKAPFQASSPQDLRLFYEKNKTLVPTIPRETSAPLRQLLLALLQRNHKDRMDFDEFFHHPFLDASPSVRKSPPVPVPSYPSSGSGSSSSSSSTSHLASPPSLGEMQQLQKTLASPADTAGFLHSSRDSGGSKDSSCDTDDFVMVPAQFPGDLVAEAPSAKPPPDSLMCSGSSLVASAGLESHGRTPSPSPPCSSSPSPSGRAGPFSSSRCGASVPIPVPTQVQNYQRIERNLQSPTQFQTPRSSAIRRSGSTSPLGFARASPSPPAHAEHGGVLARKMSLGGGRPYTPSPQVGTIPERPGWSGTPSPQGAEMRGGRSPRPGSSAPEHSPRTSGLGCRLHSAPNLSDIENVTKCKLCIERRLSALLTGICA

SEQ ID NO: 1033634 - protein, 78 aa, Homo sapiens
PYLGLEADEGRVLGTHLSCCCHREGRQGTATNTGVPSTLPTWAWKQMRGILHAKKKVTCAKAPRPALTVSFDVSSSAG

SEQ ID NO: 1033635 - protein, 1050 aa, Homo sapiens
MEPGRGGTETVGKFEFSRKDLIGHGAFAVVFKGRHREKHDLEVAVKCINKKNLAKSQTLLGKEIKILKELKHENIVALYDFQEMANSVYLVMEYCNGGDLADYLHAMRTLSEDTIRLFLQQIAGAMRLLHSKGIIHRDLKPQNILLSNPAGRRANPNSIRVKIADFGFARYLQSNMMAATLCGSPMYMAPEVIMSQHYDGKADLWSIGTIVYQCLTGKAPFQASSPQDLRLFYEKNKTLVPTIPRETSAPLRQLLLALLQRNHKDRMDFDEFFHHPFLDASPSVRKSPPVPVPSYPSSGSGSSSSSSSTSHLASPPSLGEMQQLQKTLASPADTAGFLHSSRDSGGSKDSSCDTDDFVMVPAQFPGDLVAEAPSAKPPPDSLMCSGSSLVASAGLESHGRTPSPSPPCSSSPSPSGRAGPFSSSRCGASVPIPVPTQVQNYQRIERNLQSPTQFQTPRSSAIRRSGSTSPLGFARASPSPPAHAEHGGVLARKMSLGGGRPYTPSPQVGTIPERPGWSGTPSPQGAEMRGGRSPRPGSSAPEHSPRTSGLGCRLHSAPNLSDLHVVRPKLPKPPTDPLGAVFSPPQASPPQPSHGLQSCRNLRGSPKLPDFLQRNPLPPILGSPTKAVPSFDFPKTPSSQNLLALLARQGVVMTPPRNRTLPDLSEVGPFHGQPLGPGLRPGEDPKGPFGRSFSTSRLTDLLLKAAFGTQAPDPGSTESLQEKPMEIAPSAGFGGSLHPGARAGGTSSPSPVVFTVGSPPSGSTPPQGPRTRMFSAGPTGSASSSARHLVPGPCSEAPAPELPAPGHGCSFADPIAANLEGAVTFEAPDLPEETLMEQEHTEILRGLRFTLLFVQHVLEIAALKGSASEAAGGPEYQLQESVVADQISLLSREWGFAEQLVLYLKVAELLSSGLQSAIDQIRAGKLCLSSTVKQVVRRLNELYKASVVSCQGLSLRLQRFFLDKQRLLDRIHSITAERLIFSHAVQMVQSAALDEMFQHREGCVPRYHKALLLLEGLQHMLSDQADIENVTKCKLCIERRLSALLTGICA

SEQ ID NO: 1033636 - protein, 406 aa, Homo sapiens
SGGLAGGAGPRRRRQVAWGTGRRGWERVGGREAGAARPQDLELRLRLPAALPAMRLPRRAALGLLPLLLLLPPAPEAAKKPTPCHRCRGLVDKFNQGMVDTAKKNFGGGNTAWEEKTLSKYESSEIRLLEILEGLCESSDFECNQMLEAQEEHLEAWWLQLKSEYPDLFEWFCVKTLKVCCSPGTYGPDCLACQGGSQRPCSGNGHCSGDGSRQGDGSCRCHMGYQGPLCTDCMDGYFSSLRNETHSICTACDESCKTCSGLTNRDCGECEVGWVLDEGACVDVDECAAEPPPCSAAQFCKNANGSYTCEECDSSCVGCTGEGPGNCKECISGYAREHGQCADVDECSLAEKTCVRKNENCYNTPGSYVCVCPDGFEETEDACVPPAEAEATEGESPTQLPSREDL

SEQ ID NO: 1033637 - protein, 386 aa, Homo sapiens
SGGLAGGAGPRRRRQVAWGTGRRGWERVGGREAGAARPQDLELRLRLPAALPAMRLPRRAALGLLPLLLLLPPAPEAAKKPTPCHRCRGLVDKFNQGMVDTAKKNFGGGNTAWEEKTLSKYESSEIRLLEILEGLCESSDFECNQMLEAQEEHLEAWWLQLKSEYPDLFEWFCVKTLKVCCSQDRPLRFLPALLSVSWMLAWRGPRMDPWPEHAHPARLQLQSMDSCLLSACDESCKTCSGLTNRDCGECEVGWVLDEGACVDVDECAAEPPPCSAAQFCKNANGSYTCEECDSSCVGCTGEGPGNCKECISGYAREHGQCADVDECSLAEKTCVRKNENCYNTPGSYVCVCPDGFEETEDACVPPAEAEATEGESPTQLPSREDL

SEQ ID NO: 1033638 - protein, 237 aa, Homo sapiens
EKTQILAAPVPCACRGLTGTGALCMSGSDAGSLLQSVTPAVWAAQGKAQETVKSVSLATRGSTDSVQVSDGAVLDAGGPFPSDHDVNGPSRYCQGWEAVETRPADVAPPGSLCTRPEVHVDTEAVGVGDGLCMADPGVDGAAAPASRRWPRSPGPPPLLSLQLLGGDCPEAEGQACMVVGCLGEPWAWMEPGGESGFPGQVRWLTPVNPALWEAERGGSRGQEIETILANTVKPHLY

SEQ ID NO: 1033639 - protein, 455 aa, Homo sapiens
SGGLAGGAGPRRRRQVAWGTGRRGWERVGGREAGAARPQDLELRLRLPAALPAMRLPRRAALGLLPLLLLLPPAPEAAKKPTPCHRCRGLVDKFNQGMVDTAKKNFGGGNTAWEEKTLSKYESSEIRLLEILEGLCESSDFECNQMLEAQEEHLEAWWLQLKSEYPDLFEWFCVKTLKVCCSPGTYGPDCLACQGGSQRPCSGNGHCSGDGSRQGDGSCRCHMGYQGPLCTDCMDGYFSSLRNETHSICTVRTGLSDSYPPCCLSLGCWRGVGHAWIRGRNTHTQPGYSSRVWIAAFSPACDESCKTCSGLTNRDCGECEVGWVLDEGACVDVDECAAEPPPCSAAQFCKNANGSYTCEECDSSCVGCTGEGPGNCKECISGYAREHGQCADVDECSLAEKTCVRKNENCYNTPGSYVCVCPDGFEETEDACVPPAEAEATEGESPTQLPSREDL

SEQ ID NO: 1033640 - protein, 321 aa, Homo sapiens
MRLPRRAALGLLPLLLLLPPAPEAAKKPTPCHRCRGLVDKFNQGMVDTAKKNFGGGNTAWEEKTLSKYESSEIRLLEILEGLCESSDFECNQMLEAQEEHLEAWWLQLKSEYPDLFEWFCVKTLKVCCSPGTYGPDCLACQGGSQRPCSGNGHCSGDGSRQGDGSCRCHMGYQGPLCTDCMDGYFSSLRNETHSICTACDESCKTCSGLTNRDCGECEVGWVLDEGACVDVDECAAEPPPCSAAQFCKNANGSYTCEDVDECSLAEKTCVRKNENCYNTPGSYVCVCPDGFEETEDACVPPAEAEATEGESPTQLPSREDL

SEQ ID NO: 1033641 - protein, 775 aa, Homo sapiens
MAALDSLSLFTSLGLSEQKARETLKNSALSAQLREAATQAQQTLGSTIDKATGILLYGLASRLRDTRRLSFLVSYIASKKIHTEPQLSAALEYVRSHPLDPIDTVDFERECGVGVIVTPEQIEEAVEAAINRHRPQLLVERYHFNMGLLMGEARAVLKWADGKMIKNEVDMQVLHLLGPKLEADLEKKFKVAKARLEETDRRTAKDVVENGETADQTLSLMEQLRGEALKFHKPGENYKTPGYVVTPHTMNLLKQHLEITGGQVRTRFPPEPNGILHIGHAKAINFNFGYAKANNGICFLRFDDTNPEKEEAKFFTAICDMVAWLGYTPYKVTYASDYFDQLYAWAVELIRRGLAYVCHQRGEELKGHNTLPSPWRDRPMEESLLLFEAMRKGKFSEGEATLRMKLVMEDGKMDPVAYRVKYTPHHRTGDKWCIYPTYDYTHCLCDSIEHITHSLCTKEFQARRSSYFWLCNALDVYCPVQWEYGRLNLHYAVVSKRKILQLVATGAVRDWDDPRLFTLTALRRRGFPPEAINNFCARVGVTVAQTTMEPHLLEACVRDVLNDTAPRAMAVLESLRVIITNFPAAKSLDIQVPNFPADETKGFHQVPFAPIVFIERTDFKEEPEPGFKRLAWGQPVGLRHTGYVIELQHVVKGPSGCVESLEVTCRRADAGEKPKAFIHWVSQPLMCEVRLYERLFQHKNPEDPTEVPGGFLSDLNLASLHVVDAALVDCSVALAKPFDKFQFERLGYFSVDPDSHQGKLVFNRTVTLKEDPGKV

SEQ ID NO: 1033642 - protein, 378 aa, Homo sapiens
MNLLKQHLEITGGQVRTRFPPEPNGILHIGHAKAINFNFGYAKANNGICFLRFDDTNPEKEEAKFFTAICDMVAWLGYTPYKVTYASDYFDQLYAWAVELIRRGLAYVCHQRGEELKGHNTLPSPWRDRPMEESLLLFEAMRKGKFSEGEATLRMKLVMEDGKMDPVAYRVKYTPHHRTGDKWCIYPTYDYTHCLCDSIEHITHSLCTKEFQARRSSYFWLCNALDVYCPVQWEYGRLNLHYAVVSKRKILQLVATGAVRDWDDPRLFTLTALRRRGFPPEAINNFCARVGVTVAQTTMEPHLLEACVRDVLNDTAPRAMAVLESLRVIITNFPAAKSLDIQVPNFPADETKGFHQVPFAPIVFIERTDFKGGARARI

SEQ ID NO: 1033643 - protein, 378 aa, Homo sapiens; identical to SEQ ID NO: 1033642

SEQ ID NO: 1033644 - protein, 378 aa, Homo sapiens; identical to SEQ ID NO: 1033642

SEQ ID NO: 1033645 - protein, 378 aa, Homo sapiens; identical to SEQ ID NO: 1033642

SEQ ID NO: 1033646 - protein, 378 aa, Homo sapiens; identical to SEQ ID NO: 1033642

SEQ ID NO: 1033647 - protein, 612 aa, Homo sapiens
MIKNEVDMQVLHLLGPKLEADLEKKFKVAKARLEETDRRTAKDVVENGETADQTLSLMEQLRGEALKFHKPGENYKTPGYVVTPHTMNLLKQHLEITGGQVRTRFPPEPNGILHIGHAKAINFNFGYAKANNGICFLRFDDTNPEKEEAKFFTAICDMVAWLGYTPYKVTYASDYFDQLYAWAVELIRRGLAYVCHQRGEELKGHNTLPSPWRDRPMEESLLLFEAMRKGKFSEGEATLRMKLVMEDGKMDPVAYRVKYTPHHRTGDKWCIYPTYDYTHCLCDSIEHITHSLCTKEFQARRSSYFWLCNALDVYCPVQWEYGRLNLHYAVVSKRKILQLVATGAVRDWDDPRLFTLTALRRRGFPPEAINNFCARVGVTVAQTTMEPHLLEACVRDVLNDTAPRAMAVLESLRVIITNFPAAKSLDIQVPNFPADETKGFHQVPFAPIVFIERTDFKEEPEPGFKRLAWGQPVGLRHTGYVIELQHVVKGPSGCVESLEVTCRRADAGEKPKAFIHWVSQPLMCEVRLYERLFQHKNPEDPTEVPGGFLSDLNLASLHVVDAALVDCSVALAKPFDKFQFERLGYFSVDPDSHQGKLVFNRTVTLKEDPGKV

SEQ ID NO: 1033648 - protein, 306 aa, Homo sapiens
MNLLKQHLEITGGQVRTRFPPEPNGILHIGHAKAINFNFGYAKANNGICFLRFDDTNPEKEEAKFFTAICDMVAWLGYTPYKVTYASDYFDQLYAWAVELIRRGLAYVCHQRGEELKGHNTLPSPWRDRPMEESLLLFEAMRKGKFSEGEATLRMKLVMEDGKMDPVAYRVKYTPHHRTGDKWCIYPTYDYTHCLCDSIEHITHSLCTKEFQARRSSYFWLCNALDVYCPVQWEYGRLNLHYAVVSKRKILQLVATGAVRDWDDPRLFTLTALRRRGFPPEAINNFCARVGVTVAQTTMEPQRQCV

SEQ ID NO: 1033649 - protein, 612 aa, Homo sapiens; identical to SEQ ID NO: 1033647

SEQ ID NO: 1033650 - protein, 407 aa, Homo sapiens
AENSQSKTTPVSSSCLRDEHLPSRSVANISKSPAACQHPFKFPVPRRRKQSPRKGRFVRPVLFKGDRRPWSAPPPPAKEGPHWLSPEASLSLVSEWMPTCRLGPKFLLVSGVSAMAALDSLSLFTSLGLSEQKARETLKNSALSAQLREAATQAQQTLGSTIDKATGILLYGLASRLRDTRRLSFLVSYIASKKIHTEPQLSAALEYVRSHPLDPIDTVDFERECGVGVIVTPEQIEEAVEAAINRHRPQLLVERYHFNMGLLMGEARAVLKWADGKMIKNEVDMQVLHLLGPKLEADLEKKFKVAKARLEETDRRTAKDVVENGETADQTLSLMEQLRGEALKFHKPGENYKTPGYVVTPTHHESTKAAPGDYWWAGTYPVPARTQWNPAYWTCQSYSLGVTAFDV

SEQ ID NO: 1033651 - protein, 378 aa, Homo sapiens; identical to SEQ ID NO: 1033642

SEQ ID NO: 1033652 - protein, 378 aa, Homo sapiens; identical to SEQ ID NO: 1033642

SEQ ID NO: 1033653 - protein, 378 aa, Homo sapiens; identical to SEQ ID NO: 1033642

SEQ ID NO: 1033654 - protein, 378 aa, Homo sapiens; identical to SEQ ID NO: 1033642

SEQ ID NO: 1033655 - protein, 378 aa, Homo sapiens; identical to SEQ ID NO: 1033642

SEQ ID NO: 1033656 - protein, 405 aa, Homo sapiens
MNLLKQHLEITGGQVRTRFPPEPNGILHIGHAKAINFNFGYAKANNGICFLRFDDTNPEKEEAKFFTAICDMVAWLGYTPYKVTYASDYFDQLYAWAVELIRRGLAYVCHQRGEELKGHNTLPSPWRDRPMEESLLLFEAMRKGKFSEGEATLRMKLVMEDGKMDPVAYRVKYTPHHRTGDKWCIYPTYDYTHCLCDSIEHITHSLCTKEFQARRSSYFWLCNALDVYCPVQWEYGRLNLHYAVVSKRKILQLVATGAVRDWDDPRLFTLTALRRRGFPPEAINNFCARVGVTVAQTTMEPHLLEACVRDVLNDTAPRAMAVLESLRVIITNFPAAKSLDIQVPNFPADETKGFHQVPFAPIVFIERTDFKEVNCGGGGSRLLLSLVLGTFHLLISVSPSTSCFR

SEQ ID NO: 1033657 - protein, 416 aa, Homo sapiens
AENSQSKTTPVSSSCLRDEHLPSRSVANISKSPAACQHPFKFPVPRRRKQSPRKGRFVRPVLFKGDRRPWSAPPPPAKEGPHWLSPEASLSLVSEWMPTCRLGPKFLLVSGVSAMAALDSLSLFTSLGLSEQKARETLKNSALSAQLREAATQAQQTLGSTIDKATGILLYGLASRLRDTRRLSFLVSYIASKKIHTEPQLSAALEYVRSHPLDPIDTVDFERECGVGVIVTPEQIEEAVEAAINRHRPQLLVERYHFNMGLLMGEARAVLKWADGKMIKNEVDMQVLHLLGPKLEADLEKKFKVAKARLEETDRRTAKDVVENGETADQTLSLMEQLRGEALKFHKPGENYKTPGYVVTPTHHESTKAAPGDYWWAGTYPVPARTQWNPAYWTCQSHQFQLWLCQGQQWHLFSAF

SEQ ID NO: 1033658 - protein, 346 aa, Homo sapiens
MWEFTDGATFQANNGICFLRFDDTNPEKEEAKFFTAICDMVAWLGYTPYKVTYASDYFDQLYAWAVELIRRGLAYVCHQRGEELKGHNTLPSPWRDRPMEESLLLFEAMRKGKFSEGEATLRMKLVMEDGKMDPVAYRVKYTPHHRTGDKWCIYPTYDYTHCLCDSIEHITHSLCTKEFQARRSSYFWLCNALDVYCPVQWEYGRLNLHYAVVSKRKILQLVATGAVRDWDDPRLFTLTALRRRGFPPEAINNFCARVGVTVAQTTMEPHLLEACVRDVLNDTAPRAMAVLESLRVIITNFPAAKSLDIQVPNFPADETKGFHQVPFAPIVFIERTDFKGGARARI

SEQ ID NO: 1033659 - protein, 287 aa, Homo sapiens
AENSQSKTTPVSSSCLRDEHLPSRSVANISKSPAACQHPFKFPVPRRRKQSPRKGRFVRPVLFKGDRRPWSAPPPPAKEGPHWLSPEASLSLVSEWMPTCRLGPKFLLVSGVSAMAALDSLSLFTSYFWLCNALDVYCPVQWEYGRLNLHYAVVSKRKILQLVATGAVRDWDDPRLFTLTALRRRGFPPEAINNFCARVGVTVAQTTMEPHLLEACVRDVLNDTAPRAMAVLESLRVIITNFPAAKSLDIQVPNFPADETKGFHQVPFAPIVFIERTDFKGGARARI

SEQ ID NO: 1033660 - protein, 775 aa, Homo sapiens; identical to SEQ ID NO: 1033641

SEQ ID NO: 1033661 - protein, 612 aa, Homo sapiens; identical to SEQ ID NO: 1033647

SEQ ID NO: 1033662 - protein, 612 aa, Homo sapiens; identical to SEQ ID NO: 1033647

SEQ ID NO: 1033663 - protein, 612 aa, Homo sapiens; identical to SEQ ID NO: 1033647

SEQ ID NO: 1033664 - protein, 137 aa, Homo sapiens
RLGTRYFLWQHVVKGPSGCVESLEVTCRRADAGEKPKAFIHWVSQPLMCEVRLYERLFQHKNPEDPTEVPGGFLSDLNLASLHVVDAALVDCSVALAKPFDKFQFERLGYFSVDPDSHQGKLVFNRTVTLKEDPGKV

SEQ ID NO: 1033665 - protein, 775 aa, Homo sapiens; identical to SEQ ID NO: 1033641

SEQ ID NO: 1033666 - protein, 378 aa, Homo sapiens; identical to SEQ ID NO: 1033642

SEQ ID NO: 1033667 - protein, 405 aa, Homo sapiens; identical to SEQ ID NO: 1033656

SEQ ID NO: 1033668 - protein, 612 aa, Homo sapiens; identical to SEQ ID NO: 1033647

SEQ ID NO: 1033669 - protein, 352 aa, Homo sapiens
MNLLKQHLEITGGQVRTRFPPEPNGILHIGHAKAINFNFGYAKANNGICFLRFDDTNPEKEEAKFFTAICDMVAWLGYTPYKVTYASDYFDQLYAWAVELIRRGLAYVCHQRGEELKGHNTLPSPWRDRPMEESLLLFEAMRKGKFSEGEATLRMKLVMEDGKMDPVAYRVKYTPHHRTGDKWCIYPTYDYTHCLCDSIEHITHSLCTKEFQARRSSYFWLCNALDVYCPVQWEYGRLNLHYAVVSKRKILQLVATGAVRDWDDPRLFTLTALRRRGFPPEAINNFCARVGVTVAQTTMEPHLLLCAGRAEMNNPTAMGGWRTTGDITNFLPPRLGIQGPTSNLNRSIRSLA

SEQ ID NO: 1033670 - protein, 612 aa, Homo sapiens; identical to SEQ ID NO: 1033647

SEQ ID NO: 1033671 - protein, 416 aa, Homo sapiens; identical to SEQ ID NO: 1033657

SEQ ID NO: 1033672 - protein, 435 aa, Homo sapiens
AFLVLPGVVSRAPVAACWEETGARLGRMELATRYQIPKEVADIFNAPSDDEEFVGFRDDVPMETLSSEESCDSFDSLESGKQVVESDLSDDGKASLVSEEEEDEEEDKATPRRSRSRRSSIGLRVAFQFPTKKLANKPDKNSSSEQLFSSARLQNEKKTILERKKDCRQVIQREDSTSESEDDSRDESQESSDALLKRTMNIKENKAMLAQLLAELNSMPDFFPVRTPTSASRKKTVRRAFSEGQITRRMNPTRSARPPEKFALENFTVSAAKFAEEFYSFRRRKTIGGKCREYRRRHRISSFRPVEDITEEDLENVAITVRDKIYDKVLGNTCHQCRQKTIDTKTVCRNQGCCGVRGQFCGPCLRNRYGEDVRSALLDPDWVCPPCRGICNCSYCRKRDGRCATGILIHLAKFYGYDNVKEYLESLQKELVEDN

SEQ ID NO: 1033673 - protein, 102 aa, Homo sapiens
  misc_feature (1)..(1): Xaa can be any naturally occurring amino acid
  misc_feature (4)..(4): Xaa can be any naturally occurring amino acid
  misc_feature (11)..(11): Xaa can be any naturally occurring amino acid
XKHXPFILRRXRTKTGGGLFLIRGATPCGPCLRNRYGEDVRSALLDPDWVCPPCRGICNCSYCRKRDGRCATGILIHLAKFYGYDNVKEYLESLQKELVEDN

SEQ ID NO: 1033674 - protein, 481 aa, Homo sapiens
AFLVLPGVVSRAPVAACWEETGARLGRMELATRYQIPKEVADIFNAPSDDEEFVGFRDDVPMETLSSEESCDSFDSLESGKQQDVRFHSKYFTEELRRIFIEDTDSETEDFAGFTQSDLNGKTNPEVMVVESDLSDDGKASLVSEEEEDEEEDKATPRRSRSRRSSIGLRVAFQFPTKKLANKPDKNSSSEQLFSSARLQNEKKTILERKKDCRQVIQREDSTSESEDDSRDESQESSDALLKRTMNIKENKAMLAQLLAELNSMPDFFPVRTPTSASRKKTVRRAFSEGQITRRMNPTRSARPPEKFALENFTVSAAKFAEEFYSFRRRKTIGGKCREYRRRHRISSFRPVEDITEEDLENVAITVRDKIYDKVLGNTCHQCRQKTIDTKTVCRNQGCCGVRGQFCGPCLRNRYGEDVRSALLDPDWVCPPCRGICNCSYCRKRDGRCATGILIHLAKFYGYDNVKEYLESLQKELVEDN

SEQ ID NO: 1033675 - protein, 472 aa, Homo sapiens
AFLVLPGVVSRAPVAACWEETGARLGRMELATRYQIPKEVADIFNAPSDDEEFVGFRDDVPMETLSSEESCDSFDSLESGKQQDVRFHSKYFTEELRRIFIEDTDSETEDFAGFTQSDLNGKTNPEVMVVESDLSDDGKASLVSEEEEDEEEDKATPRRSRSRRSSIGLRVAFQFPTKKLANKPDKNSSSEQLFSSARLQNEKKTILERKKDCRQVIQREDSTSESEDDSRDESQESSDALLKRTMNIKENKAMLAQLLAELNSMPDFFPVRTPTSASRKKTVRRAFSEGQITRRMNPTRSARPPEKFALENFTVSAAKFAEEFYSFRRRKTIGGKCREYRRRHRISSFRPVEDITEEDLENVAITVRDKIYDKVLGNTCHQCRQKTIDTKTVCRNQGCCGVRGQFCGPCLRNRYGEDVRSALLDPDWVCPPCRGICNCSYCRKRDGRCATGILIHLAKFYGYDNVKEYLES

SEQ ID NO: 1033676 - protein, 143 aa, Homo sapiens
MRHAEKNTHPANGKNNTNREKTIREKHPNNQGGGRQIVRHNTPRKKSKLLMRGDTYTHCSRGLHRWVHNNSKDYHAEGERKEIFTSEGVYLSQYPRRDDRQTIDTKPSTQQSDATGTKNTGARSGHRTTKTQMKRHDSKHTRL

SEQ ID NO: 1033677 - protein, 115 aa, Homo sapiens
MRRERRGDVAVLQSDCLPLQAQPSAMACPLDQAIGLLVAIFHKYSGREGDKHTLSKKELKELIQKELTIGSKLQDAEIARLMEDLDRNKDQEVNFQEYVTFLGALALIYNEALKG

SEQ ID NO: 1033678 - protein, 46 aa, Homo sapiens
MACPLDQAIGLLVAIFHKYSGREGDKNTVYNTYHSQTVSKSCVPSL

SEQ ID NO: 1033679 - protein, 199 aa, Homo sapiens
HWISGSGETRHQACSGHCWAPPSRPNPEQPRAGGVESRGGNPANVLLCKPLCTGVGCGLGLGLGGVGLAELASGAPTAIRPVGLRHSPSPRPLASHLAASLPLQAQPSAMACPLDQAIGLLVAIFHKYSGREGDKHTLSKKELKELIQKELTIGSKLQDAEIARLMEDLDRNKDQEVNFQEYVTFLGALALIYNEALKG

SEQ ID NO: 1033680 - protein, 60 aa, Homo sapiens
MACPLDQAIGLLVAIFHKYSGREGDKHTLSKKEIHMVQADTALVGHVQEVLRVHLIQQSD

SEQ ID NO: 1033681 - protein, 199 aa, Homo sapiens; identical to SEQ ID NO: 1033679

SEQ ID NO: 1033682 - protein, 119 aa, Homo sapiens [sequence omitted]

SEQ ID NO: 1033683 - protein, 73 aa, Homo sapiens
MAFKDTGKTPVEPEVAIHRIRITLTSRNVKSLEKLRVELDKLTTWYENLSIHRPAVSGKRLQDLCSRQELRRG

SEQ ID NO: 1033684 - protein, 119 aa, Homo sapiens [sequence omitted]

SEQ ID NO: 1033685 - protein, 146 aa, Homo sapiens
MAFKDTGKTPVEPEVAIHRIRITLTSRNVKSLEKVCADLIRGAKEKNLKVKGPVRMPTKTLRITTRKTPCGEGSKTWDRFQMRIHKRLIDLHSPSEIVKQITSISIEPGVESLSLSPRLDVHWRDLSSLQPLPTWVQVILVSQPPE

SEQ ID NO: 1033686 - protein, 112 aa, Homo sapiens
MLSQPRISYDAQFEVIKGQTIEVRCESISGTLPISYQLLKTSKVLENSTKNSNDPAVFKDNPTEDVEYQCVADNCHSHAKMLSEVLRVKVIGKLLCCEKKSCGLGAFFHAQG

SEQ ID NO: 1033687 - protein, 728 aa, Homo sapiens [sequence omitted]

SEQ ID NO: 1033688 - protein, 256 aa, Homo sapiens
MWLGVLLTLLLCSSLEGQENSFTINSVDMKSLPDWTVQNGKNLTLQCFADVSTTSHVKPQHQMLFYKDDVLFYNISSMKSTESYFIPEVRIYDSGTYKCTVIVNNKEKTTAEYQVLVEGVPSPVVIIGVIIALLIIAAKCYFLRKAKAKQMPVEMSRPAVPLLNSNNEKMSDPNMEANSHYGHNDDVRNHAMKPINDNKEPLNSDVQYTEVQVSSAESHKDLGKKDTETVYSEVRKAVPDAVESRYSRTEGSLDGT

SEQ ID NO: 1033689 - protein, 191 aa, Homo sapiens [sequence omitted]

SEQ ID NO: 1033690 - protein, 728 aa, Homo sapiens [sequence omitted]

SEQ ID NO: 1033691 - protein, 280 aa, Homo sapiens
MWLGVLLTLLLCSSLEGQENSFTINSVDMKSLPDWTVQNGKNLTLQCFADVSTTSHVKPQHQMLFYKDDVLFYNISSMKSTESYFIPEVRIYDSGTYKCTVIVNNKEKTTAEYQVLVEGVPSPRVTLDKKEAIQGGIVRVNCSVPEEKAPIHFTIEKLELNEKMVKLKREKNSRDQNFVILEFPVEEQDRVLSFRCQARIISGIHMQTSESTKSELVTVTESFSTPKFHISPTGMIMEGAQLHIKCTIQVTHLAQEFPEIIIQKDKAIVAHNRHGNKAVY

SEQ ID NO: 1033692 - protein, 309 aa, Homo sapiens
TREPEPGDLLEPRRHTFRKPEIIPLHSSLGDKSGTLSQRKKKKVEQCLSHVPLPLPFFAQCESFSCFSAPVDEVQISILSSKVVESGEDIVLQCAVNEGSGPITYKFYREKEGKPFYQMTSNATQAFWTKQKASKEQEGEYYCTAFNRANHASSVPRSKILTVRVILAPWKKGLIAVVIIGVIIALLIIAAKCYFLRKAKAKQMPVEMSRPAVPLLNSNNEKMSDPNMEANSHYGHNDDVRNHAMKPINDNKEPLNSDVQYTEVQVSSAESHKDLGKKDTETVYSEVRKAVPDAVESRYSRTEGSLDGT

SEQ ID NO: 1033693 - protein, 728 aa, Homo sapiens [sequence omitted]

SEQ ID NO: 1033694 - protein, 252 aa, Homo sapiens [sequence omitted]

SEQ ID NO: 1033695 - protein, 25 aa, Homo sapiens [sequence omitted]

SEQ ID NO: 1033696 - protein, 25 aa, Homo sapiens [sequence omitted]

SEQ ID NO: 1033697 - protein, 66 aa, Homo sapiens
  misc_feature (4)..(4): Xaa can be any naturally occurring amino acid
LRWXADCTIQSSDDSRHLASSQQTNCSLSLFPCRNLCAMRAKWRKKRMRKAEAQKKKDEAEVQVNR

SEQ ID NO: 1033698 - protein, 102 aa, Homo sapiens
FFSTGQKEPLLLFMIATYAFSGAETWNARRWGCWYKLWDCMLLSRACLNGSRTSSPSDRRSPLRPTLLINKMPMLVLCPGTCDILDYFCVYLWPSVTRGSLE

SEQ ID NO: 1033699 - protein, 25 aa, Homo sapiens [sequence omitted]

SEQ ID NO: 1033700 - protein, 25 aa, Homo sapiens [sequence omitted]

SEQ ID NO: 1033701 - protein, 25 aa, Homo sapiens [sequence omitted]

SEQ ID NO: 1033702 - protein, 25 aa, Homo sapiens [sequence omitted]

SEQ ID NO: 1033703 - protein, 25 aa, Homo sapiens [sequence omitted]

SEQ ID NO: 1033704 - protein, 25 aa, Homo sapiens [sequence omitted]

SEQ ID NO: 1033705 - protein, 25 aa, Homo sapiens [sequence omitted]

SEQ ID NO: 1033706 - protein, 25 aa, Homo sapiens [sequence omitted]

SEQ ID NO: 1033707 - protein, 25 aa, Homo sapiens [sequence omitted]

SEQ ID NO: 1033708 - protein, 43 aa, Homo sapiens
MLLSRACLNGSRTSSPSDRRSPLRPTTCTDEPPKEPPKEPPDE

SEQ ID NO: 1033709 - protein, 66 aa, Homo sapiens; identical to SEQ ID NO: 1033697
  misc_feature (4)..(4): Xaa can be any naturally occurring amino acid

SEQ ID NO: 1033710 - protein, 66 aa, Homo sapiens; identical to SEQ ID NO: 1033697
  misc_feature (4)..(4): Xaa can be any naturally occurring amino acid

SEQ ID NO: 1033711 - protein, 44 aa, Homo sapiens
MLLSRACLNGSRTSSPSDRRSPLRPTHKEPRKGHTKGHTMRHTR

SEQ ID NO: 1033712 - protein, 54 aa, Homo sapiens
MPDAGDAGTSCGTACYCLELVSMDLVPHAPKEPSQCATQAPHHEPHEEPPSGDP

SEQ ID NO: 1033713 - protein, 25 aa, Homo sapiens [sequence omitted]

SEQ ID NO: 1033714 - protein, 25 aa, Homo sapiens [sequence omitted]

SEQ ID NO: 1033715 - protein, 25 aa, Homo sapiens [sequence omitted]

SEQ ID NO: 1033716 - protein, 25 aa, Homo sapiens [sequence omitted]

SEQ ID NO: 1033717 - protein, 25 aa, Homo sapiens [sequence omitted]

SEQ ID NO: 1033718 - protein, 25 aa, Homo sapiens [sequence omitted]

SEQ ID NO: 1033719 - protein, 25 aa, Homo sapiens [sequence omitted]

SEQ ID NO: 1033720 - protein, 25 aa, Homo sapiens [sequence omitted]

SEQ ID NO: 1033721 - protein, 25 aa, Homo sapiens [sequence omitted]

SEQ ID NO: 1033722 - protein, 25 aa, Homo sapiens [sequence omitted]

SEQ ID NO: 1033723 - protein, 25 aa, Homo sapiens [sequence omitted]

SEQ ID NO: 1033724 - protein, 25 aa, Homo sapiens [sequence omitted]

SEQ ID NO: 1033725 - protein, 25 aa, Homo sapiens [sequence omitted]

SEQ ID NO: 1033726 - protein, 66 aa, Homo sapiens; identical to SEQ ID NO: 1033697
  misc_feature (4)..(4): Xaa can be any naturally occurring amino acid

SEQ ID NO: 1033727 - protein, 25 aa, Homo sapiens [sequence omitted]

SEQ ID NO: 1033728 - protein, 64 aa, Homo sapiens
MLLSRACLNGSRTSSPSDRRSPLRPTLLINKMPMLVLCPGTCDILDYFCVYSWHYVQHWHNVHT

SEQ ID NO: 1033729 - protein, 25 aa, Homo sapiens [sequence omitted]

SEQ ID NO: 1033730 - protein, 95 aa, Homo sapiens
WNDTEKISMAPRRMTRKFVKRPYFEARGRPKPLLLLPITSATTAMGLTISSLFSRLFGKKQMRILMVGLDAAGKTTILYKLKLGEIVTTIPTMWF

SEQ ID NO: 1033731 - protein, 110 aa, Homo sapiens
GEPELPSKSPSRSSTGLFLCRIFIGTGATETFLPPSFFLRSFSSLSFSLPGSLKGESTGSPQTPSASAHHKCHYRHGPHYLLPLLPTIWQEADAHFDGWIGCCWQDNHSV

SEQ ID NO: 1033732 - protein, 118 aa, Homo sapiens
GEPELPSKSPSRSSTGLFLCRIFIGTGATETFLPPSFFLRSFSSLSFSLPGSLKGESTGSPQTPSASAHHKCHYRHGPHYLLPLLPTIWQEADAHFDGGSYFFVVDSNDREQNSGSSR

SEQ ID NO: 1033733 - protein, 116 aa, Homo sapiens
AGGINAECPLRPGQSPSRSSTGLFLCRIFIGTGATETFLPPSFFLRSFSSLSFSLPGSLKGESTGSPQTPSASAHHKCHYRHGPHYLLPLLPTIWQEADAHFDGWIGCCWQDNHSV

SEQ ID NO: 1033734 - protein, 631 aa, Homo sapiens
MDYSFDTTAEDPWVRISDCIKNLFSPIMSENHGHMPLQPNASLNEEEGTQGHPDGTPPKLDTANGTPKVYKSADSSTVKKGPPVAPKPAWFRQSLKGLRNRASDPRGLPDPALSTQPAPASREHLGSHIRASSSSSSIRQRISSFETFGSSQLPDKGAQRLSLQPSSGEAAKPLGKHEEGRFSGLLGRGAAPTLVPQQPEQVLSSGSPAASEARDPGVSESPPPRRQPNQKTLPPGPDPLLRLLSTQAEESQGPVLKMPSQRARSFPLTRSQSCETKLLDEKTSKLYSISSQVSSAVMKSLLCLPSSISCAQTPCIPKEGASPTSSSNEDSAANGSAETSALDTGFSLNLSELREYTEGLTEAKEDDDGDHSSLQSGQSVISLLSSEELKKLIEEVKVLDEATLKQLDGIHVTILHKEEGAGLGFSLAGGADLENKVITVHRVFPNGLASQEGTIQKGNEVLSINGKSLKGTTHHDALAILRQAREPRQAVIVTRKLTPEAMPDLNSSTDSAASASAASDVSVESTAEATVCTVTLEKMSAGLGFSLEGGKGSLHGDKPLTINRIFKGAASEQSETVQPGDEILQLGGTAMQGLTRFEAWNIIKALPDGPVTIVIRRKSLQSKETTAAGDS

SEQ ID NO: 1033735 - protein, 790 aa, Homo sapiens
  misc_feature (753)..(753): Xaa can be any naturally occurring amino acid
  misc_feature (755)..(756): Xaa can be any naturally occurring amino acid
  misc_feature (759)..(759): Xaa can be any naturally occurring amino acid
  misc_feature (763)..(763): Xaa can be any naturally occurring amino acid
AQESPPLPESRDSHPPLRLKKSFEILVRKPMSSKPKPPPRKYFKSDSDPQKSLEERENSSCSSGHTPPTCGQEARELLPLLLPQEDTAGRSPSASAGCPGPGIGPQTKSSTEGEPGWRRASPVTQTSPIKHPLLKRQARMDYSFDTTAEDPWVRISDCIKNLFSPIMSENHGHMPLQPNASLNEEEGTQGHPDGTPPKLDTANGTPKVYKSADSSTVKKGPPVAPKPAWFRQSLKGLRNRASDPRGLPDPALSTQPAPASREHLGSHIRASSSSSSIRQRISSFETFGSSQLPDKGAQRLSLQPSSGEAAKPLGKHEEGRFSGLLGRGAAPTLVPQQPEQVLSSGSPAASEARDPGVSESPPPGRQPNQKTLPPGPDPLLRLLSTQAEESQGPVLKMPSQRARSFPLTRSQSCETKLLDEKTSKLYSISSQVSSAVMKSLLCLPSSISCAQTPCIPKEGASPTSSSNEDSAANGSAETSALDTGFSLNLSELREYTEGLTEAKEDDDGDHSSLQSGQSVISLLSSEELKKLIEEVKVLDEATLKQLDGIHVTILHKEEGAGLGFSLAGGADLENKVITVHRVFPNGLASQEGTIQKGNEVLSINGKSLKGTTHHDALAILRQAREPRQAVIVTRKLTPEAMPDLNSSTDSAASASAASDVSVESTAEATVCTVTLEKMSAGLGFSLEGGKGSLHGDKPLTINRIFKGAASEQSETVQPGDEILQLGGTAMQGLTRFEAWNIIKALPDGPVPGXKXXWVXPNFXRENDCHQEKKPPVQGNHSCWRLLGRTC

SEQ ID NO: 1033736 - protein, 553 aa, Homo sapiens
AQESPPLPESRDSHPPLRLKKSFEILVRKPMSSKPKPPPRKYFKSDSDPQKSLEERENSSCSSGHTPPTCGQEARELLPLLLPQEDTAGRSPSASAGCPGPGIGPQTKSSTEGEPGWRRASPVTQTSPIKHPLLKRQARMDYSFDTTAEDPWVRISDCIKNLFSPIMSENHGHMPLQPNASLNEEEGTQGHPDGTPPKLDTANGTPKVYKSADSSTVKKGPPVAPKPAWFRQSLKGLRNRASDPRGLPDPALSTQPAPASREHLGSHIRASSSSSSIRQRISSFETFGSSQLPDKGAQRLSLQPSSGEAAKPLGKHEEGRFSGLLGRGAAPTLVPQQPEQVLSSGSPAASEARDPGVSESPPPGRQPNQKTLPPGPDPLLRLLSTQAEESQGPVLKMPSQRARSFPLTRSQSCETKLLDEKTSKLYSISSQVSSAVMKSLLCLPSSISCAQTPCIPKEGASPTSSSNEDSAANGSAETSALDTGFSLNLSELREYTEGLTEAKEDDDGDHSSLQSGQSVISLLSSEELKKLIEEVKVLDEATLKVGFLCKHLQ

SEQ ID NO: 1033737 - protein, 209 aa, Homo sapiens
MDWTCVISGPDFLWFAQVHRVFPNGLASQEGTIQKGNEVLSINGKSLKGTTHHDALAILRQAREPRQAVIVTRKLTPEAMPDLNSSTDSAASASAASDVSVESTAEATVCTVTLEKMSAGLGFSLEGGKGSLHGDKPLTINRIFKGAASEQSETVQPGDEILQLGGTAMQGLTRFEAWNIIKALPDGPVTIVIRRKSLQSKETTAAGDS

SEQ ID NO: 1033738 - protein, 197 aa, Homo sapiens [sequence omitted]

SEQ ID NO: 1033739 - protein, 631 aa, Homo sapiens; identical to SEQ ID NO: 1033734

SEQ ID NO: 1033740 - protein, 631 aa, Homo sapiens; identical to SEQ ID NO: 1033734

SEQ ID NO: 1033741 - protein, 631 aa, Homo sapiens; identical to SEQ ID NO: 1033734

SEQ ID NO: 1033742 - protein, 233 aa, Homo sapiens
MYVFPLQQLDGIHVTILHKEEGAGLGFSLAGGADLENKVITVHRVFPNGLASQEGTIQKGNEVLSINGKSLKGTTHHDALAILRQAREPRQAVIVTRKLTPEAMPDLNSSTDSAASASAASDVSVESTAEATVCTVTLEKMSAGLGFSLEGGKGSLHGDKPLTINRIFKGAASEQSETVQPGDEILQLGGTAMQGLTRFEAWNIIKALPDGPVTIVIRRKSLQSKETTAAGDS

SEQ ID NO: 1033743 - protein, 217 aa, Homo sapiens
MAPAASRLRAEAGLGALPRRALAQYLLFLRLYPVLTKAATSGILSALGNFLAQMIEKKRKKENSRSLDVGGPLRYAVYGFFFTGPLSHFFYFFMEHWIPPEVPLAGLRRLLLDRLVFAPAFLMLFFLIMNFLEGKDASAFAAKMRGGFWPALRMNWRVWTPLQFININYVPLKVRATGLSLCQHYFVSLFLPSFLPLSSPPPSPLLFSSLLSFVVFR

SEQ ID NO: 1033744 - protein, 195 aa, Homo sapiens
MAPAASRLRAEAGLGALPRRALAQYLLFLRLYPVLTKAATSGILSALGNFLAQMIEKKRKKENSRSLDVGGPLRYAVYGFFFTGPLSHFFYFFMEHWIPPEVPLAGLRRLLLDRLVFAPAFLMLFFLIMNFLEGKDASAFAAKMRGGFWPALRMNWRVWTPLQFININYVPLKFRVLFANLAALFWYAYLASLGK

SEQ ID NO: 1033745 - protein, 195 aa, Homo sapiens; identical to SEQ ID NO: 1033744

SEQ ID NO: 1033746 - protein, 217 aa, Homo sapiens
MAPGSRTSLLLAFALLCLPWLQEAGAVQTVPLSRLFDHAMLQAHRAHQLAIDTYQEFEETYIPKDQKYSFLHDSQTSFCFSDSIPTPSNMEETQQKSNLELLRISLLLIESWLEPVRFLRSMFANNLVYDTSDSDDYHLLKDLEEGIQTLMGRLEDGSRRTGQILKQTYSKFDTNSHNHDALLKNYGLLYCFRKDMDKVETFLRMVQCRSVEGSCGF

SEQ ID NO: 1033747 - protein, 217 aa, Homo sapiens; identical to SEQ ID NO: 1033746

SEQ ID NO: 1033748 - protein, 218 aa, Homo sapiens
MAPGSRTSLLLAFALLCLPWLQEAGAVQTVPLSRLFDHAMLQAHRAHQLAIDTYQEFEETYIPKDQKYSFLHDSQTSFCFSDSIPTPSNMEETQQKSNLELLRISLLLIESWLEPVRFLRSMFANNLVYDTSDSDDYHLLKDLEEGIQTLMGRLEDGSRRTGQILKQTYSKFDTNSHNHDALLKNYGLLYCFRKDMDKVETFLRMVQCRSVDGQRVCF

SEQ ID NO: 1033749 - protein, 215 aa, Homo sapiens
RSVRTSDVSPTPVWFAVCCLVQAGAVQRSLSRLFDHAMLQAHRAHQLAIDTYQEFEETYIPKDQKYSFLHDSQTSFCFSDSIPTPSNMEETQQKSNLELLRISLLLIESWLEPVRFLRSMFANNLVYDTSDSDDYHLLKDLEEGIQTLMGRLEDGSRRTGQILKQTYSKFDTNSHNHDALLKNYGLLYCFRKDMDKVETFLRMVQCRSVEGSCGF

SEQ ID NO: 1033750 - protein, 198 aa, Homo sapiens
MAPGSRTSLLLAFALLCLPWLQEAGAVQTVPLSRLFDHAMLQAHRAHQLAIDTYQEFEETYIPKDQKYSFLHDSQTSFCFSDSIPTPSNMEETQQKSNLELLRISLLLIESWLEPVRFLRSMFANNLVYDTSDSDDYHLLKDLEEGIQTLMGRLEDGSRRTGQILKQTYSKFDTNSHNHDALLKNYEAALPASRESCK

SEQ ID NO: 1033751 - protein, 303 aa, Homo sapiens
MAPGSRTSLLLAFALLCLPWLQEGSAFPTIPLSRLFDHAMLQAHRAHQLAIDTYQEFEETYIPKDQKYSFLHDSQTSFCFSDSIPTPSNMEETQQKSNLELLRISLLLIESWLEPVRFLRSMFANNLVYDTSDSDDYHLLKDLEEGIQTLMWVRVAPGVPNPGAPLASRDWGTETLLPSSYHSGADPKELTLFFISPGESSRPFSTPWRGGKENGSMREGGNSPQALGPSLSSFIFAGRLEDGSRRTGQILKQTYSKFDTNSHNHDALLKNYGLLYCFRKDMDKVETFLRMVQCRSVEGSCGF

SEQ ID NO: 1033752 - protein, 211 aa, Homo sapiens
MIPVRAFSGIKSEQAAVQSVPVSPELMTHRSFCQSHCAHHLAIYTYPDFAHDDLAAYRNYTFLLESRIAIVLLTLHIPTPVASMEDLQHKSDLVLLWIWLLFIEFWLEPVRFLRSMFANNLVYDTSDSDDYHLLKDLEEGIQTLMGRLEDGSRRTGQILKQTYSKFDTNSHNHDALLKNYGLLYCFRKDMDKVETFLRMVQCRSVEGSCGF

SEQ ID NO: 1033753 - protein, 92 aa, Homo sapiens
EWREPVRYRTPRTAMTPREEGIQTLMGRLEDGSRRTGQILKQTYSKFDTNSHNHDALLKNYGLLYCFRKDMDKVETFLRMVQCRSVEGSCGF

SEQ ID NO: 1033754 - protein, 122 aa, Homo sapiens
DTTFPFHITLAEVLHEGSIQAANVCLDIQVFPYILLKSRQSFPKPQFLTSVHPQPNTTCKPPGLCACTLCSNSLSCIDTNSHNHDALLKNYGLLYCFRKDMDKVETFLRMVQCRSVEGSCGF

SEQ ID NO: 1033755 - protein, 217 aa, Homo sapiens; identical to SEQ ID NO: 1033746

SEQ ID NO: 1033756 - protein, 275 aa, Homo sapiens
PGPHGFRGPHGFRGPHGFRGPHGFRGPHGFRAPHGFRGPHGFRAPHGSRVLWTAHLVAMAPGSRTSLLLAFALLCLPWLQEAGAVQTVPLSRLFDHAMLQAHRAHQLAIDTYQEFEETYIPKDQKYSFLHDSQTSFCFSDSIPTPSNMEETQQKSNLELLRISLLLIESWLEPVRFLRSMFANNLVYDTSDSDDYHLLKDLEEGIQTLMGRLEDGSRRTGQILKQTYSKFDTNSHNHDALLKNYGLLYCFRKDMDKVETFLRMVQCRSVEGSCGF

SEQ ID NO: 1033757 - protein, 211 aa, Homo sapiens
MAPGSRTSLLLAFALLCLPWLQEAGAVQTVPLSRLFDHAMLQAHRAHQLAIDTYQEFEETYIPKDQKYSFLHDSQTSFCFSDSIPTPSNMEETQQKSNLELLRISLLLIESWLEPVRFLRSMFANNLVYDTSDSDDYHLLKDLEEGIQTLMGRLEDGSRRTGQILKQTYSKFDTNSHNHDALLKNYGLLYCFRKDMDKVETFLRMVQCRSV

SEQ ID NO: 1033758 - protein, 238 aa, Homo sapiens
  misc_feature (220)..(220): Xaa can be any naturally occurring amino acid
MAPGSRTSLLLAFALLCLPWLQEAGAVQTVPLSRLFDHAMLQAHRAHQLAIDTYQEFEETYIPKDQKYSFLHDSQTSFCFSDSIPTPSNMEETQQKSNLELLRISLLLIESWLEPVRFLRSMFANNLVYDTSDSDDYHLLKDLEEGIQTLMGRLEDGSRRTGQILKQTYSKFDTNSHNHDALLKNYGLLYCFRKDMDKVETFLRMVQCRSVEGTVVYCRXILDLQCFCLSASGHTAIS

SEQ ID NO: 1033759 - protein, 237 aa, Homo sapiens
  misc_feature (189)..(190): Xaa can be any naturally occurring amino acid
  misc_feature (203)..(207): Xaa can be any naturally occurring amino acid
  misc_feature (215)..(216): Xaa can be any naturally occurring amino acid
  misc_feature (227)..(227): Xaa can be any naturally occurring amino acid
MAPGSRTSLLLAFALLCLPWLQEAGAVQTVPLSRLFDHAMLQAHRAHQLAIDTYQEFEETYIPKDQKYSFLHDSQTSFCFSDSIPTPSNMEETQQKSNLELLRISLLLIESWLEPVRFLRSMFANNLVYDTSDSDDYHLLKDLEEGIQTLMGRLEDGSRRTGQILKQTYSKFDTNSHNHDALLKNYETXXNSYTRKETIETKXXXXXDKTIEKKXXLCGRRQECGFXVDTKDKTKQK

SEQ ID NO: 1033760 - protein, 303 aa, Homo sapiens
MAPGSRTSLLLAFALLCLPWLQEAGAVQTVPLSRLFDHAMLQAHRAHQLAIDTYQEFEETYIPKDQKYSFLHDSQTSFCFSDSIPTPSNMEETQQKSNLELLRISLLLIESWLEPVRFLRSMFANNLVYDTSDSDDYHLLKDLEEGIQTLMWVRVAPGVPNPGAPLASRDWGTETLLPSSYHSGADPKELTLFFISPGESSRPFSTPWRGGKENGSMREGGNSPQAPGPSLSSFIFAGRLEDGSRRTGQILKQTYSKFDTNSHNHDALLKNYGLLYCFRKDMDKVETFLRMVQCRSVEGSCGF

SEQ ID NO: 1033761 - protein, 201 aa, Homo sapiens
MAPGSRTSLLLAFALLCLPWLQEAGAVQTVPLSRLFDHAMLQAHRAHQLAIDTYQEFEETYIPKDQKYSFLHDSQTSFCFSDSIPTPSNMEETQQKSNLELLRISLLLIESWLEPVRFLRSMFANNLVYDTSDSSPSGNGSRLPDVLLLAFALLCLPWLQSLVPVQTVPLSKGFLDKQLCSKPIVRTKLAIDTYQEFEEAY

SEQ ID NO: 1033762 - protein, 283 aa, Homo sapiens
  misc_feature (22)..(22): Xaa can be any naturally occurring amino acid
  misc_feature (26)..(27): Xaa can be any naturally occurring amino acid
  misc_feature (31)..(31): Xaa can be any naturally occurring amino acid
  misc_feature (33)..(33): Xaa can be any naturally occurring amino acid
  misc_feature (48)..(48): Xaa can be any naturally occurring amino acid
  misc_feature (63)..(64): Xaa can be any naturally occurring amino acid
  misc_feature (67)..(67): Xaa can be any naturally occurring amino acid
  misc_feature (69)..(69): Xaa can be any naturally occurring amino acid
  misc_feature (74)..(75): Xaa can be any naturally occurring amino acid
  misc_feature (77)..(78): Xaa can be any naturally occurring amino acid
  misc_feature (87)..(87): Xaa can be any naturally occurring amino acid
  misc_feature (89)..(89): Xaa can be any naturally occurring amino acid
  misc_feature (93)..(93): Xaa can be any naturally occurring amino acid
  misc_feature (106)..(107): Xaa can be any naturally occurring amino acid
  misc_feature (111)..(111): Xaa can be any naturally occurring amino acid
  misc_feature (130)..(131): Xaa can be any naturally occurring amino acid
  misc_feature (138)..(138): Xaa can be any naturally occurring amino acid
  misc_feature (143)..(143): Xaa can be any naturally occurring amino acid
  misc_feature (146)..(146): Xaa can be any naturally occurring amino acid
  misc_feature (163)..(163): Xaa can be any naturally occurring amino acid
KFGTKKGRLVTRAGIPPGWAPXPPIXXRGPXEXAHPGGNWPQGFAERXHAPWFFALVHALPFXXQRXVXPGPKXXRXXPAFFEPKPXAXKAPXAAPPSCGTFDNLXXGSFXKKTLIISKKVPRKLFYALXXTSSERSXPAYSXTLXSEPPSNHGKKTPNQKTXSEELLRISLLLIESWLEPVRFLRSMFANNLVYDTSDSDDYHLLKDLEEGIQTLMGRLEDGSRRTGQILKQTYSKFDTNSHNHDALLKNYGLLYCFRKDMDKVETFLRMVQCRSVEGSCGF

SEQ ID NO: 1033763 - protein, 113 aa, Homo sapiens
  misc_feature (9)..(9): Xaa can be any naturally occurring amino acid
  misc_feature (33)..(34): Xaa can be any naturally occurring amino acid
  misc_feature (39)..(39): Xaa can be any naturally occurring amino acid
  misc_feature (47)..(47): Xaa can be any naturally occurring amino acid
  misc_feature (49)..(50): Xaa can be any naturally occurring amino acid
  misc_feature (52)..(52): Xaa can be any naturally occurring amino acid
  misc_feature (56)..(56): Xaa can be any naturally occurring amino acid
  misc_feature (60)..(60): Xaa can be any naturally occurring amino acid
  misc_feature (64)..(64): Xaa can be any naturally occurring amino acid
  misc_feature (66)..(66): Xaa can be any naturally occurring amino acid
  misc_feature (68)..(68): Xaa can be any naturally occurring amino acid
  misc_feature (70)..(70): Xaa can be any naturally occurring amino acid
  misc_feature (72)..(72): Xaa can be any naturally occurring amino acid
  misc_feature (75)..(76): Xaa can be any naturally occurring amino acid
  misc_feature (78)..(80): Xaa can be any naturally occurring amino acid
  misc_feature (82)..(82): Xaa can be any naturally occurring amino acid
  misc_feature (84)..(85): Xaa can be any naturally occurring amino acid
  misc_feature (87)..(87): Xaa can be any naturally occurring amino acid
  misc_feature (90)..(92): Xaa can be any naturally occurring amino acid
  misc_feature (94)..(97): Xaa can be any naturally occurring amino acid
SSFPFFNIXFPSKPFLYPFFFTTLFSNPISLTXXPFTPXIIFNKPIXQXXIXIHSXITPXPPSXSXTXFXHXPTXXKXXXNXIXXCXHLXXXHXXXXGARAVPQEYVRQQPGV

SEQ ID NO: 1033764 - protein, 123 aa, Homo sapiens
MGFHCVSQDGLKSPDLVIRPSRPPKVLGLQAGATAPGPRILSGNKEKDLEEGIQTLMGRLEDGSRRTGQILKQTYSKFDTNSHNHDALLKNYGLLYCFRKDMDKVETFLRMVQCRSVEGSCGF

SEQ ID NO: 1033765 - protein, 92 aa, Homo sapiens
TEAVVGKSQEQGRQEPGAIATRRAVHRTLSGSGSCGLGILKQTYSKFDTNSHNHDALLKNYGLLYCFRKDMDKVETFLRMVQCRSVEGSCGF

SEQ ID NO: 1033766 - protein, 63 aa, Homo sapiens
MAPGSRTSLLLAFALLCLPWLQSLVPVQTVPLSKGFLDKQLCSKPIVRTKLAIDTYQEFEEAY

SEQ ID NO: 1033767 - protein, 217 aa, Homo sapiens
MAPGSRTSLLLAFALLCLPWLQEGSAFPTIPLSRLFDHAMLQAHRAHQLAIDTYQEFEETYIPKDQKYSFLHDSQTSFCFSDSIPTPSNMEETQQKSNLELLRISLLLIESWLEPVRFLRSMFANNLVYDTSDSDDYHLLKDLEEGIQTLMGRLEDGSRRTGQILKQTYSKFDTNSHNHDALLKNYGLLYCFRKDMDKVETFLRMVQCRSVEGSCGF

SEQ ID NO: 1033768 - protein, 217 aa, Homo sapiens; identical to SEQ ID NO: 1033746

SEQ ID NO: 1033769 - protein, 217 aa, Homo sapiens; identical to SEQ ID NO: 1033767

SEQ ID NO: 1033770 - protein, 215 aa, Homo sapiens
MAPGSRTSLLLAFALLCLPWLQEAGAVQTVPLSRLFDHAMLQAHRAHQLAIDTYQEFEETYIPKDQKYSFLHDSQTSFCFSDSIPTPSNMEETQQKSNLELLRISLLLIESWLEPVRFLRSMFANNLVYDTSDSNVYDLLKVPKGRAPQADCAAVPIATPVTGPIFQTDLQQVRHQPNNTDAPNPTNGLIRYTTDTARPLPSTGHAARRRHHSDP

SEQ ID NO: 1033771 - protein, 170 aa, Homo sapiens
MAPGSRTSLLLAFALLCLPWLQEAGAVQTVPLSRLFDHAMLQAHRAHQLAIDTYQEFEETYIPKDQKYSFLHDSQTSFCFSDSIPTPSNMEETQQKSNLELLRISLLLIESWRHSGEPAVQGFANSGYGPLDSNVYDLLKDLEEGIQTLMGRLEGYLTQLMTHYSSYGLL

SEQ ID NO: 1033772 - protein, 115 aa, Homo sapiens
ERPPGQVESWLEPVRFLRSMFANNLVYDTSDSDDYHLLKDLEEGIQTLMGRLEDGSRRTGQILKQTYSKFDTNSHNHDALLKNYGLLYCFRKDMDKVETFLRMVQCRSVEGSCGF

SEQ ID NO: 1033773 - protein, 264 aa, Homo sapiens
MAPGSRTSLLLAFALLCLPWLQEEESGFPNIPLSRLFDHAMLQAHRAHQLAIDTYQEFEETYIPKDQKYSFLHDSQTSFCFSDSIPTPSNMEETQQKSNLKLAGISLCGHPIVGGARGSSSGVSSATGWWYGGSDRNVYELLKELEEGIQTLMGRLEDGSRRTGQILKQTYSKFDTNSHNHDALLKNYGVVYWFREWHGPCREFLGTGHAAREGSGVYCRWIREPPGPGRNAHAHWQKNVNKTKDSPQHQGHHDGAREEYPGPR

SEQ ID NO: 1033774 - protein, 729 aa, Homo sapiens
MQSTSNHLWLLSDILGQGATANVFRGRHKKTGDLFAIKVFNNISFLRPVDVQMREFEVLKKLNHKNIVKLFAIEEETTTRHKVLIMEFCPCGSLYTVLEEPSNAYGLPESEFLIVLRDVVGGMNHLRENGIVHRDIKPGNIMRVIGEDGQSVYKLTDFGAARELEDDEQFVSLYGTEEYLHPDMYERAVLRKDHQKKYGATVDLWSIGVTFYHAATGSLPFRPFEGPRRNKEVMYKIITGKPSGAISGVQKAENGPIDWSGDMPVSCSLSRGLQVLLTPVLANILEADQEKCWGFDQFFAETSDILHRMVIHVFSLQQMTAHKIYIHSYNTATIFHELVYKQTKIISSNQELIYEGRRLVLEPGRLAQHFPKTTEENPIFVVSREPLNTIGLIYEKISLPKVHPRYDLDGDASMAKAITGVVCYACRIASTLLLYQELMRKGIRWLIELIKDDYNETVHKKTEVVITLDFCIRNIEKTVKVYEKLMKINLEAAELGEISDIHTKLLRLSSSQGTIETSLQDIDSRLSPGGSLADAWAHQEGTHPKDRNVEKLQVLLNCMTEIYYQFKKDKAERRLAYNEEQIHKFDKQKLYYHATKAMTHFTDECVKKYEAFLNKSEEWIRKMLHLRKQLLSLTNQCFDIEEEVSKYQEYTNELQETLPQKMFTASSGIKHTMTPIYPSSNTLVEMTLGMKKLKEEMEGVVKELAENNHILERFGSLTMDGGLRNVDCL

SEQ ID NO: 1033775 - protein, 456 aa, Homo sapiens
ACEAGSVLSLEEAAGARRRWRGGDPAGITRGLPDPAKMQSTSNHLWLLSDILGQGATANVFRGRHKKTGDLFAIKVFNNISFLRPVDVQMREFEVLKKLNHKNIVKLFAIEEETTTRHKVLIMEFCPCGSLYTVLEEPSNAYGLPESEFLIVLRDVVGGMNHLRENGIVHRDIKPGNIMRVIGEDGQSVYKLTDFGAARELEDDEQFVSLYGTEEYLHPDMYERAVLRKDHQKKYGATVDLWSIGVTFYHAATGSLPFRPFEGPRRNKEVMYKIITGKPSGAISGVQKAENGPIDWSGDMPVSCSLSRGLQVLLTPVLANILEADQEKCWGFDQFFAETSDILHRMVIHVFSLQQMTAHKIYIHSYNTATIFHELVYKQTKIISSNQELIYEGRRLVLEPGRLAQHFPKTTEENPIFVVSREPLNTIGLIYEKISLPKVHPRYDLDGDASMAKVSI

SEQ ID NO: 1033776 - protein, 726 aa, Homo sapiens
ACEAGSVLSLEEAAGARRRWRGGDPAGITRGLPDPAKMQSTSNHLWLLSDILGQGATANVFRGRHKKTGDLFAIKVFNNISFLRPVDVQMREFEVLKKLNHKNIVKLFAIEEETTTRHKVLIMEFCPCGSLYTVLEEPSNAYGLPESEFLIVLRDVVGGMNHLRENGIVHRDIKPGNIMRVIGEDGQSVYKLTDFGAARELEDDEQFVSLYGTEEYLHPDMYERAVLRKDHQKKYGATVDLWSIGVTFYHAATGSLPFRPFEGPRRNKEVMYKIITGKPSGAISGVQKAENGPIDWSGDMPVSCSLSRGLQVLLTPVLANILEADQEKCWGFDQFFAETSDILHRMVIHVFSLQQMTAHKIYIHSYNTATIFHELVYKQTKIISSNQELIYEGRRLVLEPGRLAQHFPKTTEENPIFVVSREPLNTIGLIYEKISLPKVHPRYDLDGDASMAKAITGVVCYACRIASTLLLYQELMRKGIRWLIELIKDDYNETVHKKTEVVITLDFCIRNIEKTVKVYEKLMKINLEAAELGEISDIHTKLLRLSSSQGTIETSLQDIDSRLSPGGSLADAWAHQEGTHPKDRNVEKLQVLLNCMTEIYYQFKKDKAERRLAYNEEQIHKFDKQKLYYHATKAMTHFTDECVKKYEAFLNKSEEWIRKMLHLRKQLLSLTNQCFDIEEEVSKYQEYTNELQETLPQKMFTASSGIKHTMTPIYPSSNTLVEMTLG

SEQ ID NO: 1033777 - protein, 612 aa, Homo sapiens
ACEAGSVLSLEEAAGARRRWRGGDPAGITRGLPDPAKMQSTSNHLWLLSDILGQGATANVFRGRHKKTGDLFAIKVFNNISFLRPVDVQMREFEVLKKLNHKNIVKLFAIEEETTTRHKVLIMEFCPCGSLYTVLEEPSNAYGLPESEFLIVLRDVVGGMNHLRENGIVHRDIKPGNIMRVIGEDGQSVYKLTDFGAARELEDDEQFVSLYGTEEYLHPDMYERAVLRKDHQKKYGATVDLWSIGVTFYHAATGSLPFRPFEGPRRNKEVMYKIITGKPSGAISGVQKAENGPIDWSGDMPVSCSLSRGLQVLLTPVLANILEADQEKCWGFDQFFAETSDILHRMVIHVFSLQQMTAHKIYIHSYNTATIFHELVYKQTKIISSNQELIYEGRRLVLEPGRLAQHFPKTTEENPIFVVSREPLNTIGLIYEKISLPKVHPRYDLDGDASMAKAITGVVCYACRIASTLLLYQELMRKGIRWLIELIKDDYNETVHKKTEVVITLDFCIRNIEKTVKVYEKLMKINLEAAELGEISDIHTKLLRLSSSQGTIETSLQDIDSRLSPGGSLADAWAHQEGTHPKDRNVEKLQVLLNCMTEIYYQFKKDKAERSK

SEQ ID NO: 1033778 - protein, 677 aa, Homo sapiens
MREFEVLKKLNHKNIVKLFAIEEETTTRHKVLIMEFCPCGSLYTVLEEPSNAYGLPESEFLIVLRDVVGGMNHLRENGIVHRDIKPGNIMRVIGEDGQSVYKLTDFGAARELEDDEQFVSLYGTEEYLHPDMYERAVLRKDHQKKYGATVDLWSIGVTFYHAATGSLPFRPFEGPRRNKEVMYKIITGKPSGAISGVQKAENGPIDWSGDMPVSCSLSRGLQVLLTPVLANILEADQEKCWGFDQFFAETSDILHRMVIHVFSLQQMTAHKIYIHSYNTATIFHELVYKQTKIISSNQELIYEGRRLVLEPGRLAQHFPKTTEENPIFVVSREPLNTIGLIYEKISLPKVHPRYDLDGDASMAKAITGVVCYACRIASTLLLYQELMRKGIRWLIELIKDDYNETVHKKTEVVITLDFCIRNIEKTVKVYEKLMKINLEAAELGEISDIHTKLLRLSSSQGTIETSLQDIDSRLSPGGSLADAWAHQEGTHPKDRNVEKLQVLLNCMTEIYYQFKKDKAERRLAYNEEQIHKFDKQKLYYHATKAMTHFTDECVKKYEAFLNKSEEWIRKMLHLRKQLLSLTNQCFDIEEEVSKYQEYTNELQETLPQKMFTASSGIKHTMTPIYPSSNTLVEMTLGMKKLKEEMEGVVKELAENNHILERFGSLTMDGGLRNVDCL

SEQ ID NO: 1033779 - protein, 585 aa, Homo sapiens
ACEAGSVLSLEEAAGARRRWRGGDPAGITRGLPDPAKMQSTSNHLWLLSDILGQGATANVFRGRHKKTGDLFAIKVFNNISFLRPVDVQMREFEVLKKLNHKNIVKLFAIEEETTTRHKVLIMEFCPCGSLYTVLEEPSNAYGLPESEFLIVLRDVVGGMNHLRENGIVHRDIKPGNIMRVIGEDGQSVYKLTDFGAARELEDDEQFVSLYGTEEYLHPDMYERAVLRKDHQKKYGATVDLWSIGVTFYHAATGSLPFRPFEGPRRNKEVMYKIITGKPSGAISGVQKAENGPIDWSGDMPVSCSLSRGLQVLLTPVLANILEADQEKCWGFDQFFAETSDILHRMVIHVFSLQQMTAHKIYIHSYNTATIFHELVYKQTKIISSNQELIYEGRRLVLEPGRLAQHFPKTTEENPIFVVSREPLNTIGLIYEKISLPKVHPRYDLDGDASMAKAITGVVCYACRIASTLLLYQELMRKGIRWLIELIKDDYNETVHKKTEVVITLDFCIRNIEKTVKVYEKLMKINLEAAELGEISDIHTKLLRLSSSQGTIETSLQDIDSRLSPGGSLADAWAHQEGTHPKDRK

SEQ ID NO: 1033780 - protein, 50 aa, Homo sapiens
MRSTAEVTGKSQNSNTLAGAWGMKNRRQEAFQRLQRRNQGQPQLPGSFTR

SEQ ID NO: 1033781 - protein, 296 aa, Homo sapiens
MAPEENAGTELLLQSFERRFLAARTLRSFPWQSLEAKLRDSSDSELLRDILHKTVKHPVCVKHPPSVKYARCFLSELIKKPSGGSVTLSESTAIISYGTTGLVTWDAALYLAEWAIENPAVFTNRTVLELGSGAGLTGLAICKMCRPRAYIFSDCHSRVLEQLRGNVLLNGLSLEADITAKLDSPRVTVAQLDWDVATVHQLSAFQPDVVIAADVLYCPEAIMSLVGVLRRLAACREHQRAPEVYVAFTVRNPETCQLFTTELGRAGIRWEVEPRHEQKLFPYEEHLEMAMLNLTL

SEQ ID NO: 1033782 - protein, 363 aa, Homo sapiens
AGLPPGLPATLRPRPRHGARGERGDRTLAAEFRAPLPGGRSLRSFPWQSLEAKLRDSSDSELLRDILQKTVKHPVCVKHPPSVKYARCFLSELIKKCKRLERKQTSSHSACPQHEAVHTEPLDELYEVLAETLMAKESTQGHWSYLLPSGGSVTLSKSTAIISHGTTGLVTWDAALYLAEWAIENPAAFTNRTVLELGSGAGLTGLAICKMCRPRAYIFSDCHSRVLEQLRGNVLLNGLSLEADITANLDSPRVTVAQLDWDVATVHQLSAFQPDVVIAADVLYCPEAIVSLVGVLRRLAACREHQRAPEVYVAFTVRNPETCQLFTTELGRAGIRWEVEARHDQKLFPYEEHLEMAMLNLTL

SEQ ID NO: 1033783 - protein, 118 aa, Homo sapiens
AGLPPGLPATLRPRPRHGARGERGDRTLAAEFRAPLPGGRSLRSFPWQSLEAKLRDSSDSELLRDILQKTCCIAQKPSCRWSGSCGGWLPAGSTSGLLRSTWPLPSATQRRASCSPPS

SEQ ID NO: 1033784 - protein, 132 aa, Homo sapiens
MASRKAMWVPPLLHSESVHSLAKLTKSQHENLVLVQINKCPIKYDSSPNVDTLGSSESQARCSCHIPGHTRFLTKPSPLQLPHPWTHSFLTKPSPLQLPHPWAYGAAGAFFKTGIKVLGTRQKGDTWRPNAG

SEQ ID NO: 1033785 - protein, 503 aa, Homo sapiens
AGLPPGLPATLRPRPRHGARGERGDRTLAAEFRAPLPGGRSLRSFPWQSLEAKLRDSSDSELLRDILQKPSGGSVTLSKSTAIISHGTTGLVTWDAALYLAEWAIENPAAFTSQVTSGRRAGHRGRLTLVQSQTRSPFLPPNRTVLELGSGAGLTGLAICKMCRPRAYIFSDCHSRVLEQLRGNVLLNGLSLEADITANLDSPRVTVAQLDWDVATVHQLSAFQPDVVIAAGNAQPQDSCAGGVLAALPSSGLWEKGTMDAVRHGHDGASRRVTLGLQADIKGQGCLLRSPSSHSPLAGDRHTPITVITTWLCPRAMPCVLQRPQEENNHFWDEDRALERRWCLAGPPKPLTPASTLSPLSGGTELCLWSWVPALKTTGAAVASDTGPPLQASRPISRYLKHEVHGRFRLSAIQSPLDEADVLYCPEAIVSLVGVLRRLAACREHQRAPEVYVAFTVRNPETCQLFTTELGRAGIRWEVEARHDQKLFPYEEHLEMAMLNLTL

SEQ ID NO: 1033786 - protein, 117 aa, Homo sapiens
MAAGRYYTIPSQISPPNLAKIIWPLKKIRTKANKLSLSLPPARGCPHRAFGRAVRGAGGDFDGQGVHPGPLELFAGMRKAPSSPSQPRYPSCTDKVKTWVWVQILTHPFCSLRYEVH

SEQ ID NO: 1033787 - protein, 503 aa, Homo sapiens; identical to SEQ ID NO: 1033785

SEQ ID NO: 1033788 - protein, 198 aa, Homo sapiens
MPGAFSQNSSKSPSGGSVTLSKSTAIISHGTTGLVTWDAALYLAEWAIENPAAFTNRTVLELGSGAGLTGLAICKMCRPRAYIFSDCHSRVLEQLRGNVLLNGLSLEADITANLDSPRVTVAQLDWDVATVHQLSAFQPDVVIAADVLYCPEAIVSLVGVLRRLAACREHQRAPEVYVAFTVRNPETCQLFTTELRLS

SEQ ID NO: 1033789 - protein, 279 aa, Homo sapiens
  misc_feature (110)..(110): Xaa can be any naturally occurring amino acid
  misc_feature (144)..(144): Xaa can be any naturally occurring amino acid
GGKHFPRTIMPCSKSGWDRCKASSLKCQLPPWTHGFFKSKPIQVANPGHIGSSKAKPFKLHIVDTSGPQKASRCSCTSVTHRSSQAKPLQFHIPDTSVLHKASPLQLHIXDTSVLHKAKPAAAATSLDTLGSSQSQARCSCHIXGHTRFLTKPSPLQLPHRWTHIGSSESQAHCSCHIPGHTRFLTKPSPLQLPHRWTHSVPQKAKPAAAATSLDTLGSSQSQARCSCHIPGHTRFLTKPSPLQLPHPWAYGAAGAFFKTGIKVLGTRQKGDTWRPNAG

SEQ ID NO: 1033790 - protein, 153 aa, Homo sapiens
MPGAFSQNSSKSNLKIFTVDVLYCPEAIVSLVGVLRRLAACREHQRAPEVYVAFTVRNPETCQLFTTELVESPRPPGPAWSPSCPCRTPVEVKELGAGVKLACPTLPQHAGNSGRGRPGQGRAGIRWEVEARHDQKLFPYEEHLEMAMLNLTL

SEQ ID NO: 1033791 - protein, 296 aa, Homo sapiens; identical to SEQ ID NO: 1033781

SEQ ID NO: 1033792 - protein, 296 aa, Homo sapiens; identical to SEQ ID NO: 1033781

SEQ ID NO: 1033793 - protein, 296 aa, Homo sapiens; identical to SEQ ID NO: 1033781

SEQ ID NO: 1033794 - protein, 296 aa, Homo sapiens; identical to SEQ ID NO: 1033781

SEQ ID NO: 1033795 - protein, 510 aa, Homo sapiens
AGLPPGLPATLRPRPRHGARGERGDRTLAAEFRAPLPGGRSLRSFPWQSLEAKLRDSSDSELLRDILQKPSGGSVTLSKSTAIISHGTTGLVTWDAALYLAEWAIENPAAFTSQVTSGRRAGHRGRLTLVQSQTRSPFLPPNRTVLELGSGAGLTGLAICKMCRPRAYIFSDCHSRVLEQLRGNVLLNGLSLEADITANLDSPRVTVAQLDWDVATVHQLSAFQPDVVIAAGNAQPQDSCAGGVLAALPSSGLWEKGTMDAVRHGHDGASRRVTLGLQADIKGQGCLLRSPSSHSPLAGDRHTPITVITTWLCPRAMPCVLQRPQEENNHFWDEDRALERRWCLAGPPKPLTPASTLSPLSGGTELCLWSWVPALKTTGAAVASDTGPPLQASRPISRYLKHEVHGRFRLSAIQSPLDRPTCCIAQKPSCRWSGSCGGWLPAGSTSGLLRSTWPLPSATQRRASCSPPSYGCPSSPTQYAHVLSPNTAIFKHMCSVSRPGWDQMGSGSSS

SEQ ID NO: 1033796 - protein, 218 aa, Homo sapiens
AGLPPGLPATLRPRPRHGARGERGDRTLAAEFRAPLPGGRSLRSFPWQSLEAKLRDSSDSELLRDILQKTVKHPVCVKHPPSVKYARCFLSELIKKCKRLERKQTSSHSACPQHEAVHTEPLDELYEVLAETLMAKESTQGHWSYLLPSGGSVTLSKSTAIISHGTTGLVTWDAALYLAEWAIENPAAFKAGLGSDGKWKLVMTRNCFPTKSTWRWQC

SEQ ID NO: 1033797 - protein, 395 aa, Homo sapiens
MAPLGTTVLLWSLLRSSPGVERVCFRARIQPWHGGLLQPLPCSFEMGLPRRRFSSEAAESGSPETKKPTFMDEEVQSILTKMTGLNLQKTFKPAIQELKPPTYKLMTQAQLEEATRQAVEAAKVRLKMPPVLEERVPINDVLAEDKILEGTETTKYVFTDISYSIPHRFDGSFIYVIFRTHLETPTPLKIESQYCLVNLYINQERFIVVREPSGTLRKASWEERDRMIQVYFPKEGRKILTPIIFKEENLRTMYSQDRHVDVLNLCFAQFEPDSTEYIKVHHKTYEDIDKRGKYDLLRSTRYFGGMVWYFVNNKKIDGLLIDQIQRDLIDDATNLVQLYHVLHPDGQSAQGAKDQAAEGINLIKVFAKTEAQKGAYIELTLQTYQEALSRHSAAS

SEQ ID NO: 1033798 - protein, 366 aa, Homo sapiens
KLRLGRGLVWRNTVLLWSLLRSSPGVERVCFRARIQPWHGGLLQPLPCSFEMGLPRRRFSSEAAESGSPETKKPTFMDEEVQSILTKMTGLNLQKTFKPAIQELKPPTYKLMTQAQLEEATRQAVEAAKVRLKMPPVLEERVPINDVLAEDKILEGTETTKYVFTDISYSIPHRERFIVVREPSGTLRKASWEERDRMIQVYFPKEGRKILTPIIFKEENLRTMYSQDRHVDVLNLCFAQFEPDSTEYIKVHHKTYEDIDKRGKYDLLRSTRYFGGMVWYFVNNKKIDGLLIDQIQRDLIDDATNLVQLYHVLHPDGQSAQGAKDQAAEGINLIKVFAKTEAQKGAYIELTLQTYQEALSRHSAAS

SEQ ID NO: 1033799 - protein, 319 aa, Homo sapiens
MSRNETEHRYLGTHFGAESGSPETKKPTFMDEEVQSILTKMTGLNLQKTFKPAIQELKPPTYKLMTQAQLEEATRQAVEAAKVRLKMPPVLEERVPINDVLAEDKILEGTETTKYVFTDISYSIPHRERFIVVREPSGTLRKASWEERDRMIQVYFPKEGRKILTPIIFKEENLRTMYSQDRHVDVLNLCFAQFEPDSTEYIKVHHKTYEDIDKRGKYDLLRSTRYFGGMVWYFVNNKKIDGLLIDQIQRDLIDDATNLVQLYHVLHPDGQSAQGAKDQAAEGINLIKVFAKTEAQKGAYIELTLQTYQEALSRHSAAS

SEQ ID NO: 1033800 - protein, 342 aa, Homo sapiens
MAPLGTTVLLWSLLRSSPGVERVCFRARIQPWHGGLLQPLPCSFEMGLPRRRFSSEAAESGSPETKKPTFMDEEVQSILTKMTGLNLQKTFKPAIQELKPPTYKLMTQAQLEEATRQAVEAAKVRLDKILEGTETTKYVFTDISYSIPHRERFIVVREPSGTLRKASWEERDRMIQVYFPKEGRKILTPIIFKEENLRTMYSQDRHVDVLNLCFAQFEPDSTEYIKVHHKTYEDIDKRGKYDLLRSTRYFGGMVWYFVNNKKIDGLLIDQIQRDLIDDATNLVQLYHVLHPDGQSAQGAKDQAAEGINLIKVFAKTEAQKGAYIELTLQTYQEALSRHSAAS

SEQ ID NO: 1033801 - protein, 360 aa, Homo sapiens
MAPLGTTVLLWSLLRSSPGVERVCFRARIQPWHGGLLQPLPCSFEMGLPRRRFSSEAAESGSPETKKPTFMDEEVQSILTKMTGLNLQKTFKPAIQELKPPTYKLMTQAQLEEATRQAVEAAKVRLKMPPVLEERVPINDVLAEDKILEGTETTKYVFTDISYSIPHRERFIVVREPSGTLRKASWEERDRMIQVYFPKEGRKILTPIIFKEENLRTMYSQDRHVDVLNLCFAQFEPDSTEYIKVHHKTYEDIDKRGKYDLLRSTRYFGGMVWYFVNNKKIDGLLIDQIQRDLIDDATNLVQLYHVLHPDGQSAQGAKDQAAEGINLIKVFAKTEAQKGAYIELTLQTYQEALSRHSAAS

SEQ ID NO: 1033802 - protein, 234 aa, Homo sapiens
MAPLGTTVLLWSLLRSSPGVERVCFRARIQPWHGGLLQPLPCSFEMGLPRRRFSSEAAESGSPETKKPTFMDEEVQSILTKMTGLNLQKTFKPAIQELKPPTYKLMTQAQLEEATRQAVEAAKVRLKMPPVLEERVPINDVLAEDKILEGTETTKYVFTDISYSIPHRERFIVVREPSGTLRKASWEERDRMIQVYFPKEGRKILTPIIFKEENLRFGPISPGISRFITRPMKI

SEQ ID NO: 1033803 - protein, 360 aa, Homo sapiens; identical to SEQ ID NO: 1033801

SEQ ID NO: 1033804 - protein, 292 aa, Homo sapiens
MAPLGTTVLLWSLLRSSPGVERVCFRARIQPWHGGLLQPLPCSFEMGLPRRRFSSEAAESGSPETKKPTFMDEEVQSILTKMTGLNLQKTFKPAIQELKPPTYKLMTQAQLEEATRQAVEAAKVRLKMPPVLEERVPINDVLAEDKILEGTETTKYVFTDISYSIPHRERFIVVREPSGTLRKASWEERDRMIQVYFPKEGRKILTPIIFKEENLRTMYSQDRHVDVLNLCFAQFEPDSTESSRSSQTYEIDNVGFDLSSTVLGPGGLPSPSGGVPPSSVPWRVAPGSGAGG

SEQ ID NO: 1033805 - protein, 297 aa, Homo sapiens
KLRLGRGLVWRNTVLLWSLLRSSPGVERVCFRARIQPWHGGLLQPLPCSFEMGLPRRRFSSEAAESGSPETKKPTFMDEEVQSILTKMTGLNLQKTFKPAIQELKPPTYKLMTQAQLEEATRQAVEAAKVRLKMPPVLEERVPINDVLAEDKILEGTETTKYVFTDISYSIPHRERFIVVREPSGTLRKASWEERDRMIQVYFPKEGRKILTPIIFKEENLRTMYSQDRHVDVLNLCFAQFEPDSTESSRSSQTYEIDNGDVTFRPRLGAGGFALPQWWRAPEFCALAGCPGVGRGG

SEQ ID NO: 1033806 - protein, 360 aa, Homo sapiens; identical to SEQ ID NO: 1033801

SEQ ID NO: 1033807 - protein, 466 aa, Homo sapiens
SSSHTRGQGAGGPQLRRRRVPPGPTSAPPSGALEGTAGTITSNEWSSPTSPEGSTASGGSQALDKPIDNDAEGVWSPDIEQSFQEALAIYPPCGRRKIILSDEGKMYGRNELIARYIKLRTGKTRTRKQVSSHIQVLARRKAREIQAKLKDQAAKDKALQSMAAMSSAQIISATAFHSSMALARGPGRPAVSGFWQGALPGQAGTSHDVKPFSQQTYAVQPPLPLPGFESPAGPAPSPSAPPAPPWQGRSVASSKLWMLEFSAFLEQQQDPDTYNKHLFVHIGQSSPSYSDPYLEAVDIRQIYDKFPEKKGGLKDLFERGPSNAFFLVKFWADLNTNIEDEGSSFYGVSSQYESPENMIITCSTKVCSFGKQVVEKVETEYARYENGHYSYRIHRSPLCEYMINFIHKLKHLPEKYMMNSVLENFTILQVVTNRDTQETLLCIAYVFEVSASEHGAQHHIYRLVKE

SEQ ID NO: 1033808 - protein, 444 aa, Homo sapiens
GGGRAPLVGGNGAGRALQGSAWRSSPTSPEGSTASGGSQALDKPIDNDAEGVWSPDIEQSFQEALAIYPPCGRRKIILSDEGKMYGRNELIARYIKLRTGKTRTRKQVSSHIQVLARRKAREIQAKLKDQAAKDKALQSMAAMSSAQIISATAFHSSMALARGPGRPAVSGFWQGALPGQAGTSHDVKPFSQQTYAVQPPLPLPGFESPAGPAPSPSAPPAPPWQGRSVASSKLWMLEFSAFLEQQQDPDTYNKHLFVHIGQSSPSYSDPYLEAVDIRQIYDKFPEKKGGLKDLFERGPSNAFFLVKFWADLNTNIEDEGSSFYGVSSQYESPENMIITCSTKVCSFGKQVVEKVETEYARYENGHYSYRIHRSPLCEYMINFIHKLKHLPEKYMMNSVLENFTILQVVTNRDTQETLLCIAYVFEVSASEHGAQHHIYRLVKE

SEQ ID NO: 1033809 - protein, 469 aa, Homo sapiens
EELALGADSLELAERTHPTFPHPGTGPTSAPPSGALEGTAGTITSNEWSSPTSPEGSTASGGSQALDKPIDNDAEGVWSPDIEQSFQEALAIYPPCGRRKIILSDEGKMYGRNELIARYIKLRTGKTRTRKQVSSHIQVLARRKAREIQAKLKDQAAKDKALQSMAAMSSAQIISATAFHSSMALARGPGRPAVSGFWQGALPGQAGTSHDVKPFSQQTYAVQPPLPLPGFESPAGPAPSPSAPPAPPWQGRSVASSKLWMLEFSAFLEQQQDPDTYNKHLFVHIGQSSPSYSDPYLEAVDIRQIYDKFPEKKGGLKDLFERGPSNAFFLVKFWADLNTNIEDEGSSFYGVSSQYESPENMIITCSTKVCSFGKQVVEKVETEYARYENGHYSYRIHRSPLCEYMINFIHKLKHLPEKYMMNSVLENFTILQVVTNRDTQETLLCIAYVFEVSASEHGAQHHIYRLVKE

SEQ ID NO: 1033810 - protein, 480 aa, Homo sapiens
EELALGADSLELAERTHPTFPHPGTGPTSAPPSGALEGTAGTITSNEWSSPTSPEGSTASGGSQALDKPIDNDAEGVWSPDIEQSFQEALAIYPPCGRRKIILSDEGKMYGRNELIARYIKLRTGKTRTRKQVSSHIQVLARRKAREIQAKLKTGAELGTCGREDQAAKDKALQSMAAMSSAQIISATAFHSSMALARGPGRPAVSGFWQGALPGQAGTSHDVKPFSQQTYAVQPPLPLPGFESPAGPAPSPSAPPAPPWQGRSVASSKLWMLEFSAFLEQQQDPDTYNKHLFVHIGQSSPSYSDPYLEAVDIRQIYDKFPEKKGGLKDLFERGPSNAFFLVKFWADLNTNIEDEGSSFYGVSSQYESPENMIITCSTKVCSFGKQVVEKVETEYARYENGHYSYRIHRSPLCEYMINFIHKLKHLPEKYMMNSVLENFTILQVVTNRDTQETLLCIAYVFEVSASEHGAQHHIYRLVKE

SEQ ID NO: 1033811 - protein, 211 aa, Homo sapiens
EELALGADSLELAERTHPTFPHPGTGPTSAPPSGALEGTAGTITSNEWSSPTSPEGSTASGGSQALDKPIDNDAEGVWSPDIEQSFQEALAIYPPCGRRKIILSDEGKMYGRNELIARYIKLRTGKTRTRKQVSSHIQVLARRKAREIQAKLKDQAAKDKALQSMAAMSSAQIISATAFHSSMALARGPGRQQSQGFGKELCQAKPERPMM

SEQ ID NO: 1033812 - protein, 469 aa, Homo sapiens; identical to SEQ ID NO: 1033809

SEQ ID NO: 1033813 - protein, 209 aa, Homo sapiens [sequence omitted]

SEQ ID NO: 1033814 - protein, 399 aa, Homo sapiens
MAEEMVEAAGEDERELAAEMAAAFLNENLPESIFGAPKAGNGQWASVIRVMNPIQGNTLDLVQLEQNEAAFSVAVCRFSNIGEDWYVLVGVAKDLILNPRSVAGGFVYTYKLVNNGEKLEFLHKTPVEEVPAAIAPFQGRVLIGVGKLLRVYDLGKKKLLRKCENKHIANYISGIQTIGHRVIVSDVQESFIWVRYKRNENQLIIFADDTYPRWVTTASLLDYDTVAGADKFGNICVVRLPPNTNDEVDEDPTGNKALWDRGLLNGASQKAEVIMNYHVGETVLSLQKTTLIPGGSESLVYTTLSGGIGILVPFTSHEDHDFFQHVEMHLRSEHPPLCGRDHLSFRSYYFPVKNVIDGDLCEQFNSMEPNKQKNVSEELDRTPPEVSKKLEDIRTRYAF

SEQ ID NO: 1033815 - protein, 399 aa, Homo sapiens; identical to SEQ ID NO: 1033814

SEQ ID NO: 1033816 - protein, 399 aa, Homo sapiens; identical to SEQ ID NO: 1033814

SEQ ID NO: 1033817 - protein, 1087 aa, Homo sapiens
MISAIEKQKLVYIYNRDAAARLTISSPLEAHKANTLVYHVVGVDVGFENPMFACLEMDYEEADNDPTGEAAANTQQTLTFYELDLGLNHVVRKYSEPLEEHGNFLITVPGGSDGPSGVLICSENYITYKNLVDQPDIRCPIPRRRNDLDDPERGMIFVCSATHKTKSMFFFLAQTEQGDIFKITLETDEDMVTEIRLKYFDTVPVAAAMCVLKTGFLFVASEFGNHYLYQIAHLGDDDEEPEFSSAMPLEEGDTFFFQPRPLKNLVLVDELDSLSPILFCQIADLANEDTPQLYVACGRGPRSSLRVLRHGLEVSEMAVSELPGNPNAVWTVRRHIEDEFDAYIIVSFVNATLVLSIGETVEEVTDSGFLGTTPTLSCSLLGDDALVQVYPDGIRHIRADKRVNEWKTPGKKTIVKCAVNQRQVVIALTGGELVYFEMDPSGQLNEYTERKEMSADVVCMSLANVPPGEQRSRFLAVGLVDNTVRIISLDPSDCLQPLSMQALPAQPESLCIVEMGGTEKQDELGERGSIGFLYLNIGLQNGVLLRTVLDPVTGDLSDTRTRYLGSRPVKLFRVRMQGQEAVLAMSSRSWLSYSYQSRFHLTPLSYETLEFASGFASEQCPEGIVAISTNTLRILALEKLGAVFNQVAFPLQYTPRKFVIHPESNNLIIIETDHNAYTEATKAQRKQQMAEEMVEAAGEDERELAAEMAAAFLNENLPESIFGAPKAGNGQWASVIRVMNPIQGNTLDLVQLEQNEAAFSVAVCRFSNTGEDWYVLVGVAKDLILNPRSVAGGFVYTYKLVNNGEKLEFLHKTPVEEVPAAIAPFQGRVLIGVGKLLRVYDLGKKKLLRKCENKHIANYISGIQTIGHRVIVSDVQESFIWVRYKRNENQLIIFADDTYPRWVTTASLLDYDTVAGADKFGNICVVRLPPNTNDEVDEDPTGNKALWDRGLLNGASQKAEVIMNYHVGETVLSLQKTTLIPGGSESLVYTTLSGGIGILVPFTSHEDHDFFQHVEMHLRSEHPPLCGRDHLSFRSYYFPVKNVIDGDLCEQFNSMEPNKQKNVSEELDRTPPEVSKKLEDIRTRYAF

SEQ ID NO: 1033818 - protein, 373 aa, Homo sapiens
LRRGRVLFGRGKAGNGQWASVIRVMNPIQGNTLDLVQLEQNEAAFSVAVCRFSNTGEDWYVLVGVAKDLILNPRSVAGGFVYTYKLVNNGEKLEFLHKTPVEEVPAAIAPFQGRVLIGVGKLLRVYDLGKKKLLRKCENKHIANYISGIQTIGHRVIVSDVQESFIWVRYKRNENQLIIFADDTYPRWVTTASLLDYDTVAGADKFGNICVVRLPPNTNDEVDEDPTGNKALWDRGLLNGASQKAEVIMNYHVGETVLSLQKTTLIPGGSESLVYTTLSGGIGILVPFTSHEDHDFFQHVEMHLRSEHPPLCGRDHLSFRSYYFPVKNVIDGDLCEQFNSMEPNKQKNVSEELDRTPPEVSKKLEDIRTRYAF

SEQ ID NO: 1033819 - protein, 293 aa, Homo sapiens
SVWLAFYNSCIYLLFLYKTPVEEVPAAIAPFQGRVLIGVGKLLRVYDLGKKKLLRKCENKHIANYISGIQTIGHRVIVSDVQESFIWVRYKRNENQLIIFADDTYPRWVTTASLLDYDTVAGADKFGNICVVRLPPNTNDEVDEDPTGNKALWDRGLLNGASQKAEVIMNYHVGETVLSLQKTTLIPGGSESLVYTTLSGGIGILVPFTSHEDHDFFQHVEMHLRSEHPPLCGRDHLSFRSYYFPVKNVIDGDLCEQFNSMEPNKQKNVSEELDRTPPEVSKKLEDIRTRYAF

SEQ ID NO: 1033820 - protein, 232 aa, Homo sapiens
MVVHDHLCLLGGPIEQATVPQGFVSCRILIYFIIGVRWEPHHTYVAKLVCASLLDYDTVAGADKFGNICVVRLPPNTNDEVDEDPTGNKALWDRGLLNGASQKAEVIMNYHVGETVLSLQKTTLIPGGSESLVYTTLSGGIGILVPFTSHEDHDFFQHVEMHLRSEHPPLCGRDHLSFRSYYFPVKNVIDGDLCEQFNSMEPNKQKNVSEELDRTPPEVSKKLEDIRTRYAF

SEQ ID NO: 1033821 - protein, 769 aa, Homo sapiens
MISAIEKQKLVYIYNRDAAARLTISSPLEAHKANTLVYHVVGVDVGFENPMFACLEMDYEEADNDPTGEAAANTQQTLTFYELDLGLNHVVRKYSEPLEEHGNFLITVPGGSDGPSGVLICSENYITYKNLVDQPDIRCPIPRRRNDLDDPERGMIFVCSATHKTKSMFFFLAQTEQGDIFKITLETDEDMVTEIRLKYFDTVPVAAAMCVLKTGFLFVASEFGNHYLYQIAHLGDDDEEPEFSSAMPLEEGDTFFFQPRPLKNLVLVDELDSLSPILFCQIADLANEDTPQLYVACGRGPRSSLRVLRHGLEVSEMAVSELPGNPNAVWTVRRHIEDEFDAYIIVSFVNATLVLSIGETVEEVTDSGFLGTTPTLSCSLLGDDALVQVYPDGIRHIRADKRVNEWKTPGKKTIVKCAVNQRQVVIALTGGELVYFEMDPSGQLNEYTERKEMSADVVCMSLANVPPGEQRSRFLAVGLVDNTVRIISLDPSDCLQPLSMQALPAQPESLCIVEMGGTEKQDELGERGSIGFLYLNIGLQNGVLLRTVLDPVTGDLSDTRTRYLGSRPVKLFRVRMQGQEAVLAMSSRSWLSYSYQSRFHLTPLSYETLEFASGFASEQCPEGIVAISTNTLRILALEKLGAVFNQVAFPLQYTPRKFVIHPESNNLIIIETDHNAYTEATKAQRKQQMAEEMVEAAGEDERELDVYMAILFLNVSCIPFCNILFGDSTFPILLLRTLPFFIDIILFLSLYLRVTLPLARVSPLRLPSP

SEQ ID NO: 1033822 - protein, 1069 aa, Homo sapiens
MISAIEKQKLVYIYNRDAAARLTISSPLEAHKANTLVYHVVGVDVGFENPMFACLEMDYEEADNDPTGEAAANTQQTLTFYELDLGLNHVVRKYSEPLEEHGNFLITVPGGSDGPSGVLICSENYITYKNLVDQPDIRCPIPRRRNDLDDPERGMIFVCSATHKTKSMFFFLAQTEQGDIFKITLETDEDMVTEIRLKYFDTVPVAAAMCVLKTGFLFVASEFGNHYLYQIAHLGDDDEEPEFSSAMPLEEGDTFFFQPRPLKNLVLVDELDSLSPILFCQIADLANEDTPQLYVACGRGPRSSLRVLRHGLEVSEMAVSELPGNPNAVWTVRRHIEDEFDAYIIVSFVNATLVLSIGETVEEVTDSGFLGTTPTLSCSLLGDDALVQVYPDGIRHIRADKRVNEWKTPGKKTIVKCAVNQRQVVIALTGGELVYFEMDPSGQLNEYTERKEMSADVVCMSLANVPPGEQRSRFLAVGLVDNTVRIISLDPSDCLQPLSMQALPAQPESLCIVEMGGTEKQDELGERGSIGFLYLNIGLQNGVLLRTVLDPVTGDLSDTRTRYLGSRPVKLFRVRMQGQEAVLAMSSRSWLSYSYQSRFHLTPLSYETLEFASGFASEQCPEGIVAISTNTLRILALEKLGAVFNQVAFPLQYTPRKFVIHPESNNLIIIETDHNAYTEATKAQRKQQMAEEMVEAAGEDERELAAEMAAAFLNENLPESIFGAPKAGNGQWASVIRVMNPIQGNTLDLVQLEQNEAAFSVAVCRFSNTGEDWYVLVGVAKDLILNPRSVAGGFVYTYKLVNNGEKLEFLHKTPVEEVPAAIAPFQGRVLIGVGKLLRVYDLGKKKLLRKCENKHIANYISGIQTIGHRVIVSDVQESFIWVRYKRNASLLDYDTVAGADKFGNICVVRLPPNTNDEVDEDPTGNKALWDRGLLNGASQKAEVIMNYHVGETVLSLQKTTLIPGGSESLVYTTLSGGIGILVPFTSHEDHDFFQHVEMHLRSEHPPLCGRDHLSFRSYYFPVKNVIDGDLCEQFNSMEPNKQKNVSEELDRTPPEVSKKLEDIRTRYAF

SEQ ID NO: 1033823 - protein, 387 aa, Homo sapiens
EVPWIIPVAAQPINENLPESIFGAPKAGNGQWASVIRVMNPIQGNTLDLVQLEQNEAAFSVAVCRFSNTGEDWYVLVGVAKDLILNPRSVAGGFVYTYKLVNNGEKLEFLHKTPVEEVPAAIAPFQGRVLIGVGKLLRVYDLGKKKLLRKCENKHIANYISGIQTIGHRVIVSDVQESFIWVRYKRNENQLIIFADDTYPRWVTTASLLDYDTVAGADKFGNICVVRLPPNTNDEVDEDPTGNKALWDRGLLNGASQKAEVIMNYHVGETVLSLQKTTLIPGGSESLVYTTLSGGIGILVPFTSHEDHDFFQHVEMHLRSEHPPLCGRDHLSFRSYYFPVKNVIDGDLCEQFNSMEPNKQKNVSEELDRTPPEVSKKLEDIRTRYAF

SEQ ID NO: 1033824 - protein, 1087 aa, Homo sapiens; identical to SEQ ID NO: 1033817

SEQ ID NO: 1033825 - protein, 312 aa, Homo sapiens
GHSVFQPGRLPLLAIPTHSFLPGSVRNNGEKLEFLHKTPVEEVPAAIAPFQGRVLIGVGKLLRVYDLGKKKLLRKCENKHIANYISGIQTIGHRVIVSDVQESFIWVRYKRNENQLIIFADDTYPRWVTTASLLDYDTVAGADKFGNICVVRLPPNTNDEVDEDPTGNKALWDRGLLNGASQKAEVIMNYHVGETVLSLQKTTLIPGGSESLVYTTLSGGIGILVPFTSHEDHDFFQHVEMHLRSEHPPLCGRDHLSFRSYYFPVKNVIDGDLCEQFNSMEPNKQKNVSEELDRTPPEVSKKLEDIRTRYAF

SEQ ID NO: 1033826 - protein, 1055 aa, Homo sapiens
MISAIEKQKLVYIYNRDAAARLTISSPLEAHKANTLVYHVVGVDVGFENPMFACLEMDYEEADNDPTGEAAANTQQTLTFYELDLGLNHVVRKYSEPLEEHGNFLITVPGGSDGPSGVLICSENYITYKNLVDQPDIRCPIPRRRNDLDDPERGMIFVCSATHKTKSMFFFLAQTEQGDIFKITLETDEDMVTEIRLKYFDTVPVAAAMCVLKTGFLFVASEFGNHYLYQIAHLGDDDEEPEFSSAMPLEEGDTFFFQPRPLKNLVLVDELDSLSPILFCQIADLANEDTPQLYVACGRGPRSSLRVLRHGLEVSEMAVSELPGNPNAVWTVRRHIEDEFDAYIIVSFVNATLVLSIGETVEEVTDSGFLGTTPTLSCSLLGDDALVQVYPDGIRHIRADKRVNEWKTPGKKTIVKCAVNQRQVVIALTGGELVYFEMDPSGQLNEYTERKEMSADVVCMSLANVPPGEQRSRFLAVGLVDNTVRIISLDPSDCLQPLSMQALPAQPESLCIVEMGGTEKQDELGERGSIGFLYLNIGLQNGVLLRTVLDPVTGDLSDTRTRYLGSRPVKLFRVRMQGQEAVLAMSSRSWLSYSYQSRFHLTPLSYETLEFASGFASEQCPEGIVAISTNTLRILALEKLGAVFNQVAFPLQYTPRKFVIHPESNNLIIIETDHNAYTEATKAQRKQQMAEEMVEAAGEDERELAAEMAAAFLNENLPESIFGAPKAGNGQWASVIRVMNPIQGNTLDLVQLEQNEAAFSVAVCRFSNTGEDWYVLVGVAKDLILNPRSVAGGFVYTYKLVNNGEKLEFLHKTPVEEVPAAIAPFQGRVLIGVGKLLRVYDLGKKKLLRKCENKHIANYISGIQTIGHRVIVSDVQESFIWVRYKRNENQLIIFADDTYPRWVTTASLLDYDTVAGADKFGNICVVRLPPNTNDEVDEDPTGNKALWDRGLLNGASQKAEVIMNYHVGETVLSLQKTTLIPGGSESLVYTTLSGGIGILVPFTSHEDHDFFQHVEMHLRSEHPPLCGRDHLSFRSYYFSPFLTLTFCPSHYSVYA

SEQ ID NO: 1033827 - protein, 927 aa, Homo sapiens
MISAIEKQKLVYIYNRDAAARLTISSPLEAHKANTLVYHVVGVDVGFENPMFACLEMDYEEADNDPTGEAAANTQQTLTFYELDLGLNHVVRKYSEPLEEHGNFLITVPGGSDGPSGVLICSENYITYKNLVDQPDIRCPIPRRRNDLDDPERGMIFVCSATHKTKSMFFFLAQTEQGDIFKITLETDEDMVTEIRLKYFDTVPVAAAMCVLKTGFLFVASEFGNHYLYQIAHLGDDDEEPEFSSAMPLEEGDTFFFQPRPLKNLVLVDELDSLSPILFCQIADLANEDTPQLYVACGRGPRSSLRVLRHGLEVSEMAVSELPGNPNAVWTVRRHIEDEFDAYIIVSFVNATLVLSIGETVEEVTDSGFLGTTPTLSCSLLGDDALVQVYPDGIRHIRADKRVNEWKTPGKKTIVKCAVNQRQVVIALTGGELVYFEMDPSGQLNEYTERKEMSADVVCMSLANVPPGEQRSRFLAVGLVDNTVRIISLDPSDCLQPLSMQALPAQPESLCIVEMGGTEKQDELGERGSIGFLYLNIGLQNGVLLRTVLDPVTGDLSDTRTRYLGSRPVKLFRVRMQGQEAVLAMSSRSWLSYSYQSRFHLTPLSYETLEFASGFASEQCPEGIVAISTNTLRILALEKLGAVFNQVAFPLQYTPRKFVIHPESNNLIIIETDHNAYTEATKAQRKQQMAEEMVEAAGEDERELAAEMAAAFLNENLPESIFGAPKAGNGQWASVIRVMNPIQGNTLDLVQLEQNEAAFSVAVCRFSNTGEDWYVLVGVAKDLILNPRSVAGGFVYTYKLVNNGEKLEFLHKTPVEEVPAAIAPFQGRVLIGVGKLLRVYDLGKKKLLRKCENKHIANYISGIQTIGHRVIVSDVQESFIWVRYKRNENQLIIFADDTYPRWVTTASLLDYDTVAGADKFGNICVVS

SEQ ID NO: 1033828 - protein, 658 aa, Homo sapiens
MISAIEKQKLVYIYNRDAAARLTISSPLEAHKANTLVYHVVGVDVGFENPMFACLEMDYEEADNDPTGEAAANTQQTLTFYELDLGLNHVVRKYSEPLEEHGNFLITVPGGSDGPSGVLICSENYITYKNLVDQPDIRCPIPRRRNDLDDPERGMIFVCSATHKTKSMFFFLAQTEQGDIFKITLETDEDMVTEIRLKYFDTVPVAAAMCVLKTGFLFVASEFGNHYLYQIAHLGDDDEEPEFSSAMPLEEGDTFFFQPRPLKNLVLVDELDSLSPILFCQIADLANEDTPQLYVACGRGPRSSLRVLRHGLEVSEMAVSELPGNPNAVWTVRRHIEDEFDAYIIVSFVNATLVLSIGETVEEVTDSGFLGTTPTLSCSLLGDDALVQVYPDGIRHIRADKRVNEWKTPGKKTIVKCAVNQRQVVIALTGGELVYFEMDPSGQLNEYTERKEMSADVVCMSLANVPPGEQRSRFLAVGLVDNTVRIISLDPSDCLQPLSMQALPAQPESLCIVEMGGTEKQDELGERGSIGFLYLNIGLQNGVLLRTVLDPVTGDLSDTRTRYLGSRPVKLFRVRMQGQEAVLAMSSRSWLSYSYQSRFHLTPLSYETLEFASGFASEQCPEGIVAISTNTLRILALEKLGAVFNQVAFPLQYTPTHP

SEQ ID NO: 1033829 - protein, 399 aa, Homo sapiens; identical to SEQ ID NO: 1033814

SEQ ID NO: 1033830 - protein, 399 aa, Homo sapiens; identical to SEQ ID NO: 1033814

SEQ ID NO: 1033831 - protein, 399 aa, Homo sapiens; identical to SEQ ID NO: 1033814

SEQ ID NO: 1033832 - protein, 399 aa, Homo sapiens; identical to SEQ ID NO: 1033814

SEQ ID NO: 1033833 - protein, 399 aa, Homo sapiens; identical to SEQ ID NO: 1033814

SEQ ID NO: 1033834 - protein, 108 aa, Homo sapiens
  misc_feature (5)..(5): Xaa can be any naturally occurring amino acid
  misc_feature (7)..(9): Xaa can be any naturally occurring amino acid
GNKFXPXXXSAAALAEDGILVPFTSHEDHDFFQHVEMHLRSEHPPLCGRDHLSFRSYYFPVKNVIDGDLCEQFNSMEPNKQKNVSEELDRTPPEVSKKLEDIRTRYAF

SEQ ID NO: 1033835 - protein, 399 aa, Homo sapiens; identical to SEQ ID NO: 1033814

SEQ ID NO: 1033836 - protein, 399 aa, Homo sapiens; identical to SEQ ID NO: 1033814

SEQ ID NO: 1033837 - protein, 1069 aa, Homo sapiens
MISAIEKQKLVYIYNRDAAARLTISSPLEAHKANTLVYHVVGVDVGFENPMFACLEMDYEEADNDPTGEAAANTQQTLTFYELDLGLNHVVRKYSEPLEEHGNFLITVPGGSDGPSGVLICSENYITYKNLVDQPDIRCPIPRRRNDLDDPERGMIFVCSATHKTKSMFFFLAQTEQGDIFKITLETDEDMVTEIRLKYFDTVPVAAAMCVLKTGFLFVASEFGNHYLYQIAHLGDDDEEPEFSSAMPLEEGDTFFFQPRPLKNLVLVDELDSLSPILFCQIADLANEDTPQLYVACGRGPRSSLRVLRHGLEVSEMAVSELPGNPNAVWTVRRHIEDEFDAYIIVSFVNATLVLSIGETVEEVTDSGFLGTTPTLSCSLLGDDALVQVYPDGIRHIRADKRVNEWKTPGKKTIVKCAVNQRQVVIALTGGELVYFEMDPSGQLNEYTERKEMSADVVCMSLANVPPGEQRSRFLAVGLVDNTVRIISLDPSDCLQPLSMQALPAQPESLCIVEMGGTEKQDELGERGSIGFLYLNIGLQNGVLLRTVLDPVTGDLSDTRTRYLGSRPVKLFRVRMQGQEAVLAMSSRSWLSYSYQSRFHLTPLSYETLEFASGFASEQCPEGIVAISTNTLRILALEKLGAVFNQVAFPLQYTPRKFVIHPESNNLIIIETDHNAYTEATKAQRKQQMAEEMVEAAGEDERELAAEMAAAFLNENLPESIFGAPKAGNGQWASVIRVMNPIQGNTLDLVQLEQNEAAFSVAVCRFSNTGEDWYVLVGVAKDLILNPRSVAGGFVYTYKLVNNGEKLEFLHKTPVEEVPAAIAPFQGRVLIGVGKLLRVYDLGKKKLLRKCENKHIANYISGIQTIGHRVIVSDVQESFIWVRYKRNENQLIIFADDTYPRWVTTASLLDYDTVAGADKFGNICVVRLPPNTNDEVDEDPTGNKALWDRGLLNGASQKAEVIMNYHVGETVLSLQKTTLIPGGSESLVYTTLSGGIGILVPFTSHEDHDFFQHVEMHLRSEHPPLCGRDHLSFRSYYFPVKNVIDGDLCEQFNSMEPNKLEDIRTRYAF

SEQ ID NO: 1033838 - protein, 368 aa, Homo sapiens
MKLFLDIRYNYPMSDSLDPRDIIGNMLILTFSEELLLSQVIDTQQLPHTNQHPPLEWGNSSKDLILNPRSVAGGFVYTYKLVNNGEKLEFLHKTPVEEVPAAIAPFQGRVLIGVGKLLRVYDLGKKKLLRKCENKHIANYISGIQTIGHRVIVSDVQESFIWVRYKRNENQLIIFADDTYPRWVTTASLLDYDTVAGADKFGNICVVRLPPNTNDEVDEDPTGNKALWDRGLLNGASQKAEVIMNYHVGETVLSLQKTTLIPGGSESLVYTTLSGGIGILVPFTSHEDHDFFQHVEMHLRSEHPPLCGRDHLSFRSYYFPVKNVIDGDLCEQFNSMEPNKQKNVSEELDRTPPEVSKKLEDIRTRYAF

SEQ ID NO: 1033839 - protein, 820 aa, Homo sapiens
MISAIEKQKLVYIYNRDAAARLTISSPLEAHKANTLVYHVVGVDVGFENPMFACLEMDYEEADNDPTGEAAANTQQTLTFYELDLGLNHVVRKYSEPLEEHGNFLITVPGGSDGPSGVLICSENYITYKNLVDQPDIRCPIPRRRNDLDDPERGMIFVCSATHKTKSMFFFLAQTEQGDIFKITLETDEDMVTEIRLKYFDTVPVAAAMCVLKTGFLFVASEFGNHYLYQIAHLGDDDEEPEFSSAMPLEEGDTFFFQPRPLKNLVLVDELDSLSPILFCQIADLANEDTPQLYVACGRGPRSSLRVLRHGLEVSEMAVSELPGNPNAVWTVRRHIEDEFDAYIIVSFVNATLVLSIGETVEEVTDSGFLGTTPTLSCSLLGDDALVQVYPDGIRHIRADKRVNEWKTPGKKTIVKCAVNQRQVVIALTGGELVYFEMDPSGQLNEYTERKEMSADVVCMSLANVPPGEQRSRFLAVGLVDNTVRIISLDPSDCLQPLSMQALPAQPESLCIVEMGGTEKQDELGERGSIGFLYLNIGLQNGVLLRTVLDPVTGDLSDTRTRYLGSRPVKLFRVRMQGQEAVLAMSSRSWLSYSYQSRFHLTPLSYETLEFASGFASEQCPEGIVAISTNTLRILALEKLGAVFNQVAFPLQYTPRKFVIHPESNNLIIIETDHNAYTEATKAQRKQQMAEEMVEAAGEDERELAAEMAAAFLNENLPESIFGAPKAGNGQWASVIRVMNPIQGNTLDLVQLEQNEAAFSVAVCRFSNTGEDWYVLVGVAKDLILNPRSVAGGFVYTYKLVNNGEKLEFLHKVGICQWFS

SEQ ID NO: 1033840 - protein, 487 aa, Homo sapiens
MISAIEKQKLVYIYNRDAAARLTISSPLEAHKANTLVYHVVGVDVGFENPMFACLEMDYEEADNDPTGEAAANTQQTLTFYELDLGLNHVVRKYSEPLEEHGNFLITVPGGSDGPSGVLICSENYITYKNLVDQPDIRCPIPRRRNDLDDPERGMIFVCSATHKTKSMFFFLAQTEQGDIFKITLETDEDMVTEIRLKYFDTVPVAAAMCVLKTGFLFVASEFGNHYLYQIAHLGDDDEEPEFSSAMPLEEGDTFFFQPRPLKNLVLVDELDSLSPILFCQIADLANEDTPQLYVACGRGPRSSLRVLRHGLEVSEMAVSELPGNPNAVWTVRRHIEGGLVKVLITTDEFDAYIIVSFVNATLVLSIGETVEEVTDSGFLGTTPTLSCSLLGDDALVQVYPDGIRHIRADKRVNEWKTPGKKTIVKCAVNQRQVVIALTGGELVYFEMDPSGQLNEVPNGGSHVGAVLAVPREKGRPGGGGRGNSGP

SEQ ID NO: 1033841 - protein, 201 aa, Homo sapiens
HWTENLHQKNVCPETDEVLQLQLLIGSFPKAHLILPRTEISTGFYSFCQVHQIHQVRAVLTTTTFPFVSIMSWKKALRIPGDLRVATVTLMLAMLSSPLAEGRDSPEDFVYQFKGMCYFTNGTERVRGVTRYIYNREEYARFDSDVGVYRAVTPQGRPDAEYWNSQKDSPGGDPGGVGHGVQTQLRGGATAGSCRGEWSPQ

SEQ ID NO: 1033842 - protein, 236 aa, Homo sapiens
HWTENLHQKNVCPETDEVLQLQLLIGSFPKAHLILPRTEISTGFYSFCQVHQIHQVRAVLTTTTFPFVSIMSWKKALRIPGDLRVATVTLMLAMLSSPLAEGRDSPEDFVYQFKGMCYFTNGTERVRGVTRYIYNREEYARFDSDVGVYRAVTPLGRPDAEYWNSQKDILERTRAELDTVCRHNYEVALPRDPAEESGAHSDHLPIQDRGPQPPQPAGLLGDRFLSRPDQSPVVSE

SEQ ID NO: 1033843 - protein, 236 aa, Homo sapiens; identical to SEQ ID NO: 1033842

SEQ ID NO: 1033844 - protein, 201 aa, Homo sapiens; identical to SEQ ID NO: 1033841

SEQ ID NO: 1033845 - protein, 306 aa, Homo sapiens
HWTENLHQKNVCPETDEVLQLQLLIGSFPKAHLILPRTEISTGFYSFCQVHQIHQVRAVLTTTTFPFVSIMSWKKALRIPGDLRVATVTLMLAMLSSPLAEGRDSPEDFVYQFKGMCYFTNGTERVRGVTRYIYNREEYARFDSDVGVYRAVTPLGRPDAEYWNSQKDILEKSWRGPGRSWTRCADTTTSWSSARPCSGDGPKIKVRWFRNDQEETAGVVSTPLIRNGDWTFQILVMLEMTPQRGDVYTCHVEHPSLQSPITVEWRAQSESAQSKMLSGVGGFVLGLIFLGLGLIIRQRSQKGLLH

SEQ ID NO: 1033846 - protein, 236 aa, Homo sapiens; identical to SEQ ID NO: 1033842

SEQ ID NO: 1033847 - protein, 269 aa, Homo sapiens [sequence omitted]

SEQ ID NO: 1033848 - protein, 261 aa, Homo sapiens [sequence omitted]

SEQ ID NO: 1033849 - protein, 261 aa, Homo sapiens [sequence omitted]

SEQ ID NO: 1033850 - protein, 261 aa, Homo sapiens [sequence omitted]

SEQ ID NO: 1033851 - protein, 201 aa, Homo sapiens; identical to SEQ ID NO: 1033841

SEQ ID NO: 1033852 - protein, 166 aa, Homo sapiens
MDVVDRQLPPRLCGTRVLTGVSALATIVSRGCRTDPMIAVVHGVFPIPPDTPGVIGTEQSGKLTMACYSEPCQQWEVASKQRGKPSMDKGQTHGTSHTPPRLTGAASRAFPAQTASGFKQRPYSVAVPAFSQGLDDYGARSMSRNPFAHVQLKPTVTNDRSAPLLS

SEQ ID NO: 1033853 - protein, 552 aa, Homo sapiens
MSLSRSEEMHRLTENVYKTIMEQFNPSLRNFIAMGKNYEKALAGVTYAAKGYFDALVKMGELASESQGSKELGDVLFQMAEVHRQIQNQLEEMLKSFHNELLTQLEQKVELDSRYLSAALKKYQTEQRSKGDALDKCQAELKKLRKKSQGSKNPQKYSDKELQYIDAISNKQGELENYVSDGYKTALTEERRRFCFLVEKQCAVAKNSAAYHSKGKELLAQKLPLWQQACADPSKIPERAVQLMQQVASNGATLPSALSASKSNLVISDPIPGAKPLPVPPELAPFVGRMSAQESTPIMNGVTGPDGEDYSPWADRKAAQPKSLSPPQSQSKLSDSYSNTLPVRKSVTPKNSYATTENKTLPRSSSMAAGLERNGRMRVKAIFSHAAGDNSTLLSFKEGDLITLLVPEARDGWHYGESEKTKMRGWFPFSYTRVLDSDGSDRLHMSLQQGKSSSTGNLLDKDDLAIPPPDYGAASRAFPAQTASGFKQRPYSVAVPAFSQGLDDYGARSMSRNPFAHVQLKPTVTNDRCDLSAQGPEGREHGDGSARTLAGR

SEQ ID NO: 1033854 - protein, 534 aa, Homo sapiens
MSLSRSEEMHRLTENVYKTIMEQFNPSLRNFIAMGKNYEKALAGVTYAAKGYFDALVKMGELASESQGSKELGDVLFQMAEVHRQIQNQLEEMLKSFHNELLTQLEQKVELDSRYLSAALKKYQTEQRSKGDALDKCQAELKKLRKKSQGSKNPQKYSDKELQYIDAISNKQGELENYVSDGYKTALTEERRRFCFLVEKQCAVAKNSAAYHSKGKELLAQKLPLWQQACADPSKIPERAVQLMQQVASNGATLPSALSASKSNLVISDPIPGAKPLPVPPELAPFVGRMSAQESTPIMNGVTGPDGEDYSPWADRKAAQPKSLSPPQSQSKLSDSYSNTLPVRKSVTPKNSYATTENKTLPRSSSMAAGLERNGRMRVKAIFSHAAGDNSTLLSFKEGDLITLLVPEARDGWHYGESEKTKMRGWFPFSYTRVLDSDGSDRLHMSLQQGKSSSTGNLLDKDDLAIPPPDYGAASRAFPAQTASGFKQRPYSVAVPAFSQGLDDYGARSMSRNPFAHVQLKPTVTNDRSAPLLS

SEQ ID NO: 1033855 - protein, 516 aa, Homo sapiens
MATENAGSRYVYKTIMEQFNPSLRNFIAMGKNYEKALAGVTYAAKGYFDALVKMGELASESQGSKELGDVLFQMAEVHRQIQNQLEEMLKSFHNELLTQLEQKVELDSRYLSAALKKYQTEQRSKGDALDKCQAELKKLRKKSQGSKNPQKYSDKELQYIDAISNKQGELENYVSDGYKTALTEERRRFCFLVEKQCAVAKNSAAYHSKGKELLAQKLPLWQQACADPSKIPERAVQLMQQVASNGATLPSALSASKSNLVISDPIPGAKPLPVPPELAPFVGRMSAQESTPIMNGVTGPDGEDYSPWADRKAAQPKSLSPPQSQSKLSDSYSNTLPVRKSVTPKNSYATTENKTLPRSSSMAAGLERNGRMRVKAIFSHAAGDNSTLLSFKEGDLITLLVPEARDGWHYGESEKTKMRGWFPFSYTRVLDSDGSDRLHMSLQQGKSSSTGNLLDKDDLAIPPPDYGAASRAFPAQTASGFKQRPYSVAVPAFSQGLDDYGARSMSSGSGTLVSTV

SEQ ID NO: 1033856 - protein, 262 aa, Homo sapiens
MSLSRSEEMHRLTENVYKTIMEQFNPSLRNFIAMGKNYEKALAGVTYAAKGYFDALVKMGELASESQGSKELGDVLFQMAEVHRQIQNQLEEMLKSFHNELLTQLEQKVELDSRYLSAALKKYQTEQRSKGDALDKCQAELKKLRKKSQGSKNPQKYSDKELQYIDAISNKQGELENYVSDGYKTALTEERRRFCFLVEKQCAVAKNSAAYHSKGQGRTGPCVETLPRRRSRSAKDFKSRGFHAQWMNVDTKQQHLYEDVKC

SEQ ID NO: 1033857 - protein, 87 aa, Homo sapiens
MSLSRSEEMHRLTENVYKSINAMLPYVASAQFILPVRVEELRYFLIPVSWYCASLSGPAMISICQIRKFRELVSVRECNISLIRVEL

SEQ ID NO: 1033858 - protein, 590 aa, Homo sapiens
LGGSGPLSSPSCCRYRRCCRRLRPPLRSVVQPGPRTMSLSRSEEMHRLTENVYKRVEEKYQRNLFPIFSPSALKPESRNFRGESWQGTIMEQFNPSLRNFIAMGKNYEKALAGVTYAAKGYFDALVKMGELASESQGSKELGDVLFQMAEVHRQIQNQLEEMLKSFHNELLTQLEQKVELDSRYLSAALKKYQTEQRSKGDALDKCQAELKKLRKKSQGSKNPQKYSDKELQYIDAISNKQGELENYVSDGYKTALTEERRRFCFLVEKQCAVAKNSAAYHSKGKELLAQKLPLWQQACADPSKIPERAVQLMQQVASNGATLPSALSASKSNLVISDPIPGAKPLPVPPELAPFVGRMSAQESTPIMNGVTGPDGEDYSPWADRKAAQPKSLSPPQSQSKLSDSYSNTLPVRKSVTPKNSYATTENKTLPRSSSMAAGLERNGRMRVKAIFSHAAGDNSTLLSFKEGDLITLLVPEARDGWHYGESEKTKMRGWFPFSYTRVLDSDGSDRLHMSLQQGKSSSTGNLLDKDDLAIPPPDYGAASRAFPAQTASGFKQRPYSVAVPAFSQGLDDYGARSMSSGSGTLVSTV

SEQ ID NO: 1033859 - protein, 278 aa, Homo sapiens
MQQVASNGATLPSALSASKSNLVISDPIPGAKPLPVPPELAPFVGRMSAQESTPIMNGVTGPDGEDYSPWADRKAAQPKSLSPPQSQSKLSDSYSNTLPVRKSVTPKNSYATTENKTLPRSSSMAAGLERNGRMRVKAIFSHAAGDNSTLLSFKEGDLITLLVPEARDGWHYGESEKTKMRGWFPFSYTRVLDSDGSDRLHMSLQQGKSSSTGNLLDKDDLAIPPPDYGAASRAFPAQTASGFKQRPYSVAVPAFSQGLDDYGARSMSSGSGTLVSTV

SEQ ID NO: 1033860 - protein, 443 aa, Homo sapiens
MAEVHRQIQNQLEEMLKSFHNELLTQLEQKVELDSRYLSAALKKYQTEQRSKGDALDKCQAELKKLRKKSQGSKNPQKYSDKELQYIDAISNKQGELENYVSDGYKTALTEERRRFCFLVEKQCAVAKNSAAYHSKGKELLAQKLPLWQQACADPSKIPERAVQLMQQVASNGATLPSALSASKSNLVISDPIPGAKPLPVPPELAPFVGRMSAQESTPIMNGVTGPDGEDYSPWADRKAAQPKSLSPPQSQSKLSDSYSNTLPVRKSVTPKNSYATTENKTLPRSSSMAAGLERNGRMRVKAIFSHAAGDNSTLLSFKEGDLITLLVPEARDGWHYGESEKTKMRGWFPFSYTRVLDSDGSDRLHMSLQQGKSSSTGNLLDKDDLAIPPPDYGAASRAFPAQTASGFKQRPYSVAVPAFSQGLDDYGARSMSSGSGTLVSTV

SEQ ID NO: 1033861 - protein, 228 aa, Homo sapiens
LGGSGPLSSPSCCRYRRCCRRLRPPLRSVVQPGPRTMSLSRSEEMHRLTENVYKTIMEQFNPSLRNFIAMGKNYEKALAGVTYAAKGYFDALVKMGELASESQGSKELGDVLFQMAEVHRQIQNQLEEMLKSFHNELLTQLEQKVELDSRYLSAALKKYQTEQRSKGDALDKCQAELKKLRKKSQGSKNPQKYSDKELQGWPLEGRWYFRFLEGAASVLFSHRHAGVT

SEQ ID NO: 1033862 - protein, 534 aa, Homo sapiens; identical to SEQ ID NO: 1033854

SEQ ID NO: 1033863 - protein, 520 aa, Homo sapiens
MSLSRSEEMHRLTENVYKTIMEQFNPSLRNFIAMGKNYEKALAGVTYAAKGYFDALVKMGELASESQGSKELGDVLFQMAEVHRQIQNQLEEMLKSFHNELLTQLEQKVELDSRYLSAALKKYQTEQRSKGDALDKCQAELKKLRKKSQGSKNPQKYSDKELQYIDAISNKQGELENYVSDGYKTALTEERRRFCFLVEKQCAVAKNSAAYHSKGKELLAQKLPLWQQACADPSKIPERAVQLMQQVASNGATLPSALSASKSNLVISDPIPGAKPLPVPPELAPFVGRMSAQESTPIMNGVTGPDGEDYSPWADRKAAQPKSLSPPQSQSKLSDSYSNTLPVRKSVTPKNSYATTENKTLPRSSSMAAGLERNGRMRVKAIFSHAAGDNSTLLSFKEGDLITLLVPEARDGWHYGESEKTKMRGWFPFSYTRVLDSDGSDRLHMSLQQGKSSSTGNLLDKDDLAIPPPDYGAASRAFPAQTASGFKQRPYSVAVPAFSQGLDDYGARSMSSADVEVARF

SEQ ID NO: 1033864 - protein, 534 aa, Homo sapiens; identical to SEQ ID NO: 1033854

SEQ ID NO: 1033865 - protein, 522 aa, Homo sapiens
MSLSRSEEMHRLTENVYKTIMEQFNPSLRNFIAMGKNYEKALAGVTYAAKGYFDALVKMGELASESQGSKELGDVLFQMAEVHRQIQNQLEEMLKSFHNELLTQLEQKVELDSRYLSAALKKYQTEQRSKGDALDKCQAELKKLRKKSQGSKNPQKYSDKELQYIDAISNKQGELENYVSDGYKTALTEERRRFCFLVEKQCAVAKNSAAYHSKGKELLAQKLPLWQQACADPSKIPERAVQLMQQVASNGATLPSALSASKSNLVISDPIPGAKPLPVPPELAPFVGRMSAQESTPIMNGVTGPDGEDYSPWADRKAAQPKSLSPPQSQSKLSDSYSNTLPVRKSVTPKNSYATTAENKTLPRSSSMAAGLERNGRMRVKAIFSHAAGDNSTLLSFKEGDLITLLVPEARDGWHYGESEKTKMRGWFPFSYTRVLDSDGSDRLHMSLQQGKSSSTGNLLDKDDLAIPPPDYGAASRAFPAQTASGFKQRPYSVAVPAFSQGLDDYGARSMSSGSGTLVSTV

SEQ ID NO: 1033866 - protein, 95 aa, Homo sapiens
  misc_feature (4)..(4): Xaa can be any naturally occurring amino acid
  misc_feature (9)..(9): Xaa can be any naturally occurring amino acid
  misc_feature (20)..(20): Xaa can be any naturally occurring amino acid
  misc_feature (31)..(31): Xaa can be any naturally occurring amino acid
  misc_feature (35)..(35): Xaa can be any naturally occurring amino acid
  misc_feature (62)..(62): Xaa can be any naturally occurring amino acid
EPLXRPIEXPGGSVLLRELXAAGNVADATLXAQAXPLLHALGAAHAYIMMFVHTCRVGQSEXRSRSAKDFKSRGFHAQWMNVDTKQQHLYEDVKC

SEQ ID NO: 1033867 - protein, 570 aa, Homo sapiens
LGGSGPLSSPSCCRYRRCCRRLRPPLRSVVQPGPRTMSLSRSEEMHRLTENVYKTIMEQFNPSLRNFIAMGKNYEKALAGVTYAAKGYFDALVKMGELASESQGSKELGDVLFQMAEVHRQIQNQLEEMLKSFHNELLTQLEQKVELDSRYLSAALKKYQTEQRSKGDALDKCQAELKKLRKKSQGSKNPQKYSDKELQYIDAISNKQGELENYVSDGYKTALTEERRRFCFLVEKQCAVAKNSAAYHSKGKELLAQKLPLWQQACADPSKIPERAVQLMQQVASNGATLPSALSASKSNLVISDPIPGAKPLPVPPELAPFVGRMSAQESTPIMNGVTGPDGEDYSPWADRKAAQPKSLSPPQSQSKLSDSYSNTLPVRKSVTPKNSYATTENKTLPRSSSMAAGLERNGRMRVKAIFSHAAGDNSTLLSFKEGDLITLLVPEARDGWHYGESEKTKMRGWFPFSYTRVLDSDGSDRLHMSLQQGKSSSTGNLLDKDDLAIPPPDYGAASRAFPAQTASGFKQRPYSVAVPAFSQGLDDYGARSMSRNPFAHVQLKPTVTNDRSAPLLS

SEQ ID NO: 1033868 - protein, 494 aa, Homo sapiens
ESSILPACLGRRQGWACVTYAAKGYFDALVKMGELASESQGSKELGDVLFQMAEVHRQIQNQLEEMLKSFHNELLTQLEQKVELDSRYLSAALKKYQTEQRSKGDALDKCQAELKKLRKKSQGSKNPQKYSDKELQYIDAISNKQGELENYVSDGYKTALTEERRRFCFLVEKQCAVAKNSAAYHSKGKELLAQKLPLWQQACADPSKIPERAVQLMQQVASNGATLPSALSASKSNLVISDPIPGAKPLPVPPELAPFVGRMSAQESTPIMNGVTGPDGEDYSPWADRKAAQPKSLSPPQSQSKLSDSYSNTLPVRKSVTPKNSYATTENKTLPRSSSMAAGLERNGRMRVKAIFSHAAGDNSTLLSFKEGDLITLLVPEARDGWHYGESEKTKMRGWFPFSYTRVLDSDGSDRLHMSLQQGKSSSTGNLLDKDDLAIPPPDYGAASRAFPAQTASGFKQRPYSVAVPAFSQGLDDYGARSMSSGSGTLVSTV

SEQ ID NO: 1033869 - protein, 251 aa, Homo sapiens
  misc_feature (29)..(29): Xaa can be any naturally occurring amino acid
  misc_feature (34)..(34): Xaa can be any naturally occurring amino acid
ASLNPLYSPIRASPASPGCPFWAFLPGGXLMTLXARCEDYSPWADRKAAQPKSLSPPQSQSKLSDSYSNTLPVRKSVTPKNSYATTENKTLPRSSSMAAGLERNGRMRVKAIFSHAAGDNSTLLSFKEGDLITLLVPEARDGWHYGESEKTKMRGWFPFSYTRVLDSDGSDRLHMSLQQGKSSSTGNLLDKDDLAIPPPDYGAASRAFPAQTASGFKQRPYSVAVPAFSQGLDDYGARSMSSGSGTLVSTV

SEQ ID NO: 1033870 - protein, 135 aa, Homo sapiens
KIIAIMNDTVTIRTRKFMTNRLLQRKQMVIDVLHPGKATVPKTEIREKLAKMYKTTPDVIFVFGFRTHFGGGKTTGFGMIYDSLDYAKKNEPKHRLARHGLYEKKKTSRKQRKERKNRMKKVRGTAKANVGAGKK

SEQ ID NO: 1033871 - protein, 135 aa, Homo sapiens; identical to SEQ ID NO: 1033870

SEQ ID NO: 1033872 - protein, 125 aa, Homo sapiens
GRVGRPTRRAKKLGSPCPRKSKPMSPKLRRRRSRRPPGGGGRHRGSGVASSSEDLCSGVLGPGRGPALPWSLAPPPAPGAQWSRLGELPAPRSGAGQAAQTYCGGREGRLLPGDGTRRPTRTRHR

SEQ ID NO: 1033873 - protein, 130 aa, Homo sapiens
  misc_feature (1)..(1): Xaa can be any naturally occurring amino acid
  misc_feature (7)..(7): Xaa can be any naturally occurring amino acid
XPLFRFXPKGGPKKRKSWWSPCPRKSKPMSPKLRRRRSRRPPGGGGRHRGSGVASSSEDLCSGVLGPGRGPALPWSLAPPPAPGAQWSRLGELPAPRSGAGQAAQTYCGGREGRLLPGDGTRRPTRTRHR

SEQ ID NO: 1033874 - protein, 198 aa, Homo sapiens [sequence omitted]

SEQ ID NO: 1033875 - protein, 271 aa, Homo sapiens
MLPAAARPLWGPCLGLRAAAFRLARRQVPCVCAVRHMRSSGHQRCEALAGAPLDNAPKEYPPKIQQLVQDIASLTLLEISDLNELLKKTLKIQDVGLVPMGGVMSGAVPAAAAQEAVEEDIPIAKERTHFTVRLTEAKPVDKVKLIKEIKNYIQGINLVQAKKLVESLPQEIKANVAKAEAEKIKAAPWRRWAAPWFWSSLQLGGLVFRGPGPRARSRPPVVTGSAQTGGSGVLEIAGSRGGKRKTTCGEGGGCAVRPKPRGPEGPGVKNG

SEQ ID NO: 1033876 - protein, 122 aa, Homo sapiens
TRGSTHASGKEAGINLVQAKKLVESLPQEIKANVAKAEAEKIKAAPWRRWAAPWFWSSLQLGGLVFRGPGPRARSRPPVVTGSAPSTRRPVEPFGRIACATQRGRTGRTDLLWREGGAAAAW

SEQ ID NO: 1033877 - protein, 168 aa, Homo sapiens
MLPAAARPLWGPCLGLRAAAFRLARRQVPCVCAVRHMRSSGHQRCEALAGAPLDNAPKEYPPKIQQLVQDIASLTLLEISDLNELLKKTLKIQDVGLVPMGGVMSGAVPAAAAQEAVEEDIPIAKERTHFTVRLTEAKPVDKVKLIKEIKNYIQGINLVQAKKLVVLE

SEQ ID NO: 1033878 - protein, 198 aa, Homo sapiens
MLPAAARPLWGPCLGLRAAAFRLARRQVPCVCTVRHMRSSGHQRCEALAGAPLDNAPKEYPPKIQQLVQDIASLTLLEISDLNELLKKTLKIQDVGLVPMGGVMSGAVPAAAAQEAVEEDIPIAKERTHFTVRLTEAKPVDKVKLIKEIKNYIQGINLVQAKKLVESLPQEIKANVAKAEAEKIKAALEAVGGTVVLE

SEQ ID NO: 1033879 - protein, 198 aa, Homo sapiens; identical to SEQ ID NO: 1033878

SEQ ID NO: 1033880 - protein, 73 aa, Homo sapiens
GYSRTTVPPTFDGRCSSYVARHRPAPGAQWSRLGELPAPRSGAGQAAQTYCGGREGRLLPGDGTRRPTRTRHR

SEQ ID NO: 1033881 - protein, 506 aa, Homo sapiens
RPPTQLSGPGGKMAAAAECDVVMAATEPELLDDQEAKREAETFKEQGNAYYAKKDYNEAYNYYTKAIDMCPKNASYYGNRAATLMMLGRFREALGDAQQSVRLDDSFVRGHLREGKCHLSLGNAMAACRSFQRALELDHKNAQAQQEFKNANAVMEYEKIAETDFEKRDFRKVVFCMDRALEFAPACHRFKILKAECLAMLGRYPEAQSVASDILRMDSTNADALYVRGLCLYYEDCIEKAVQFFVQALRMAPDHEKACIACRNAKALKAKKEDGNKAFKEGNYKLAYELYTEALGIDPNNIKTNAKLYCNRGTVNSKLRKLDDAIEDCTNAVKLDDTYIKAYLRRAQCYMDTEQYEEAVRDYEKVYQTEKTKEHKQLLKNAQLELKKSKRKDYYKILGVDKNASEDEIKKAYRKRALMHHPDRHSGASAEVQKEEEKKFKEVGEAFTILSDPKKKTRYDSGQDLDEEGMNMGDFDPNNIFKAFFGGPGGFSFEASGPGNFFFQFG

SEQ ID NO: 1033882 - protein, 525 aa, Homo sapiens
RPPTQLSGPGGKMAAAAECDVVMAATEPELLDDQEAKREAETFKEQGNAYYAKKDYNEAYNYYTKAIDMCPKNASYYGNRAATLMMLGRFREALGDAQQSVRLDDSFVRGHLREGKCHLSLGNAMAACRSFQRALELDHKNAQAQQEFKNANAVMEYEKIAETDFEKRDFRKVVFCMDRALEFAPACHRFKILKAECLAMLGRYPEAQSVASDILRMDSTNADALYVRGLCLYYEDCIEKAVQFFVQALRMAPDHEKACIACRNAKALKAKKEDGNKAFKEGNYKLAYELYTEALGIDPNNIKTNAKLYCNRGTVNSKLRKLDDAIEDCTNAVKLDDTYIKAYLRRAQCYMDTEQYEEAVRDYEKVYQTEKTKEHKQLLKNAQLELKKSKRKDYYKILGVDKNASEDEIKKAYRKRALMHHPDRHSGASAEVQKEEEKKFKEVGEAFTILSDPKKKTRYDSGQDLDEEGMNMGDFDPNNIFKAFFGGPGGFSFEGRWACCSWEFPDHKPTHSLPLRQLFGSQRGP

SEQ ID NO: 1033883 - protein, 525 aa, Homo sapiens; identical to SEQ ID NO: 1033882

SEQ ID NO: 1033884 - protein, 541 aa, Homo sapiens
RPPTQLSGPGGKMAAAAECDVVMAATEPELLDDQEAKREAETFKEQGNAYYAKKDYNEAYNYYTKAIDMCPKNASYYGNRAATLMMLGRFREALGDAQQSVRLDDSFVRGHLREGKCHLSLGNAMAACRSFQRALELDHKNAQAQQEFKNANAVMEYEKIAETDFEKRDFRKVVFCMDRALEFAPACHRFKILKAECLAMLGRYPEAQSVASDILRMDSTNADALYVRGLCLYYEDCIEKAVQFFVQALRMAPDHEKACIACRNAKALKAKKEDGNKAFKEGNYKLAYELYTEALGIDPNNIKTNAKLYCNRGTVNSKLRKLDDAIEDCTNAVKLDDTYIKAYLRRAQCYMDTEQYEEAVRDYEKVYQTEKTKEHKQLLKNAQLELKKSKRKDYYKILGVDKNASEDEIKKAYRKRALMHHPDRHSGASAEVQKEEEKKFKEVGEAFTILSDPKKKTRYDSGQDLDEEGMNMGDFDPNNIFKAFFGGPGGFSFEASGPGNIFFSIGLRKGNHPEPRKCRFTQFNLECGNSSPPPFITSPCA

SEQ ID NO: 1033885 - protein, 476 aa, Homo sapiens
RPPTQLSGPGGKMAAAAECDVVMAATEPELLDDQEAKREAETFKEQGNAYYAKKDYNEAYNYYTKAIDMCPKNASYYGNRAATLMMLGRFREALGDAQQSVRLDDSFVRGHLREGKCHLSLGNAMAACRSFQRALELDHKNAQAQQEFKNANAVMEYEKIAETDFEKRDFRKVVFCMDRALEFAPACHRFKILKAECLAMLGRYPEAQSVASDILRMDSTNADALYVRGLCLYYEDCIEKAVQFFVQALRMAPDHEKACIACRNAKALKAKKEDGNKAFKEGNYKLAYELYTEALGIDPNNIKTNAKLYCNRGTVNSKLRKLDDAIEDCTNAVKLDDTYIKAYLRRAQCYMDTEQYEEAVRDYEKVYQTEKTKEHKQLLKNAQLELKKSKRKDYYKILGVDKNASEDEIKKAYRKRALMHHPDRHSGASAEVQKEEEKKFKEVGEAFTILSDPKKKTRYDSGQDLDEEGMNMGDLS

SEQ ID NO: 1033886 - protein, 352 aa, Homo sapiens
MFLESLMKSLILFSSSLQVVFCMDRALEFAPACHRFKILKAECLAMLGRYPEAQSVASDILRMDSTNADALYVRGLCLYYEDCIEKAVQFFVQALRMAPDHEKACIACRNAKALKAKKEDGNKAFKEGNYKLAYELYTEALGIDPNNIKTNAKLYCNRGTVNSKLRKLDDAIEDCTNAVKLDDTYIKAYLRRAQCYMDTEQYEEAVRDYEKVYQTEKTKEHKQLLKNAQLELKKSKRKDYYKILGVDKNASEDEIKKAYRKRALMHHPDRHSGASAEVQKEEEKKFKEVGEAFTILSDPKKKTRYDSGQDLDEEGMNMGDFDPNNIFKAFFGGPGGFSFEASGPGNFFFQFG

SEQ ID NO: 1033887 - protein, 354 aa, Homo sapiens
RPPTQLSGPGGKMAAAAECDVVMAATEPELLDDQEAKREAETFKEQGNAYYAKKDYNEAYNYYTKAIDMCPKNASYYGNRAATLMMLGRFREALGDAQQSVRLDDSFVRGHLREGKCHLSLGNAMAACRSFQRALELDHKNAQAQQEFKNANAVMEYEKIAETDFEKRDFRKVVFCMDRALEFAPACHRFKILKAECLAMLGRYPEAQSVASDILRMDSTNADALYVRGLCLYYEDCIEKAVQFFVQALRMAPDHEKACIACRNAKALKAKKEDGNKAFKEGNYKLAYELYTEALGIDPNNIKTNAKLYCNRGTVNSKLRKLDDAIEDCTNAVKLDDTYIKAYLRRAQWGLFQP

SEQ ID NO: 1033888 - protein, 102 aa, Homo sapiens
PTDPQFAFVTSRHSLAVLAASALKVGGPAVLGSSQITSQHTHCLLGSSLGVRGAHERGQLNSHLAGHLSTRLLLRMKTGRFPGTPCLGTFSHRISAGSGRHL

SEQ ID NO: 1033889 - protein, 506 aa, Homo sapiens; identical to SEQ ID NO: 1033881

SEQ ID NO: 1033890 - protein, 438 aa, Homo sapiens
MCPKNASYYGNRAATLMMLGRFREALGDAQQSVRLDDSFVRGHLREGKCHLSLGNAMAACRSFQRALELDHKNAQAQQEFKNANAVMEYEKIAETDFEKRDFRKVVFCMDRALEFAPACHRFKILKAECLAMLGRYPEAQSVASDILRMDSTNADALYVRGLCLYYEDCIEKAVQFFVQALRMAPDHEKACIACRNAKALKAKKEDGNKAFKEGNYKLAYELYTEALGIDPNNIKTNAKLYCNRGTVNSKLRKLDDAIEDCTNAVKLDDTYIKAYLRRAQCYMDTEQYEEAVRDYEKVYQTEKTKEHKQLLKNAQLELKKSKRKDYYKILGVDKNASEDEIKKAYRKRALMHHPDRHSGASAEVQKEEEKKFKEVGEAFTILSDPKKKTRYDSGQDLDEEGMNMGDFDPNNIFKAFFGGPGGFSFEASGPGNFFFQFG

SEQ ID NO: 1033891 - protein, 525 aa, Homo sapiens; identical to SEQ ID NO: 1033882

SEQ ID NO: 1033892 - protein, 591 aa, Homo sapiens
RPPTQLSGPGGKMAAAAECDVVMAATEPELLDDQEAKREAETFKEQGNAYYAKKDYNEAYNYYTKAIDMCPKNASYYGNRAATLMMLGRFREALGDAQQSVRLDDSFVRGHLREGKCHLSLGNAMAACRSFQRALELDHKNAQAQQEFKNANAVMEYEKIAETDFEKRDFRKVVFCMDRALEFAPACHRFKILKAECLAMLGRYPEAQSVASDILRMDSTNADALYVRGLCLYYEDCIEKAVQFFVQALRMAPDHEKACIACRNAKALKAKKEDGNKAFKEGNYKLAYELYTEALGIDPNNIKTNAKLYCNRGTVNSKLRKLDDAIEDCTNAVKLDDTYIKAYLRRAQCYMDTEQYEEAVRDYEKVYQTEKTKEHKQLLKNAQLELKKSKRKDYYKILGVDKNASEDEIKKAYRKRALMHHPDRHSGASAEVQKEEEKKFKEVGEAFTILSDPKKKTRYDSGQDLDEEGMNMGDFDPNNIFKAFFGGPGGFSFEASGPGNIFFSIGLRKGNHPKPRKGRSTQFKLEGGNRLPSSLNNRSGGLKQFRYLKRKPLGLGNGGGPRGTKAEKTQAEEHYRFAQIANTFDLDTETH

SEQ ID NO: 1033893 - protein, 488 aa, Homo sapiens
RPPTQLSGPGGKMAAAAECDVVMAATEPELLDDQEAKREAETFKEQGNAYYAKKDYNEAYNYYTKAIDMCPKNASYYGNRAATLMMLGRFREALGDAQQSVRLDDSFVRGHLREGKCHLSLGNAMAACRSFQRALELDHKNAQAQQEFKNANAVMEYEKIAETDFEKRDFRKVVFCMDRALEFAPACHRFSVASDILRMDSTNADALYVRGLCLYYEDCIEKAVQFFVQALRMAPDHEKACIACRNAKALKAKKEDGNKAFKEGNYKLAYELYTEALGIDPNNIKTNAKLYCNRGTVNSKLRKLDDAIEDCTNAVKLDDTYIKAYLRRAQCYMDTEQYEEAVRDYEKVYQTEKTKEHKQLLKNAQLELKKSKRKDYYKILGVDKNASEDEIKKAYRKRALMHHPDRHSGASAEVQKEEEKKFKEVGEAFTILSDPKKKTRYDSGQDLDEEGMNMGDFDPNNIFKAFFGGPGGFSFEASGPGNFFFQFG

SEQ ID NO: 1033894 - protein, 349 aa, Homo sapiens
RPPTQLSGPGGKMAAAAECDVVMAATEPELLDDQEAKREAETFKEQGNAYYAKKDYNEAYNYYTKAIDMCPKNASYYGNRAATLMMLGRFREALGDAQQSVRLDDSFVRGHLREGKCHLSLGNAMAACRSFQRALELDHKNAQAQQEFKNANAVMEYEKIAETDFEKRDFRKVVFCMDRALEFAPACHRFKILKAECLAMLGRYPEAQSVASDILRMDSTNADALYVRGLCLYYEDCIEKAVQFFVQALRMAPDHEKACIACRNAKALKAKKEDGNKAFKEGNYKLAYELYTEALGIDPNNIKTNAKLYCNRGTVNSKLRKLDDAIEDCTNAVKLDDTYIKAYLRRAQW

SEQ ID NO: 1033895 - protein, 296 aa, Homo sapiens
MANVLCNRARLVSYLPGFCSLVKRVVNPKAFSTAGSSGSDESHVAAAPPDICSRTVWPDETMGPFGPQDQRFQLPGNIGFDCHLNGTASQKKSLVHKTLPDVLAEPLSSERHEFVMAQYVNEFQGNDAPVEQEINSAETYFESARVECAIQTCPELLRKDFESLFPEVANGKLMILTVTQKTKNDMTVWSEEVEIEREVLLEKFINGAKEICYALRAEGYWADFIDPSSGLAFFGPYTNNTLFETDERYRHLGFSVDDLGCCKVIRHSLWGTHVVVGSIFTNATPDSHIMKKLSGN

SEQ ID NO: 1033896 - protein, 296 aa, Homo sapiens; identical to SEQ ID NO: 1033895

SEQ ID NO: 1033897 - protein, 107 aa, Homo sapiens
SGSCTAGSGLGDLCLAWGRVLASLGYGESLDFGPDVVDDTPLRKSGRYLSCLLLEFNRSLLCFVVFFPRNNFTKGKLFVRTIFSSGDGQCACVTEPDWFPISQDFAL

SEQ ID NO: 1033898 - protein, 74 aa, Homo sapiens
PSSETEWFYLPGLSIRVSIPKPFRLQDHQVRMSLMWLLHPPDICSRTVWPDETYGTLVWTSRSEVPASWGTIGL

SEQ ID NO: 1033899 - protein, 133 aa, Homo sapiens
MCNELHSLLWWQGDHAECSASHGAWEQGPGEKYFQYSLSQQFIPSGSPMAGRLHVGLLCACASSFRRARKQLPLPAHRQRRCYHRCRRRRHFDGRKSPVLGQLETVVVTEITLPKESYLCELSSPAEMANVLV

SEQ ID NO: 1033900 - protein, 154 aa, Homo sapiens
MCNELHSLLWWQGDHAECSASHGAWEQGPGEKYFQYSLSQQFIPSGSPMAGRLHVGLLCACASSFRRARKQLPLPAHRQRRCYHRCRRRRHFDGRKSPVLGQLETVVVTVRMVSAHVSPSKFARVGVTALEITLPKESYLCELSSPAEMANVLV

SEQ ID NO: 1033901 - protein, 130 aa, Homo sapiens
MCNELHSLLWWQGDHAECSASHGAWEQGPGEKYFQYSLSQQFIPSGSPMAGRLHVGLLCACASSFRRARKQLPLPAHRQRRCYHRCRRRRHFDGRKSPVLGQLETVVVTEITLPKESYLCELSSPAEMAN

SEQ ID NO: 1033902 - protein, 78 aa, Homo sapiens
SSHEELLSEAYWIVTLRPGPWSIPKPFRLQDHQVRMSLMWLLHPPDICSRTVWPDETYGTLVWTSRSEVPASWGTIGL

SEQ ID NO: 1033903 - protein, 133 aa, Homo sapiens; identical to SEQ ID NO: 1033899

SEQ ID NO: 1033904 - protein, 106 aa, Homo sapiens
MAGRLHVGLLCACASSFRRARKQLPLPAHRQRRCYHRCRRRRHFDGRKSPVLGQLETVVVTVRMVSAHVSPSKFARVGVTALEITLPKESYLCELSSPAEMANVLV

SEQ ID NO: 1033905 - protein, 266 aa, Homo sapiens [sequence omitted]

SEQ ID NO: 1033906 - protein, 266 aa, Homo sapiens
MVCLKLPGGSCMTALTVTLMVLSSPLALAGDTRPRFLWQLKFECHFFNGTERVRLLERCIYNQEESVRFDSDVGEYRAVTELGRPDAEYWNSQKDLLEQRRAAVDTYCRHNYGVGESFTVQRRVEPKVTVYPSKTQPLQHHNLLVCSVSGFYPGSIEVRWFRNGQEEKAGVVSTGLIQNGDWTFQTLVMLETVPRSGEVYTCQVEHPSVTSPLTVEWRARSESAQSKMLSGVGGFVLGLLFLGAGLFIYFRNQKGHSGLQPTGFLS

SEQ ID NO: 1033907 - protein, 192 aa, Homo sapiens
CSRIATHKCCWLGLFCAIKALEPDCQLGCQPPSCTPYKLRPALPAVPGEALPAAGTGRTEKAGGQEDPLLPTAPEKRAVPDRMCRHNYELDEAMTLQRRVQPKVNVSPSKKGPLQHHNLLVCHVTDFYPGSIQVRRFLNGQEETVGVGSTNLIRNEDGPFKFWVMLEMTPQKEEVYTCQVEHTSLNSPVPVN

SEQ ID NO: 1033908 - protein, 72 aa, Homo sapiens
QQCYRRTVLFIRGAFSVHHLPLRTGPVLFSSMVCLKLPGGSCMAALTVTLMVLSSPLALAGDTRPRFLWQDK

SEQ ID NO: 1033909 - protein, 266 aa, Homo sapiens [sequence omitted]

SEQ ID NO: 1033910 - protein, 142 aa, Homo sapiens
MPKVTVYPSKTQPLQHHNLLVCSVSGFYPGSIEVRWFRNGQEEKAGVVSTGLIQNGDWTFQTLVMLETVPRSGEVYTCQVEHPSVTSPLTVEWRARSESAQSKMLSGVGGFVLGLLFLGAGLFIYFRNQKGHSGLQPTGFLS

SEQ ID NO: 1033911 - protein, 219 aa, Homo sapiens
MKRVQYLNRYIHKREENLRFDSNVEEFQAVTELGRPVAENWNSQKGIPEEKRDKMDDYCRYNYGVFESFTVQPRVHPKVTVILYPSKTQPLQHHNLLVCSVSGFYPGSIEVRWFRNGQEEKAGVVSTGLIQNGDWTFQTLVMLETVPRSGEVYTCQVEHPSVTSPLTVEWRARSESAQSKMLSGVGGFVLGLLFLGAGLFIYFRNQKGHSGLQPTGFLS

SEQ ID NO: 1033912 - protein, 185 aa, Homo sapiens
MASCAIGLVKARAWVCREADTQPNQETYSVFLTHSLYVVFLLVQPKVTVYPSKTQPLQHHNLLVCSVSGFYPGSIEVRWFRNGQEEKAGVVSTGLIQNGDWTFQTLVMLETVPRSGEVYTCQVEHPSVTSPLTVEWRARSESAQSKMLSGVGGFVLGLLFLGAGLFIYFRNQKGHSGLQPTGFLS

SEQ ID NO: 1033913 - protein, 267 aa, Homo sapiens
MVCLKLPGGSCMAALTVTLMVLSSPLALAGDTRPRFLWQLKFECHFFNGTERVRLLERCIYNQEEYVRFDSDVGEYRAVTELGRPDAEYWNSQKDILEDRRGPRWTPTADTTTGLVRASQCSGESILKVTVYPSKTQPLQHHNLLVCSVSGFYPGSIEVRWFRNGQEEKAGVVSTGLIQNGDWTFQTLVMLETVPRSGEVYTCQVEHPSVTSPLTVEWRARSESAQSKMLSGVGGFVLGLLFLGAGLFIYFRNQKGHSGLQPTGFLS

SEQ ID NO: 1033914 - protein, 103 aa, Homo sapiens
FSVPDCQLYPSRESITGSWCFQTLVMLETVPRSGEVYTCQVEHPSVTSPLTVEWRARSESAQSKMLSGVGGFVLGLLFLGAGLFIYFRNQKGHSGLQPTGFLS

SEQ ID NO: 1033915 - protein, 130 aa, Homo sapiens
  misc_feature (38)..(38): Xaa can be any naturally occurring amino acid
  misc_feature (46)..(46): Xaa can be any naturally occurring amino acid
  misc_feature (70)..(70): Xaa can be any naturally occurring amino acid
  misc_feature (77)..(77): Xaa can be any naturally occurring amino acid
  misc_feature (81)..(82): Xaa can be any naturally occurring amino acid
  misc_feature (121)..(121): Xaa can be any naturally occurring amino acid
MSAVCLRVVTNLSCMNTKTTGSLLRPSFQHVACVRSSXFLSVDLVXYPVAKNPMPPVHATHITFPVVLAXCEMGFLXSSAXXLNVQRRFPGHVQRQRQTWACVSDMAWIQQVDDLDPSETXWLDAGEQVP

SEQ ID NO: 1033916 - protein, 142 aa, Homo sapiens; identical to SEQ ID NO: 1033910

SEQ ID NO: 1033917 - protein, 192 aa, Homo sapiens
RGSSSSSCLEVSRIGWRRGGGPKSLGIRRGFPAWSPRQPVRLRKTEDEPLGCAGRGYGWDQLRFQCPHPAQEPRMAASLSVSSQEAAPVTGSFVSPQHVSCSRISSECHFFNGTERVRFLDRYFYNQEEYVRFDSDVGEYRAVTELGRPDAEYWNSQKDILEDRRGPRWTPTADTTTGLVRASQCSGELSLR

SEQ ID NO: 1033918 - protein, 185 aa, Homo sapiens; identical to SEQ ID NO: 1033912

SEQ ID NO: 1033919 - protein, 150 aa, Homo sapiens
  misc_feature (115)..(115): Xaa can be any naturally occurring amino acid
  misc_feature (124)..(124): Xaa can be any naturally occurring amino acid
  misc_feature (128)..(128): Xaa can be any naturally occurring amino acid
  misc_feature (146)..(146): Xaa can be any naturally occurring amino acid
MCRHNYELDEAMTLQRRVQPKVNVSPSKKGPLQHHNLLVCHVTDFYPGSIQVRRFLNGQEETVGVGSTNLIRNEDGPSKFWVMLEMTPQEGKRLHLPSGAHQLDSLSRGWKAHLXLPGVRLDGXGGSXGAHHLWIGISCTGGASSXGLHR

SEQ ID NO: 1033920 - protein, 104 aa, Homo sapiens
  misc_feature (89)..(89): Xaa can be any naturally occurring amino acid
MVGTLRALRTGDAGGRYLGGDVMLRGWPCIACRYLDTANIGTILGMIRRRLRSGSSLPADTSETYSGLRRKSITQVLSVAEIQSLKADXYIPSNGTQTHWQDHR

SEQ ID NO: 1033921 - protein, 266 aa, Homo sapiens [sequence omitted]

SEQ ID NO: 1033922 - protein, 102 aa, Homo sapiens
MPLRLDIKRKLTARSDRVKSVDLHPTEPWMLASLYNGSVCVWNHETQVGIFQDFIRNKILCETVFIMKEKKYYNRIQNLYANCFLKLVQSILNMKELTFMRG

SEQ ID NO: 1033923 - protein, 906 aa, Homo sapiens
MPLRLDIKRKLTARSDRVKSVDLHPTEPWMLASLYNGSVCVWNHETQTLVKTFEVCDLPVRAAKFVARKNWVVTGADDMQIRVFNYNTLERVHMFEAHSDYIRCIAVHPTQPFILTSSDDMLIKLWDWDKKWSCSQVFEGHTHYVMQIVINPKDNNQFASASLDRTIKVWQLGSSSPNFTLEGHEKGVNCIDYYSGGDKPYLISGADDRLVKIWDYQNKTCVQTLEGHAQNVSCASFHPELPIIITGSEDGTVRIWHSSTYRLESTLNYGMERVWCVASLRGSNNVALGYDEGSIIVKLGREEPAMSMDANGKIIWAKHSEVQQANLKAMGDAEIKDGERLPLAVKDMGSCEIYPQTIQHNPNGRFVVVCGDGEYIIYTAMALRNKSFGSAQEFAWAHDSSEYAIRESNSIVKIFKNFKEKKSFKPDFGAESIYGGFLLGVRSVNGLAFYDWDNTELIRRIEIQPKHIFWSDSGELVCIATEESFFILKYLSEKVLAAQETHEGVTEDGIEDAFEVLGEIQEIVKTGLWVGDCFIYTSSVNRLNYYVGGEIVTIAHLDRTMYLLGYIPKDNRLYLGDKELNIISYSLLVSVLEYQTAVMRRDFSMADKVLPTIPKEQRTRVAHFLEKQGFKQQALTVSTDPEHRFELALQLGELKIAYQLAVEAESEQKWKQLAELAISKCQFGLAQECLHHAQDYGGLLLLATASGNANMVNKLAEGAERDGKNNVAFMSYFLQGKVDACLELLIRTGRLPEAAFLARTYLPSQVSRVVKLWRENLSKVNQKAAESLADPTEYENLFPGLKEAFVVEEWVKETHADLWPAKQYPLVTPNEERNVMEEGKDFQPSRSTAQQELDGKPASPTPVIVASHTANKEEKSLLELEVDLDNLELEDIDTTDINLDEDILDD

SEQ ID NO: 1033924 - protein, 887 aa, Homo sapiens
MPLRLDIKRKLTARSDRVKSVDLHPTEPWMLASLYNGSVCVWNHETQTLVKTFEVCDLPVRAAKFVARKNWVVTGADDMQIRVFNYNTLERVHMFEAHSDYIRCIAVHPTQPFILTSSDDMLIKLWDWDKKWSCSQVFEGHTHYVMQIVINPKDNNQFASASLDRTIKVWQLGSSSPNFTLEGHEKGVNCIDYYSGGDKPYLISGADDRLVKIWDYQNKTCVQTLEGHAQNVSCASFHPELPIIITGSEDGTVRIWHSSTYRLESTLNYGMERVWCVASLRGSNNVALGYDEGSIIVKLGREEPAMSMDANGKIIWAKHSEVQQANLKAMGDAEIKDGERLPLAVKDMGSCEIYPQTIQHNPNGRFVVVCGDGEYIIYTAMALRNKSFGSAQEFAWAHDSSEYAIRESNSIVKIFKNFKEKKSFKPDFGAESIYGGFLLGVRSVNGLAFYDWDNTELIRRIEIQPKHIFWSDSGELVCIATEESFFILKYLSEKVLAAQETHEGVTEDGIEDAFEVLGEIQEIVKTGLWVGDCFIYTSSVNRLNYYVGGEIVTIAHLDRTMYLLGYILLVSVLEYQTAVMRRDFSMADKVLPTIPKEQRTRVAHFLEKQGFKQQALTVSTDPEHRFELALQLGELKIAYQLAVEAESEQKWKQLAELAISKCQFGLAQECLHHAQDYGGLLLLATASGNANMVNKLAEGAERDGKNNVAFMSYFLQGKVDACLELLIRTGRLPEAAFLARTYLPSQVSRVVKLWRENLSKVNQKAAESLADPTEYENLFPGLKEAFVVEEWVKETHADLWPAKQYPLVTPNEERNVMEEGKDFQPSRSTAQQELDGKPASPTPVIVASHTANKEEKSLLELEVDLDNLELEDIDTTDINLDEDILDD

SEQ ID NO: 1033925 - protein, 644 aa, Homo sapiens
MPLRLDIKRKLTARSDRVKSVDLHPTEPWMLASLYNGSVCVWNHETQTLVKTFEVCDLPVRAAKFVARKNWVVTGADDMQIRVFNYNTLERVHMFEAHSDYIRCIAVHPTQPFILTSSDDMLIKLWDWDKKWSCSQVFEGHTHYVMQIVINPKDNNQFASASLDRTIKVWQLGSSSPNFTLEGHEKGVNCIDYYSGGDKPYLISGADDRLVKIWDYQNKTCVQTLEGHAQNVSCASFHPELPIIITGSEDAFEVLGEIQEIVKTGLWVGDCFIYTSSVNRLNYYVGGEIVTIAHLDRTMYLLGYIPKDNRLYLGDKELNIISYSLLVSVLEYQTAVMRRDFSMADKVLPTIPKEQRTRVAHFLEKQGFKQQALTVSTDPEHRFELALQLGELKIAYQLAVEAESEQKWKQLAELAISKCQFGLAQECLHHAQDYGGLLLLATASGNANMVNKLAEGAERDGKNNVAFMSYFLQGKVDACLELLIRTGRLPEAAFLARTYLPSQVSRVVKLWRENLSKVNQKAAESLADPTEYENLFPGLKEAFVVEEWVKETHADLWPAKQYPLVTPNEERNVMEEGKDFQPSRSTAQQELDGKPASPTPVIVASHTANKEEKSLLELEVDLDNLELEDIDTTDINLDEDILDD

SEQ ID NO: 1033926 - protein, 930 aa, Homo sapiens
  misc_feature (707)..(707): Xaa can be any naturally occurring amino acid
  misc_feature (716)..(716): Xaa can be any naturally occurring amino acid
MPLRLDIKRKLTARSDRVKSVDLHPTEPWMLASLYNGSVCVWNHETQTLVKTFEVCDLPVRAAKFVARKNWVVTGADDMQIRVFNYNTLERVHMFEAHSDYIRCIAVHPTQPFILTSSDDMLIKLWDWDKKWSCSQVFEGHTHYVMQIVINPKDNNQFASASLDRTIKVWQLGSSSPNFTLEGHEKGVNCIDYYSGGDKPYLISGADDRLVKIWDYQNKTCVQTLEGHAQNVSCASFHPELPIIITGSEDGTVRIWHSSTYRLESTLNYGMERVWCVASLRGSNNVALGYDEGSIIVKLGREEPAMSMDANGKIIWAKHSEVQQANLKAMGDAEIKDGERLPLAVKDMGSCEIYPQTIQHNPNGRFVVVCGDGEYIIYTAMALRNKSFGSAQEFAWAHDSSEYAIRESNSIVKIFKNFKEKKSFKPDFGAESIYGGFLLGVRSVNGLAFYDWDNTELIRRIEIQPKHIFWSDSGELVCIATEESFFILKYLSEKVLAAQETHEGVTEDGIEDAFEVLGEIQEIVKTGLWVGDCFIYTSSVNRLNYYVGGEIVTIAHLDRTMYLLGYIPKDNRLYLGDKELNIISYSLLVSVLEYQTAVMRRDFSMADKVLPTIPKEQRTRVAHFLEKQGFKQQALTVSTDPEHRFELALQLGELKIAYQLAVEAESEQKWKQLAELAISKCQFGLAQECLHHAQDYGGLLLFWGPKXWGPFFPPPXFFFCGGGGKKQFGLKTNWLGNKLAEGAERDGKNNVAFMSYFLQGKVDACLELLIRTGRLPEAAFLARTYLPSQVSRVVKLWRENLSKVNQKAAESLADPTEYENLFPGLKEAFVVEEWVKETHADLWPAKQYPLVTPNEERNVMEEGKDFQPSRSTAQQELDGKPASPTPVIVASHTANKEEKSLLELEVDLDNLELEDIDTTDINLDEDILDD

SEQ ID NO: 1033927 - protein, 921 aa, Homo sapiens
SGSRKFHVSQSDGQWIPLRLDIKRKLTARSDRVKSVDLHPTEPWMLASLYNGSVCVWNHETQTLVKTFEVCDLPVRAAKFVARKNWVVTGADDMQIRVFNYNTLERVHMFEAHSDYIRCIAVHPTQPFILTSSDDMLIKLWDWDKKWSCSQVFEGHTHYVMQIVINPKDNNQFASASLDRTIKVWQLGSSSPNFTLEGHEKGVNCIDYYSGGDKPYLISGADDRLVKIWDYQNKTCVQTLEGHAQNVSCASFHPELPIIITGSEDGTVRIWHSSTYRLESTLNYGMERVWCVASLRGSNNVALGYDEGSIIVKLGREEPAMSMDANGKIIWAKHSEVQQANLKAMGDAEIKDGERLPLAVKDMGSCEIYPQTIQHNPNGRFVVVCGDGEYIIYTAMALRNKSFGSAQEFAWAHDSSEYAIRESNSIVKIFKNFKEKKSFKPDFGAESIYGGFLLGVRSVNGLAFYDWDNTELIRRIEIQPKHIFWSDSGELVCIATEESFFILKYLSEKVLAAQETHEGVTEDGIEDAFEVLGEIQEIVKTGLWVGDCFIYTSSVNRLNYYVGGEIVTIAHLDRTMYLLGYIPKDNRLYLGDKELNIISYSLLVSVLEYQTAVMRRDFSMADKVLPTIPKEQRTRVAHFLEKQGFKQQALTVSTDPEHRFELALQLGELKIAYQLAVEAESEQKWKQLAELAISKCQFGLAQECLHHAQDYGGLLLLATASGNANMVNKLAEGAERDGKNNVAFMSYFLQGKVDACLELLIRTGRLPEAAFLARTYLPSQVSRVVKLWRENLSKVNQKAAESLADPTEYENLFPGLKEAFVVEEWVKETHADLWPAKQYPLVTPNEERNVMEEGKDFQPSRSTAQQELDGKPASPTPVIVASHTANKEEKSLLELEVDLDNLELEDIDTTDINLDEDILDD

SEQ ID NO: 1033928 - protein, 877 aa, Homo sapiens
MLASLYNGSVCVWNHETQTLVKTFEVCDLPVRAAKFVARKNWVVTGADDMQIRVFNYNTLERVHMFEAHSDYIRCIAVHPTQPFILTSSDDMLIKLWDWDKKWSCSQVFEGHTHYVMQIVINPKDNNQFASASLDRTIKVWQLGSSSPNFTLEGHEKGVNCIDYYSGGDKPYLISGADDRLVKIWDYQNKTCVQTLEGHAQNVSCASFHPELPIIITGSEDGTVRIWHSSTYRLESTLNYGMERVWCVASLRGSNNVALGYDEGSIIVKLGREEPAMSMDANGKIIWAKHSEVQQANLKAMGDAEIKDGERLPLAVKDMGSCEIYPQTIQHNPNGRFVVVCGDGEYIIYTAMALRNKSFGSAQEFAWAHDSSEYAIRESNSIVKIFKNFKEKKSFKPDFGAESIYGGFLLGVRSVNGLAFYDWDNTELIRRIEIQPKHIFWSDSGELVCIATEESFFILKYLSEKVLAAQETHEGVTEDGIEDAFEVLGEIQEIVKTGLWVGDCFIYTSSVNRLNYYVGGEIVTIAHLDRTMYLLGYIPKDNRLYLGDKELNIISYSLLVSVLEYQTAVMRRDFSMADKVLPTIPKEQRTRVAHFLEKQGFKQQALTVSTDPEHRFELALQLGELKIAYQLAVEAESEQKWKQLAELAISKCQFGLAQECLHHAQDYGGLLLLATASGNANMVNKLAEGAERDGKNNVAFMSYFLQGKVDACLELLIRTGRLPEAAFLARTYLPSQVSRVVKLWRENLSKVNQKAAESLADPTEYENLFPGLKEAFVVEEWVKETHADLWPAKQYPLVTPNEERNVMEEGKDFQPSRSTAQQELDGKPASPTPVIVASHTANKEEKSLLELEVDLDNLELEDIDTTDINLDEDILDD

SEQ ID NO: 1033929 - protein, 904 aa, Homo sapiens
MPLRLDIKRKLTARSDRVKSVDLHPTEPWMLASLYNGSVCVWNHETQTLVKTFEVCDLPVRAAKFVARKNWVVTGADDMQIRVFNYNTLERVHMFEAHSDYIRCIAVHPTQPFILTSSDDMLIKLWDWDKKWSCSQVFEGHTHYVMQIVINPKDNNQFASASLDRTIKVWQLGSSSPNFTLEGHEKGVNCIDYYSGGDKPYLISGADDRLVKIWDYQNKTCVQTLEGHAQNVSCASFHPELPIIITGSEDGTVRIWHSSTYRLESTLNYGMERVWCVASLRGSNNVALGYDEGSIIVKLGREEPAMSMDANGKIIWAKHSEVQQANLKAMGDAEIKDGERLPLAVKDMGSCEIYPQTIQHNPNGRFVVVCGDGEYIIYTAMALRNKSFGSAQEFAWAHDSSEYAIRESNSIVKIFKNFKEKKSFKPDFGAESIYGGFLLGVRSVNGLAFYDWDNTELIRRIEIQPKHIFWSDSGELVCIATEESFFILKYLSEKVLAAQETHEGVTEDGIEDAFEVLGEIQEIVKTGLWVGDCFIYTSSVNRLNYYVGGEIVTIAHLDRTMYLLGYIPKDNRLYLGDKELNIISYSLLVSVLEYQTAVMRRDFSMADKVLPTIPKEQRTRVAHFLEKQGFKQQALTVSTDPEHRFELALQLGELKIAYQLAVEAESEQKWKQLAELAISKCQFGLAQECLHHAQDYGGLLLLATASGNANMVNKLAEGAERDGKNNVAFMSYFLQGKVDACLELLIRTGRLPEAAFLARTYLPSQVSRVVKLWRENLSKVNQKAAESLADPTEYENLFPGLKEAFVVEEWVKETHADLWPAKQYPLVTPNEERNVMEEGKDFQPSRSTAQQELDGKPASPTPVIVASHTANKEEKQPDPWPLEPTGHLDGARDTAGPSWLHHRF

SEQ ID NO: 1033930 - protein, 906 aa, Homo sapiens; identical to SEQ ID NO: 1033923

SEQ ID NO: 1033931 - protein, 906 aa, Homo sapiens; identical to SEQ ID NO: 1033923

SEQ ID NO: 1033932 - protein, 904 aa, Homo sapiens; identical to SEQ ID NO: 1033929

SEQ ID NO: 1033933 - protein, 584 aa, Homo sapiens
MPLRLDIKRKLTARSDRVKSVDLHPTEPWMLASLYNGSVCVWNHETQTLVKTFEVCDLPVRAAKFVARKNWVVTGADDMQIRVFNYNTLERVHMFEAHSDYIRCIAVHPTQPFILTSSDDMLIKLWDWDKKWSCSQVFEGHTHYVMQIVINPKDNNQFASASLDRTIKVWQLGSSSPNFTLEGHEKGVNCIDYYSGGDKPYLISGADDRLVKIWDYQNKTCVQTLEGHAQNVSCASFHPELPIIITGSEDGTVRIWHSSTYRLESTLNYGMERVWCVASLRGSNNVALGYDEGSIIVKLGREEPAMSMDANGKIIWAKHSEVQQANLKAMGDAEIKDGERLPLAVKDMGSCEIYPQTIQHNPNGRFVVVCGDGEYIIYTAMALRNKSFGSAQEFAWAHDSSEYAIRESNSIVKIFKNFKEKKSFKPDFGAESIYGGFLLGVRSVNGLAFYDWDNTELIRRIEIQPKHIFWSDSGELVCIATEESFFILKYLSEKVLAAQETHEGVTEDGIEDAFEVLGEIQEIVKTGLWVGDCFIYTSSVNRLNYYVGGEIVTIAHLDRTMYLLGYIPKEPPAQEPQGTDARTS

SEQ ID NO: 1033934 - protein, 177 aa, Homo sapiens
MPLVFIDAIGVIDATGVIDATGVYTMPRACGDGEYIIYTAMALRNKSFGSAQEFAWAHDSSEYAIRESNSIVKIFKNFKEKKSFKPDFGAESIYGGFLLGVRSVNGLAFYDWDNTELIRRIEIQPKHIFWSDSGELVCIATEESFFILKYLSEKVLASINTGVYRCHRIVLPGAPEG

SEQ ID NO: 1033935 - protein, 888 aa, Homo sapiens
MPLRLDIKRKLTARSDRVKSVDLHPTEPWMLASLYNGSVCVWNHETQTLVKTFEVCDLPVRAAKFVARKNWVVTGADDMQIRVFNYNTLERVHMFEAHSDYIRCIAVHPTQPFILTSSDDMLIKLWDWDKKWSCSQVFEGHTHYVMQIVINPKDNNQFASASLDRTIKVWQLGSSSPNFTLEGHEKGVNCIDYYSGGDKPYLISGADDRLVKIWDYQNKTCVQTLEGHAQNVSCASFHPELPIIITGSEDGTVRIWHSSTYRLESTLNYGMERVWCVASLRGSNNVALGYDEGSIIVKLGREEPAMSMDANGKIIWAKHSEVQQANLKAMGDAEIKDGERLPLAVKDMGSCEIYPQTIQHNPNGRFVVVCGDGEYIIYTAMALRNKSFGSAQEFAWAHDSSEYAIRESNSIVKIFKNFKEKKSFKPDFGAESIYGGFLLGVRSVNGLAFYDWDNTELIRRIEIQPKHIFWSDSGELVCIATEESFFILKYLSEKVLAAQETHEGVTEDGIEDAFEVLGEIQEIVKTGLWVGDCFIYTSSVNRLNYYVGGEIVTIAHLDRTMYLLGYIPKDNRLYLGDKELNIISYSLLVSVLEYQTAVMRRDFSMADKVLPTIPKEQRTRVAHFLEKQGFKQQALTVSTDPEHRFELALQLGELLAELAISKCQFGLAQECLHHAQDYGGLLLLATASGNANMVNKLAEGAERDGKNNVAFMSYFLQGKVDACLELLIRTGRLPEAAFLARTYLPSQVSRVVKLWRENLSKVNQKAAESLADPTEYENLFPGLKEAFVVEEWVKETHADLWPAKQYPLVTPNEERNVMEEGKDFQPSRSTAQQELDGKPASPTPVIVASHTANKEEKSLLELEVDLDNLELEDIDTTDINLDEDILDD

SEQ ID NO: 1033936 - protein, 755 aa, Homo sapiens
MVLLNQFASASLDRTIKVWQLGSSSPNFTLEGHEKGVNCIDYYSGGDKPYLISGADDRLVKIWDYQNKTCVQTLEGHAQNVSCASFHPELPIIITGSEDGTVRIWHSSTYRLESTLNYGMERVWCVASLRGSNNVALGYDEGSIIVKLGREEPAMSMDANGKIIWAKHSEVQQANLKAMGDAEIKDGERLPLAVKDMGSCEIYPQTIQHNPNGRFVVVCGDGEYIIYTAMALRNKSFGSAQEFAWAHDSSEYAIRESNSIVKIFKNFKEKKSFKPDFGAESIYGGFLLGVRSVNGLAFYDWDNTELIRRIEIQPKHIFWSDSGELVCIATEESFFILKYLSEKVLAAQETHEGVTEDGIEDAFEVLGEIQEIVKTGLWVGDCFIYTSSVNRLNYYVGGEIVTIAHLDRTMYLLGYIPKDNRLYLGDKELNIISYSLLVSVLEYQTAVMRRDFSMADKVLPTIPKEQRTRVAHFLEKQGFKQQALTVSTDPEHRFELALQLGELKIAYQLAVEAESEQKWKQLAELAISKCQFGLAQECLHHAQDYGGLLLLATASGNANMVNKLAEGAERDGKNNVAFMSYFLQGKVDACLELLIRTGRLPEAAFLARTYLPSQVSRVVKLWRENLSKVNQKAAESLADPTEYENLFPGLKEAFVVEEWVKETHADLWPAKQYPLVTPNEERNVMEEGKDFQPSRSTAQQELDGKPASPTPVIVASHTANKEEKSLLELEVDLDNLELEDIDTTDINLDEDILDD

SEQ ID NO: 1033937 - protein, 877 aa, Homo sapiens; identical to SEQ ID NO: 1033928

SEQ ID NO: 1033938 - protein, 877 aa, Homo sapiens; identical to SEQ ID NO: 1033928

SEQ ID NO: 1033939 - protein, 681 aa, Homo sapiens
MGLFHLTQFIVDVCIKREYLHCSEDGTVRIWHSSTYRLESTLNYGMERVWCVASLRGSNNVALGYDEGSIIVKLGREEPAMSMDANGKIIWAKHSEVQQANLKAMGDAEIKDGERLPLAVKDMGSCEIYPQTIQHNPNGRFVVVCGDGEYIIYTAMALRNKSFGSAQEFAWAHDSSEYAIRESNSIVKIFKNFKEKKSFKPDFGAESIYGGFLLGVRSVNGLAFYDWDNTELIRRIEIQPKHIFWSDSGELVCIATEESFFILKYLSEKVLAAQETHEGVTEDGIEDAFEVLGEIQEIVKTGLWVGDCFIYTSSVNRLNYYVGGEIVTIAHLDRTMYLLGYIPKDNRLYLGDKELNIISYSLLVSVLEYQTAVMRRDFSMADKVLPTIPKEQRTRVAHFLEKQGFKQQALTVSTDPEHRFELALQLGELKIAYQLAVEAESEQKWKQLAELAISKCQFGLAQECLHHAQDYGGLLLLATASGNANMVNKLAEGAERDGKNNVAFMSYFLQGKVDACLELLIRTGRLPEAAFLARTYLPSQVSRVVKLWRENLSKVNQKAAESLADPTEYENLFPGLKEAFVVEEWVKETHADLWPAKQYPLVTPNEERNVMEEGKDFQPSRSTAQQELDGKPASPTPVIVASHTANKEEKSLLELEVDLDNLELEDIDTTDINLDEDILDD

SEQ ID NO: 1033940 - protein, 361 aa, Homo sapiens
ADGNLMPLQAEFRRYCSLTHPPTAHPLLCGLIPNRPQTGCLGDPWFKSLFFNALMEHGKEILDFLSFGYFAEELDLRPTIKEEGFKQQALTVSTDPEHRFELALQLGELKIAYQLAVEAESEQKWKQLAELAISKCQFGLAQECLHHAQDYGGLLLLATASGNANMVNKLAEGAERDGKNNVAFMSYFLQGKVDACLELLIRTGRLPEAAFLARTYLPSQVSRVVKLWRENLSKVNQKAAESLADPTEYENLFPGLKEAFVVEEWVKETHADLWPAKQYPLVTPNEERNVMEEGKDFQPSRSTAQQELDGKPASPTPVIVASHTANKEEKSLLELEVDLDNLELEDIDTTDINLDEDILDD

SEQ ID NO: 1033941 - protein, 906 aa, Homo sapiens; identical to SEQ ID NO: 1033923

SEQ ID NO: 1033942 - protein, 906 aa, Homo sapiens; identical to SEQ ID NO: 1033923

SEQ ID NO: 1033943 - protein, 297 aa, Homo sapiens [sequence omitted]

SEQ ID NO: 1033944 - protein, 103 aa, Homo sapiens
MGQNVADYMRYLMEEDEDAYKKQFSQYIKNSVTPDMMEEMYKKAHAAIRENPVYEKKPKKEVKEDGGPSKCSLSEEDRVLKKGGLKSEGGGNNHILGFPLIKL

SEQ ID NO: 1033945 - protein, 183 aa, Homo sapiens [sequence omitted]

SEQ ID NO: 1033946 - protein, 183 aa, Homo sapiens [sequence omitted]

SEQ ID NO: 1033947 - protein, 183 aa, Homo sapiens [sequence omitted]

SEQ ID NO: 1033948 - protein, 123 aa, Homo sapiens
MDKIYEGQVEVTGDEYNVESIDGQPGAFTCYLDAGLARTTTGNKVFGALKGAVDGGLSIPHSTKRFPGYDSESKEFNAEVHRKPSGAQVAITAPLTGPMTSLKTVPHLRRIPHLGMSASGTPA

SEQ ID NO: 1033949 - protein, 144 aa, Homo sapiens
PGYDSESKESFGTVRDRQASIHSSKRFPGYDSESKEFNAEVHRKHIMGQNVADYMRYLMEEDEDAYKKQFSQYIKNSVTPDMMEEMYKKAHAAIRENPVYEKKPKKEVKKKRWNRPKMSLAQKKDRVAQKKASFLRAQERAAES

SEQ ID NO: 1033950 - protein, 53 aa, Homo sapiens
MFRTTFTPYLAHRKHIMGQNVADYMRYLMEEDEDAYKLSYSTMSFLIHLLHHV

SEQ ID NO: 1033951 - protein, 183 aa, Homo sapiens [sequence omitted]

SEQ ID NO: 1033952 - protein, 183 aa, Homo sapiens [sequence omitted]

SEQ ID NO: 1033953 - protein, 118 aa, Homo sapiens
MDKIYEGQVEVTGDEYNVESIDGQPGAFTCYLDAGLARTTTGNKVFGALKGAVDGGLSIPHSTKRFPGYDSESKEFNAEVHRKHIMGQNVADYMRYLMEEDEDAYKKQFSQYIKNSLN

SEQ ID NO: 1033954 - protein, 189 aa, Homo sapiens
MVADACNPSTLGGQVEVTGDEYNVESIDGQPGAFTCYLDAGLARTTTGNKVFGALKGAVDGGLSIPHSTKRFPGYDSESKEFNAEVHRKHIMGQNVADYMRYLMEEDEDAYKKQFSQYIKNSVTPDMMEEMYKKAHAAIRENPVYEKKPKKEVKKKRWNRPKMSLAQKKDRVAQKKASFLRAQERAAES

SEQ ID NO: 1033955 - protein, 115 aa, Homo sapiens
LLLLLLNWRRSTHRKHIMGQNVADYMRYLMEEDEDAYKKQFSQYIKNSVTPDMMEEMYKKAHAAIRENPVYEKKPKKEVKKKRWNRPKMSLAQKKDRVAQKKASFLRAQERAAES

SEQ ID NO: 1033956 - protein, 165 aa, Homo sapiens
MDKIYEGQVEVTGDEYNVESIDGQPGAFTCYLDAGLARTTPGTTVLVPARDCGAGCYPSRSRIPGMSLKAGTLRRLGASWPRLRYWTTGPTVQKVPIHRFPWDFSRYKRLTKYKCHFKLQASGGPVYQRLLFYLSTSQLHTHIVKPEGTTHSHPTSNVPRHPLVA

SEQ ID NO: 1033957 - protein, 106 aa, Homo sapiens
MAWSGVQMVSFPPRIRHEDLMEEDEDAYKKQFSQYIKNSVTPDMMEEMYKKAHAAIRENPVYEKKPKKEVKKKRWNRPKMSLAQKKDRVAQKKASFLRAQERAAES

SEQ ID NO: 1033958 - protein, 183 aa, Homo sapiens [sequence omitted]

SEQ ID NO: 1033959 - protein, 277 aa, Homo sapiens
MGFVKVVKNKAYFKRYQVKFRRRREGKTDYYARKRLVIQDKNKYNTPKYRMIVRVTTAYAHELPKYGVKVGLTNYAAAYCTGLLLARRLLNRFGMDKIYEGQVEVTGDEYNVESIDGQPGAFTCYLDAGLARTTTGNKVFGALKGAVDGGLSIPHSTKRFPGYDSESKEFNAEVHRKHIMGQNVADYMRYLMEEDEDAYKKQFSQYIKNSVTPDMMEEMYKKAHAAIRENPVYEKKPKKEVKKKRWNRPKMSLAQKKDRVAQKKASFLRAQERAAES

SEQ ID NO: 1033960 - protein, 133 aa, Homo sapiens
PSSTTTKLAAARPKRFPGYDSESKEFNAEVHRKHIMGQNVADYMRYLMEEDEDAYKKQFSQYIKNSVTPDMMEEMYKKAHAAIRENPVYEKKPKKEVKKKRWNRPKMSLAQKKDRVAQKKASFLRAQERAAES

SEQ ID NO: 1033961 - protein, 368 aa, Homo sapiens
MAPPAGGAAAAASDLGSAAVLLAVHAAVRPLGAGPDAEAQLRRLQLSADPERPGRFRLELLGAGPGAVNLEWPLESVSYTIRGPTQHELQPPPGGPGTLSLHFLNPQEAQRWAVLVRGATVEGQNGSKSNSPPALGPEACPVSLPSPPEASTLKGPPPEADLPRSPGNLTEREELAGSLARAIAGGDEKGAAQVAAVLAQHRVALSVQLQEACFPPGPIRLQVTLEDAASAASAASSAHVALQVHPHCTVAALQEQVFSELGFPPAVQRWVIGRCLCVPERSLASYGVRQDGDPAFLYLLSAPREAPATGPSPQHPQKMDGELGRLFPPSLGLPPGPQPAASSLPSPLPAQLVLSFLHLHQCPRPPWL

SEQ ID NO: 1033962 - protein, 368 aa, Homo sapiens; identical to SEQ ID NO: 1033961

SEQ ID NO: 1033963 - protein, 368 aa, Homo sapiens; identical to SEQ ID NO: 1033961

SEQ ID NO: 1033964 - protein, 325 aa, Homo sapiens
MAPPAGGAAAAASDLGSAAVLLAVHAAVRPLGAGPDAEAQLRRLQLSADPERPGRFRLELLGAGPGAVNLEWPLESVSYTIRGPTQHELQPPPGGPGTLSLHFLNPQEAQRWAVLVRGATVEGQNGSKSNSPPALGPEACPVSLPSPPEASTLKGPPPEADLPRSPGNLTEREELAGSLARAIAGGDEKGAAQVAAVLAQHRVALSVQLQEACFPPGPIRLQVTLEDAASAASAASSAHVALQVHPHCTVAALQEQVFSELGFPPAVQRWVIGRCLCVPERSLASYGVRQDGDPAFLYLLSAPREAPGQSSMGVGCGRWGAAPQS

SEQ ID NO: 1033965 - protein, 129 aa, Homo sapiens
MPGCTERGATCGRGGGWGLRAKVVAHWRSRERSPAAVRRWDSRTLDASTSAEPLGRRGRVRLQLWPVLRPLTLRPQRPALTWLIWSGPWSQFPTPSEAPPSTSYSLHQEGLEPSACTSSTLRKLSGGQS

SEQ ID NO: 1033966 - protein, 383 aa, Homo sapiens
RALPLLAAGQKGQDLRRLRESQLCGQELEVLPPTASGCRENHEACFPQVPLKGAAVGPPRCQPPQPASPANDVGISESPQSAVNLEWPLESVSYTIRGPTQHELQPPPGGPGTLSLHFLNPQEAQRWAVLVRGATVEGQNGSKSNSPPALGPEACPVSLPSPPEASTLKGPPPEADLPRSPGNLTEREELAGSLARAIAGGDEKGAAQVAAVLAQHRVALSVQLQEACFPPGPIRLQVTLEDAASAASAASSAHVALQVHPHCTVAALQEQVFSELGFPPAVQRWVIGRCLCVPERSLASYGVRQDGDPAFLYLLSAPREAPATGPSPQHPQKMDGELGRLFPPSLGLPPGPQPAASSLPSPLPAQLVLSFLHLHQCPRPPWL

SEQ ID NO: 1033967 - protein, 276 aa, Homo sapiens
SGGREGLIEVTLELKFEGHGMNHVTKEAANKPWGSKSNSPPALGPEACPVSLPSPPEASTLKGPPPEADLPRSPGNLTEREELAGSLARAIAGGDEKGAAQVAAVLAQHRVALSVQLQEACFPPGPIRLQVTLEDAASAASAASSAHVALQVHPHCTVAALQEQVFSELGFPPAVQRWVIGRCLCVPERSLASYGVRQDGDPAFLYLLSAPREAPATGPSPQHPQKMDGELGRLFPPSLGLPPGPQPAASSLPSPLPAQLVLSFLHLHQCPRPPWL

SEQ ID NO: 1033968 - protein, 200 aa, Homo sapiens
MAPPAGGAAAAASDLGSAAVLLAVHAAVRPLGAGPDAEAQLRRLQLSADPERPGRFRLELLGAGPGAVNLEWPLESVSYTIRGPTQHELQPPPGGPGTLSLHFLNPQEAQRWAVLVRGATVEGQNGSKSNSPPALGPEACPVSLPSPPEASTLKGPPPEADLPRSPGNLTEREELAGSLAPAQLVLSFLHLHQCPRPPWL

SEQ ID NO: 1033969 - protein, 91 aa, Homo sapiens
QRSWKTKGLEAWTEATAQHTHILPLGSKSNSPPALGPEACPVSLPSPPEASTLKGPPPEAAESTGMTQLLPHRLQGESGPSLTSPTSPGPH

SEQ ID NO: 1033970 - protein, 325 aa, Homo sapiens; identical to SEQ ID NO: 1033964

SEQ ID NO: 1033971 - protein, 368 aa, Homo sapiens; identical to SEQ ID NO: 1033961

SEQ ID NO: 1033972 - protein, 368 aa, Homo sapiens; identical to SEQ ID NO: 1033961

SEQ ID NO: 1033973 - protein, 326 aa, Homo sapiens
MAPPAGGAAAAASDLGSAAVLLAVHAAVRPLGAGPDAEAQLRRLQLSADPERPGRFRLELLGAGPGAVNLEWPLESVSYTIRGPTQHELQPPPGGPGTLSLHFLNPQEAQRWAVLVRGATVEGQNGSKSNSPPALGPEACPVSLPSPPEASTLKGPPPEADLPRSPGNLTEREELAGSLARAIAGGDEKGAAQVAAVLAQHRVALSVQLQEACFPPGPIRLQVTLEDAASAASAASSAHVALQVHPHCTVAALQEQVFSELGFPPAVQRWVIGRCLCVPERSLASYGVRQDGDPAFLYLLSAPREAPAQLVLSFLHLHQCPRPPWL

SEQ ID NO: 1033974 - protein, 326 aa, Homo sapiens; identical to SEQ ID NO: 1033973

SEQ ID NO: 1033975 - protein, 326 aa, Homo sapiens; identical to SEQ ID NO: 1033973

SEQ ID NO: 1033976 - protein, 329 aa, Homo sapiens
  misc_feature (326)..(326): Xaa can be any naturally occurring amino acid
MAPPAGGAAAAASDLGSAAVLLAVHAAVRPLGAGPDAEAQLRRLQLSADPERPGRFRLELLGAGPGAVNLEWPLESVSYTIRGPTQHELQPPPGGPGTLSLHFLNPQEAQRWAVLVRGATVEGQNGSKSNSPPALGPEACPVSLPSPPEASTLKGPPPEADLPRSPGNLTEREELAGSLARAIAGGDEKGAAQVAAVLAQHRVALSVQLQEACFPPGPIRLQVTLEDAASAASAASSAHVALQVHPHCTVAALQEQVFSELGFPPAVQRWVIGRCLCVPERSLASYGVRQDGDPAFLYLLSAPREAPATGAHPQHPHLLINISTPXCST

SEQ ID NO: 1033977 - protein, 312 aa, Homo sapiens
MAPPAGGAAAAASDLGSAAVLLAVHAAVRPLGAGPDAEAQLRRLQLSADPERPGRFRLELLGAGPGAVNLEWPLESVSYTIRGPTQHELQPPPGGPGTLSLHFLNPQEAQRWAVLVRGATVEGQNGSKSNSPPALGPEACPVSLPSPPEASTLKGPPPEADLPRSPGNLTEREELAGSLARAIAGGDEKGAAQVAAVLAQHRVALSVQLQEACFPPGPIRLQVTLEDAASAASAASSAHVALQVFSELGFPPAVQRWVIGRCLCVPERSLASYGVRQDGDPAFLYLLSAPREAPGQSSMGVGCGRWGAAPQS

SEQ ID NO: 1033978 - protein, 190 aa, Homo sapiens
IYRILKVVVGKGAAQVAAVLAQHRVALSVQLQEACFPPGPIRLQVTLEDAASAASAASSAHVALQVHPHCTVAALQEQVFSELGFPPAVQRWVIGRCLCVPERSLASYGVRQDGDPAFLYLLSAPREAPATGPSPQHPQKMDGELGRLFPPSLGLPPGPQPAASSLPSPLPAQLVLSFLHLHQCPRPPWL

SEQ ID NO: 1033979 - protein, 170 aa, Homo sapiens
MAPPAGGAAAAASDLGSAAVLLAVHAAVRPLGAGPDAEAQLRRLQLSADPERPGRFRLELLGAGPGAVNLEWPLESVSYTIRGPTQHELQPPPGGPGTLSLHFLNPQEAQRWAVLVRGATVEGQNSLASYGVRQDGDPAFLYLLSAPREAPAQLVLSFLHLHQCPRPPWL

SEQ ID NO: 1033980 - protein, 368 aa, Homo sapiens; identical to SEQ ID NO: 1033961

SEQ ID NO: 1033981 - protein, 368 aa, Homo sapiens; identical to SEQ ID NO: 1033961

SEQ ID NO: 1033982 - protein, 81 aa, Homo sapiens
MPGCTERGAACGRGGGWGLRAKVVAHWRSRERSPAAVRRWDSRTLDASTSAEPLGRRGRVRLQLWPVLRPLTLRPQRPALT

SEQ ID NO: 1033983 - protein, 396 aa, Homo sapiens
MAPPAGGAAAAASDLGSAAVLLAVHAAVRPLGAGPDAEAQLRRLQLSADPERPGRFRLELLGAGPGAVNLEWPLESVSYTIRGPTQHELQPPPGGPGTLSLHFLNPQEAQRWAVLVRGATVEGQNGSKSNSPPALGPEACPVSLPSPPEASTLKGPPPEADLPRSPGNLTEREELAGSLARAIAGGDEKGAAQVAAVLAQHRVALSVQLQEACFPPGPIRGGLGAASSPCPRDHPRSPSIPEPTFWHRLQVTLEDAASAASAASSAHVALQVHPHCTVAALQEQVFSELGFPPAVQRWVIGRCLCVPERSLASYGVRQDGDPAFLYLLSAPREAPATGPSPQHPQKMDGELGRLFPPSLGLPPGPQPAASSLPSPLPAQLVLSFLHLHQCPRPPWL

SEQ ID NO: 1033984 - protein, 298 aa, Homo sapiens
MAPPAGGAAAAASDLGSAAVLLAVHAAVRPLGAGPDAEAQLRRLQLSADPERPGRFRLELLGAGPGAVNLEWPLESVSYTIRGPTQHELQPPPGGPGTLSLHFLNPQEAQRWAVLVRGATVEGQNAVLAQHRVALSVQLQEACFPPGPIRLQVTLEDAASAASAASSAHVALQVHPHCTVAALQEQVFSELGFPPAVQRWVIGRCLCVPERSLASYGVRQDGDPAFLYLLSAPREAPATGPSPQHPQKMDGELGRLFPPSLGLPPGPQPAASSLPSPLPAQLVLSFLHLHQCPRPPWL

SEQ ID NO: 1033985 - protein, 187 aa, Homo sapiens
MAPPAGGAAAAASDLGSAAVLLAVHAAVRPLGAGPDAEAQLRRLQLSADPERPGRFRLELLGAGPGAVNLEWPLESVSYTIRGPTQHELQPPPGGPGTLSLHFLNPQEAQRWAVLVRGATVEGQNGQCPVMDTITIWNSLGPPVLVGEVGSTFPTAGVWEGFQEGVGGAWSSLEYLEWLLESVSYTI

SEQ ID NO: 1033986 - protein, 157 aa, Homo sapiens
MIETQEDIYVGSIETDRGVREQVRFYDTRGLRDGAELPRHCFSCTDGYVLVYSTDSRESFQRVELLKKEIDKSKDKKEVTIVVLGNKCDLQEQRRVDPDVAQHWAKSEKVKLWEVSVADRRSLLEPFVYLASKMTQPQSKSAFPLSRKNKGSGSLDG

SEQ ID NO: 1033987 - protein, 191 aa, Homo sapiens
MGKSCKVVVCGQASVGKTSILEQLLYGNHVVGSEMIETQEDIYVGSIETDRGVREQVRFYDTRGLRDGAELPRHCFSCTDGYVLVYSTDSRESFQRVELLKKEIDKSKDKKEVTIVVLGNKCDLQEQRRVDPDVAQHWAKSEKVKLWEVSVADRRSLLEPFVYLASKMTQPQSKSAFPLSRKNKGSGSLDG

SEQ ID NO: 1033988 - protein, 191 aa, Homo sapiens; identical to SEQ ID NO: 1033987

SEQ ID NO: 1033989 - protein, 191 aa, Homo sapiens; identical to SEQ ID NO: 1033987

SEQ ID NO: 1033990 - protein, 191 aa, Homo sapiens; identical to SEQ ID NO: 1033987

SEQ ID NO: 1033991 - protein, 153 aa, Homo sapiens
MLYIYVGSIETDRGVREQVRFYDTRGLRDGAELPRHCFSCTDGYVLVYSTDSRESFQRVELLKKEIDKSKDKKEVTIVVLGNKCDLQEQRRVDPDVAQHWAKSEKVKLWEVSVADRRSLLEPFVYLASKMTQPQSKSAFPLSRKNKGSGSLDG

SEQ ID NO: 1033992 - protein, 229 aa, Homo sapiens
MGKSCKVVVCGQASVGKTSILEQLLYGNHVVGSEMIETQEDIYVGSIETDRGVREQVRFYDTRGLRDGAELPRHCFSCTDGYVLVYSTDSRESFQRVELLKKEIDKSKDKKEGLALPPRLECSGMITAHCSLNLPRAWWSSCLSPLLGLQVTIVVLGNKCDLQEQRRVDPDVAQHWAKSEKVKLWEVSVADRRSLLEPFVYLASKMTQPQSKSAFPLSRKNKGSGSLDG

SEQ ID NO: 1033993 - protein, 191 aa, Homo sapiens; identical to SEQ ID NO: 1033987

SEQ ID NO: 1033994 - protein, 111 aa, Homo sapiens
MGKSCKVVVCGQASVGKTSILEQLLYGNHVVGSEMIETQEDIYVGSIETDRGVRELPFLSPPSLLPIPAFRGSAPLSPGAVVGHCPFQLPQTGSRVTTQQCPFLGLSSYYR

SEQ ID NO: 1033995 - protein, 191 aa, Homo sapiens; identical to SEQ ID NO: 1033987

SEQ ID NO: 1033996 - protein, 104 aa, Homo sapiens
AGRKLGSGQAAGAGPGGAYTDSGGRLEPLRRRCPSPGPRELGGPGWCCGGPGRLKTKHGEELQGGRVWPGVCGQNFNPGAASVWEPCSGFGDDRDAGGHLRGLH

SEQ ID NO: 1033997 - protein, 171 aa, Homo sapiens
MGKSCKVVVCGQASVGKTSILEQLLYGNHVVGSEMIETQEDIYVGSIETDRGVREQVRFYDTRGLRDGAELPRHCFSCTDGYVLVYSTDSRESFQRVELLKKEIDKSKDKKEVTIVVLGNKCDLQEQRRVDPEQVCLPPQPEEQGQRLLGWLKSCRSSFTIPAPFQCLGLW

SEQ ID NO: 1033998 - protein, 135 aa, Homo sapiens
MGKSCKVVVCGQASVGKTSILEQLLYGNHVVGSEMIETQEDIYVGSIETDRGVREQVTIVVLGNKCDLQEQRRVDPDVAQHWAKSEKVKLWEVSVADRRSLLEPFVYLASKMTQPQSKSAFPLSRKNKGSGSLDG

SEQ ID NO: 1033999 - protein, 142 aa, Homo sapiens
MAGVLAEGGASPQQLVAASLAGTSFPEPTELQVASSTTLLPGYLFGSWSVEQLPARSPPLPHRTPRQPPSYRRDQRAGWEAGGEEHFRLEHRAAPRRLRPEGLPRARLPERGSAWGQSGTPDPRMSTVGLRDRGGSPGAVPG

SEQ ID NO: 1034000 - protein, 191 aa, Homo sapiens; identical to SEQ ID NO: 1033987

SEQ ID NO: 1034001 - protein, 191 aa, Homo sapiens; identical to SEQ ID NO: 1033987

SEQ ID NO: 1034002 - protein, 525 aa, Homo sapiens [sequence omitted]

SEQ ID NO: 1034003 - protein, 632 aa, Homo sapiens
MNNSLENTISFEEYIRVKARSVPQHRMKEFLDSLASKGPEALQEFQQTATTTMVYQQGGNCIYTDSTEVAGSLLELACPVTTSVQPQTQQEQQIQVQQPQQVQVQVQVQQSPQQVSAQLSPQLTVHQPTEQPIQVQVQIQGQAPQSAAPSIQTPSLQSPSPSQLQAAQIQVQHVQAAQQIQAAEIPEEHIPHQQIQAQLVAGQSLAGGQQIQIQTVGALSPPPSQQGSPREGERRVGTASVLQPVKKRKVDMPITVSYAISGQPVATVLAIPQGQQQSYVSLRPDLLTVDSAHLYSATGTITSPTGETWTIPVYSAQPRGDPQQQSITHIAIPQEAYNAVHVSGSPTALAAVKLEDDKEKMVGTTSVVKNSHEEVVQTLANSLFPAQFMNGNIHIPVAVQAVAGTYQNTAQTVHIWDPQQQPQQQTPQEQTPPPQQQQQQLQVTCSAQTVQVAEVEPQSQPQPSPELLLPNSLKPEEGLEVWKNWAQTKNAELEKDAQNRLAPIGRRQLLRFQEDLISSAVAELNYGLCLMTREARNGEGEPYDPDVLYYIFLCIQKYLFENGRVDDIFSDLYYVRFTEWLHEVLKDVQPRVTPLGYVLPSHVTEEMLWECKQLGAHSPSTLLTTLMFFNTK

SEQ ID NO: 1034004 - protein, 108 aa, Homo sapiens
MNNSLENTISFEEYIRVKARSVPQHRMKEFLDSLASKGPEALQEFQQTATTTMVYQQGGNCIYTDSTEVAGSLLELACPVTTSVQPQTQQEQQIQVQQPQQVQVYGKC

SEQ ID NO: 1034005 - protein, 525 aa, Homo sapiens [sequence omitted]

SEQ ID NO: 1034006 - protein, 776 aa, Homo sapiens
MNNSLENTISFEEYIRVKARSVPQHRMKEFLDSLASKGPEALQEFQQTATTTMVYQQGGNCIYTDSTEVAGSLLELACPVTTSVQPQTQQEQQIQVQQPQQVQVQVQVQQSPQQVSAQLSPQLTVHQPTEQPIQVQVQIQGQAPQSAAPSIQTPSLQSPSPSQLQAAQIQVQHVQAAQQIQAAEIPEEHIPHQQIQAQLVAGQSLAGGQQIQIQTVGALSPPPSQQGSPREGERRVGTASVLQPVKKRKVDMPITVSYAISGQPVATVLAIPQGQQQSYVSLRPDLLTVDSAHLYSATGTITSPTGETWTIPVYSAQPRGDPQQQSITHIAIPQEAYNAVHVSGSPTALAAVKLEDDKEKMVGTTSVVKNSHEEVVQTLANSLFPAQFMNGNIHIPVAVQAVAGTYQNTAQTVHIWDPQQQPQQQTPQEQTPPPQQQQQQLQVTCSAQTVQVAEVEPQSQPQPSPELLLPNSLKPEEGLEVWKNWAQTKNAELEKDAQNRLAPIGRRQLLRFQEDLISSAVAELNYGLCLMTREARNGEGEPYDPDVLYYIFLCIQKYLFENGRVDDIFSDLYYVRFTEWLHEVLKDVQPRVTPLGYVLPSHVTEEMLWECKQLGAHSPSTLLTTLMFFNTKYFLLKTVDQHMKLAFSKVLRQTKKNPSNPKDKSTSIRYLKALGIHQTGQKVTDDMYAEQTENPENPLRCPIKLYDFYLFKCPQSVKGRNDTFYLTPEPVVAPNSPIWYSVQPISREQMGQMLTRILVIREIQEAIAVANASTMH

SEQ ID NO: 1034007 - protein, 632 aa, Homo sapiens; identical to SEQ ID NO: 1034003

SEQ ID NO: 1034008 - protein, 416 aa, Homo sapiens
MVGTTSVVKNSHEEVVQTLANSLFPAQFMNGNIHIPVAVQAVAGTYQNTAQTVHIWDPQQQPQQQTPQEQTPPPQQQQQQLQVTCSAQTVQVAEVEPQSQPQPSPELLLPNSLKPEEGLEVWKNWAQTKNAELEKDAQNRLAPIGRRQLLRFQEDLISSAVAELNYGLCLMTREARNGEGEPYDPDVLYYIFLCIQKYLFENGRVDDIFSDLYYVRFTEWLHEVLKDVQPRVTPLGYVLPSHVTEEMLWECKQLGAHSPSTLLTTLMFFNTKYFLLKTVDQHMKLAFSKVLRQTKKNPSNPKDKSTSIRYLKALGIHQTGQKVTDDMYAEQTENPENPLRCPIKLYDFYLFKCPQSVKGRNDTFYLTPEPVVAPNSPIWYSVQPISREQMGQMLTRILVIREIQEAIAVANASTMH

SEQ ID NO: 1034009 - protein, 416 aa, Homo sapiens; identical to SEQ ID NO: 1034008

SEQ ID NO: 1034010 - protein, 416 aa, Homo sapiens; identical to SEQ ID NO: 1034008

SEQ ID NO: 1034011 - protein, 416 aa, Homo sapiens; identical to SEQ ID NO: 1034008

SEQ ID NO: 1034012 - protein, 416 aa, Homo sapiens; identical to SEQ ID NO: 1034008

SEQ ID NO: 1034013 - protein, 761 aa, Homo sapiens
MNNSLENTISFEEYIRVKARSVPQHRMKEFLDSLASKGPEALQEFQQTATTTMVYQQGGNCIYTDSTEVAGSLLELACPVTTSVQPQTQQEQQIQVQQPQQVQVQVQVQQSPQQVSAQLSPQLTVHQPTEQPIQVQVQIQGQAPQSAAPSIQTPSLQSPSPSQLQAAQIQVQHVQAAQQIQAAEIPEEHIPHQQIQAQLVAGQSLAGGQQIQIQTVGALSPPPSQQGSPREGERRVGTASVLQPVKKRKVDMPITVSYAISGQPVATVLAIPQGQQQSYVSLRPDLLTVDSAHLYSATGTITSPTGETWTIPVYSAQPRGDPQQQSITHIAIPQEAYNAVHVSGSPTALAAVKLEDDKEKMVGTTSVVKNSHEEVVQTLANSLFPAQFMNGNIHIPVAVQAVAGTYQNTAQTVHIWDPQQQQQQQLQVTCSAQTVQVAEVEPQSQPQPSPELLLPNSLKPEEGLEVWKNWAQTKNAELEKDAQNRLAPIGRRQLLRFQEDLISSAVAELNYGLCLMTREARNGEGEPYDPDVLYYIFLCIQKYLFENGRVDDIFSDLYYVRFTEWLHEVLKDVQPRVTPLGYVLPSHVTEEMLWECKQLGAHSPSTLLTTLMFFNTKYFLLKTVDQHMKLAFSKVLRQTKKNPSNPKDKSTSIRYLKALGIHQTGQKVTDDMYAEQTENPENPLRCPIKLYDFYLFKCPQSVKGRNDTFYLTPEPVVAPNSPIWYSVQPISREQMGQMLTRILVIREIQEAIAVANASTMH

SEQ ID NO: 1034014 - protein, 244 aa, Homo sapiens
MNGNIHIPVAVQAVAGTYQNTAQTVHIWDPQQQPQQQTPQEQTPPPQQQQQQLQVTCSAQTVQVAEVEPQSQPQPSPELLLPNSLKPEEGLEVWKNWAQTKNAELEKDAQNRLAPIGRRQLLRFQEDLISSAVAELNYGLCLMTREARNGEGEPYDPDVLYYIFLCIQKYLFENGRVDDIFSDLYYVRFTEWLHEVLKDVQPRVTPLGYVLPSHVTEEMLWECKQLGAHSPSTLLTTLMFFNTK

SEQ ID NO: 1034015 - protein, 714 aa, Homo sapiens
MGRGSGTFERLLDKATSQLLLETDWESILQICDLIRQGDTQAKYAVNSIKKKVNDKNPHVALYALEVMESVVKNCGQTVHDEVANKQTMEELKDLLKRQVEVNVRNKILYLIQAWAHAFRNEPKYKVVQDTYQIMKVEGHVFPEFKESDAMFAAERAPDWVDAEECHRCRVQFGVMTRKHHCRACGQIFCGKCSSKYSTIPKFGIEKEVRVCEPCYEQLNRKAEGKATSTTELPPEYLTSPLSQQSQLPPKRDETALQEEEELQLALALSQSEAEEKERLRQKSTYTSYPKAEPMPSASSAPPASSLYSSPVNSSAPLAEDIDPELARYLNRNYWEKKQEEARKSPTPSAPVPLTEPAAQPGEGHAAPTNVVENPLPETDSQPIPPSGGPFSEPQFHNGESEESHEQFLKALQNAVTTFVNRMKSNHMRGRSITNDSAVLSLFQSINGMHPQLLELLNQLDERRLYYEGLQDKLAQIRDARGALSALREEHREKLRRAAEEAERQRQIQLAQKLEIMRQKKQEYLEVQRQLAIQRLQEQEKERQMRLEQQKQTVQMRAQMPAFPLPYAQLQAMPAAGGVLYQPSGPASFPSTFSPAGSVEGSPMHGVYMSQPAPAAGPYPSMPSTAADPSMVSAYMYPAGATGAQAAPQAQAGPPPAPLTHPTSLLPQRATRTWPPRPHRASRPSLSLRSPAPWATWGASQSPWATSLTTCRIS

SEQ ID NO: 1034016 - protein, 777 aa, Homo sapiens
MGRGSGTFERLLDKATSQLLLETDWESILQICDLIRQGDTQAKYAVNSIKKKVNDKNPHVALYALEVMESVVKNCGQTVHDEVANKQTMEELKDLLKRQVEVNVRNKILYLIQAWAHAFRNEPKYKVVQDTYQIMKVEGHVFPEFKESDAMFAAERAPDWVDAEECHRCRVQFGVMTRKHHCRACGQIFCGKCSSKYSTIPKFGIEKEVRVCEPCYEQLNRKAEGKATSTTELPPEYLTSPLSQQSQLPPKRDETALQEEEELQLALALSQSEAEEKERLRQKSTYTSYPKAEPMPSASSAPPASSLYSSPVNSSAPLAEDIDPELARYLNRNYWEKKQEEARKSPTPSAPVPLTEPAAQPGEGHAAPTNVVENPLPETDSQPIPPSGGPFSEPQFHNGESEESHEQFLKALQNAVTTFVNRMKSNHMRGRSITNDSAVLSLFQSINGMHPQLLELLNQLDERRLYYEGLQDKLAQIRDARGALSALREEHREKLRRAAEEAERQRQIQLAQKLEIMRQKKQEYLEVQRQLAIQRLQEQEKERQMRLEQQKQTVQMRAQMPAFPLPYAQLQAMPAAGGVLYQPSGPASFPSTFSPAGSVEGSPMHGVYMSQPAPAAGPYPSMPSTAADPSMVSAYMYPAGATGAQAAPQAQAGPTASPAYSSYQPTPTAGYQNVASQAPQSLPAISQPPQSSTMGYMGSQSVSMGYQPYNMQNLMTTLPSQDASLPPQQPYIAGQQPMYQQMAPSGGPPQQQPPVAQQPQAQGPPAQGSEAQLISFD

SEQ ID NO: 1034017 - protein, 777 aa, Homo sapiens; identical to SEQ ID NO: 1034016

SEQ ID NO: 1034018 - protein, 816 aa, Homo sapiens
SGSSPDGSALVSPQPPPGAESARPRGPEGRGPAALPASPRPAVLPGSEPPILDPRRGRVGRRPSGVGKWGSARVRAGRQGARRPRSSAGPGHSADCLLTDDAARPSGPQGLSHEDKATSQLLLETDWESILQICDLIRQGDTQAKYAVNSIKKKVNDKNPHVALYALEVMESVVKNCGQTVHDEVANKQTMEELKDLLKRQVEVNVRNKILYLIQAWAHAFRNEPKYKVVQDTYQIMKVEGHVFPEFKESDAMFAAERAPDWVDAEECHRCRVQFGVMTRKHHCRACGQIFCGKCSSKYSTIPKFGIEKEVRVCEPCYEQLNRKAEGKATSTTELPPEYLTSPLSQQSQLPPKRDETALQEEEELQLALALSQSEAEEKERLRQKSTYTSYPKAEPMPSASSAPPASSLYSSPVNSSAPLAEDIDPELARYLNRNYWEKKQEEARKSPTPSAPVPLTEPAAQPGEGHAAPTNVVENPLPETDSQPIPPSGGPFSEPQFHNGESEESHEQFLKALQNAVTTFVNRMKSNHMRGRSITNDSAVLSLFQSINGMHPQLLELLNQLDERRLYYEGLQDKLAQIRDARGALSALREEHREKLRRAAEEAERQRQIQLAQKLEIMRQKKQEYLEVQRQLAIQRLQEQEKERQMRLEQQKQTVQMRAQMPAFPLPYAQLQAMPAAGGVLYQPSGPASFPSTFSPAGSVEGSPMHGVYMSQPAPAAGPYPSMPSTAADPSMVSAYMYPAGATGAQAAPQAQAGPPPAPLTHPTSLLPQRATRTWPPRPHRASRPSLSLRSPAPWATWGASQSPWATSLTTCRIS

SEQ ID NO: 1034019 - protein, 515 aa, Homo sapiens
GRSRGQEIKTILANMVKSRLNRKAEGKATSTTELPPEYLTSPLSQQSQLPPKRDETALQEEEELQLALALSQSEAEEKERLRQKSTYTSYPKAEPMPSASSAPPASSLYSSPVNSSAPLAEDIDPELARYLNRNYWEKKQEEARKSPTPSAPVPLTEPAAQPGEGHAAPTNVVENPLPETDSQPIPPSGGPFSEPQFHNGESEESHEQFLKALQNAVTTFVNRMKSNHMRGRSITNDSAVLSLFQSINGMHPQLLELLNQLDERRLYYEGLQDKLAQIRDARGALSALREEHREKLRRAAEEAERQRQIQLAQKLEIMRQKKQEYLEVQRQLAIQRLQEQEKERQMRLEQQKQTVQMRAQMPAFPLPYAQLQAMPAAGGVLYQPSGPASFPSTFSPAGSVEGSPMHGVYMSQPAPAAGPYPSMPSTAADPSMVSAYMYPAGATGAQAAPQAQAGPPPAPLTHPTSLLPQRATRTWPPRPHRASRPSLSLRSPAPWATWGASQSPWATSLTTCRIS

SEQ ID NO: 1034020 - protein, 248 aa, Homo sapiens
MGRGSGTFERLLDKATSQLLLETDWESILQICDLIRQGDTQAKYAVNSIKKKVNDKNPHVALYALEVMESVVKNCGQTVHDEVANKQTMEELKDLLKRQVEVNVRNKILYLIQAWAHAFRNEPKYKVVQDTYQIMKVEGHVFPEFKESDAMFAAERAPDWVDAEECHRCRVQFGVMTRKHHCRACGQIFCGKCSSKYSTIPKFGIEKEVRVCEPCYEQLNRKAEGKATSTTELPPEYLTSPLSQQSLS

SEQ ID NO: 1034021 - protein, 123 aa, Homo sapiens
MGRGSGTFERLLDKATSQLLLETDWESILQICDLIRQGDTQAKYAVNSIKKKVNDKNPHVALYALEVMESVVKNCGQTVHDEVANKQTMEELKDLLKRQVEVNVRNKILPPCPLLPVVSLLCE

SEQ ID NO: 1034022 - protein, 97 aa, Homo sapiens
AGPHPTARPWSARSLRPALSQRGPEGPRGADRPPCPPLPGPLSSRVRSRRSWTLGAAVWVGVRRALANGALRGSAQGARARGDLAPPRARGIRPIAS

SEQ ID NO: 1034023 - protein, 706 aa, Homo sapiens
MGRGSGTFERLLDKATSQLLLETDWESILQICDLIRQGDTQAKYAVNSIKKKVNDKNPHVALYALEVMESVVKNCGQTVHDEVANKQTMEELKDLLKRQVEVNVRNKILYLIQAWAHAFRNEPKYKVVQDTYQIMKVEGHVFPEFKESDAMFAAERAPDWVDAEECHRCRVQFGVMTRKHHCRACGQIFCGKCSSKYSTIPKFGIEKEVRVCEPCYEQLNRKAEGKATSTTELPPEYLTSPLSQQSQLPPKRDETALQEEEELQLALALSQSEAEEKERLRQKSTYTSYPKAEPMPSASSAPPASSLYSSPVNSSAPLAEDIDPELARYLNRNYWEKKQEEARKSPTPSAPVPLTEPAAQPGEGHAAPTNVVENPLPETDSQPIPPSGGPFSEPQFHNGESEESHEQFLKALQNAVTTFVNRMKSNHMRGRSITNDSAVLSLFQSINGMHPQLLELLNQLDERRLYYEGLQDKLAQIRDARGALSALREEHREKLRRAAEEAERQRQIQLAQKLEIMRQKKQEYLEVQRQLAIQRLQEQEKERQMRLEQQKQTVQMRAQMPAFPLPYAQLQAMPAAGGVLYQPSGPASFPSTFSPAGSVEGSPMHGVYMSQPAPAAGPYPSMPSTAADPSMVSAYMYPAGATGAQAAPQAQAGPPPAPLTHPTRTWPPRPHRASRPSLSLRSPAPWATWGASQSPWATSLTTCRIS

SEQ ID NO: 1034024 - protein, 803 aa, Homo sapiens
AGGEEVPVEGGRPPHPAPIILSSGRPPLPKAGLKSRPDPLRLGVHLEEPGALLPSAELTPRNSTRGGGHLPWAVSGAAPPGRLSHPGSSPVRSGQGPEQLKDKATSQLLLETDWESILQICDLIRQGDTQAKYAVNSIKKKVNDKNPHVALYALEVMESVVKNCGQTVHDEVANKQTMEELKDLLKRQVEVNVRNKILYLIQAWAHAFRNEPKYKVVQDTYQIMKVEGHVFPEFKESDAMFAAERAPDWVDAEECHRCRVQFGVMTRKHHCRACGQIFCGKCSSKYSTIPKFGIEKEVRVCEPCYEQLNRKAEGKATSTTELPPEYLTSPLSQQSQLPPKRDETALQEEEELQLALALSQSEAEEKERLRQKSTYTSYPKAEPMPSASSAPPASSLYSSPVNSSAPLAEDIDPELARYLNRNYWEKKQEEARKSPTPSAPVPLTEPAAQPGEGHAAPTNVVENPLPETDSQPIPPSGGPFSEPQFHNGESEESHEQFLKALQNAVTTFVNRMKSNHMRGRSITNDSAVLSLFQSINGMHPQLLELLNQLDERRLYYEGLQDKLAQIRDARGALSALREEHREKLRRAAEEAERQRQIQLAQKLEIMRQKKQEYLEVQRQLAIQRLQEQEKERQMRLEQQKQTVQMRAQMPAFPLPYAQLQAMPAAGGVLYQPSGPASFPSTFSPAGSVEGSPMHGVYMSQPAPAAGPYPSMPSTAADPSMVSAYMYPAGATGAQAAPQAQAGPPPAPLTHPTSLLPQRATRTWPPRPHRASRPSLSLRSPAPWATWGASQSPWATSLTTCRIS

SEQ ID NO: 1034025 - protein, 714 aa, Homo sapiens; identical to SEQ ID NO: 1034015

SEQ ID NO: 1034026 - protein, 714 aa, Homo sapiens; identical to SEQ ID NO: 1034015

SEQ ID NO: 1034027 - protein, 493 aa, Homo sapiens
MGRGSGTFERLLDKATSQLLLETDWESILQICDLIRQGDTQAKYAVNSIKKKVNDKNPHVALYALEVMESVVKNCGQTVHDEVANKQTMEELKDLLKRQVEVNVRNKILYLIQAWAHAFRNEPKYKVVQDTYQIMKVEGHVFPEFKESDAMFAAERAPDWVDAEECHRCRVQFGVMTRKHHCRACGQIFCGKCSSKYSTIPKFGIEKEVRVCEPCYEQLNRKAEGKATSTTELPPEYLTSPLSQQSQLPPKRDETALQEEEELQLALALSQSEAEEKERLRQKSTYTSYPKAEPMPSASSAPPASSLYSSPVNSSAPLAEDIDPELARYLNRNYWEKKQEEARKSPTPSAPVPLTEPAAQPGEGHAAPTNVVENPLPETDSQPIPPSGGPFSEPQFHNGESEESHEQFLKALQNAVTTFVNRMKSNHMRGRSITNDSAVLSLFQSINGMHPQLLELLNQLDERQGRKGVGPRDHGASAQGQPGVEYLEVQRQW

SEQ ID NO: 1034028 - protein, 128 aa, Homo sapiens
VLAGYPFSERGSFLKENDKATSQLLLETDWESILQICDLIRQGDTQAKYAVNSIKKKVNDKNPHVALYALEVMESVVKNCGQTVHDEVANKQTMEELKDLLKRQVEVNVRNKILPPCPLLPVVSLLCE

SEQ ID NO: 1034029 - protein, 109 aa, Homo sapiens
AEKGGSGSRGARQLVAGERPRRRVWAGGRHGARQRHLRASPRQGDQPAPVGDRLGVHFADLRPDPPRGHTSKICCEFHQEESQRQEPTRRLVCPGGHGICGKELWPDSS

SEQ ID NO: 1034030 - protein, 151 aa, Homo sapiens
  misc_feature (150)..(150): Xaa can be any naturally occurring amino acid
MGRGSGTFERLLDKATSQLLLETDWESILQICDLIRQGDTQAKYAVNSIKKKVNDKNPHVALYALEVKQTPVPQWPPGSLPPTSHDSMRRVCPVALPTSLGIHQAGEFPLSLECLCEQCPLGEGHAEGETGDRGGSGHHFFSRSCVSNTXY

SEQ ID NO: 1034031 - protein, 777 aa, Homo sapiens; identical to SEQ ID NO: 1034016

SEQ ID NO: 1034032 - protein, 777 aa, Homo sapiens; identical to SEQ ID NO: 1034016

SEQ ID NO: 1034033 - protein, 690 aa, Homo sapiens [sequence omitted]

SEQ ID NO: 1034034 - protein, 777 aa, Homo sapiens; identical to SEQ ID NO: 1034016

SEQ ID NO: 1034035 - protein, 714 aa, Homo sapiens; identical to SEQ ID NO: 1034015

SEQ ID NO: 1034036 - protein, 414 aa, Homo sapiens
MGRGSSLYSSPVNSSAPLAEDIDPELARYLNRNYWEKKQEEARKSPTPSAPVPLTEPAAQPGEGHAAPTNVVENPLPETDSQPIPPSGGPFSEPQFHNGESEESHEQFLKALQNAVTTFVNRMKSNHMRGRSITNDSAVLSLFQSINGMHPQLLELLNQLDERRLYYEGLQDKLAQIRDARGALSALREEHREKLRRAAEEAERQRQIQLAQKLEIMRQKKQEYLEVQRQLAIQRLQEQEKERQMRLEQQKQTVQMRAQMPAFPLPYAQLQAMPAAGGVLYQPSGPASFPSTFSPAGSVEGSPMHGVYMSQPAPAAGPYPSMPSTAADPSMVSAYMYPAGATGAQAAPQAQAGPPPAPLTHPTSLLPQRATRTWPPRPHRASRPSLSLRSPAPWATWGASQSPWATSLTTCRIS

SEQ ID NO: 1034037 - protein, 263 aa, Homo sapiens
MGRGSGTFERLLDKATSQLLLETDWESILQICDLIRQGDTQAKYAVNSIKKKVNDKNPHVALYALEVMESVVKNCGQTVHDEVANKQTMEELKDLLKRQVEVNVRNKILYLIQAWAHAFRNEPKYKVVQDTYQIMKVEGHVFPEFKESDAMFAAERAPDWVDAEECHRCRVQFGVMTRKHHCRACGQIFCGKCSSKYSTIPKFGIEKEVRVCEPCYEQLNRKAEGKATSTEYLPTRPAVVLTGHHPELHPAAVAFLSVHPVGW

SEQ ID NO: 1034038 - protein, 256 aa, Homo sapiens
MKLLENSSFEAINSQLTVETGDAHIIGRIESYSCKMAGDDKHMFKQFCQEGQPHVLEALSPPQTSGLSPSRLSKSQGGEEEGPLSDKCSRKTLFYLIATLNESFRPDYDFSTARSHEFSREPSLSWVVNAVNCSLFSAVREDFKDLKPQLWNAVDEEICLAECDIYSYNPDLDSDPFGEDGSLWSFNYFFYNKRLKRIVFFSCRSISGSTYTPSEAGNELDMELGEEEVEEESRSRGSGAEETSTMEEDRVPVICI

SEQ ID NO: 1034039 - protein, 290 aa, Homo sapiens
MKLLENSSFEAINSQLTVETGDAHIIGRIESYSCKMAGDDKHMFKQFCQEGQPHVLEALSPPQTSGLSPSRLSKSQGGEEEGPLSDKCSRKTLFYLIATLNESFRPDYDFSTARSHEFSREPSLSWVRVRWREGTHSHPTVLPHFGEPWAPVTLTVTCPEVVNAVNCSLFSAVREDFKDLKPQLWNAVDEEICLAECDIYSYNPDLDSDPFGEDGSLWSFNYFFYNKRLKRIVFFSCRSISGSTYTPSEAGNELDMELGEEEVEEESRSRGSGAEETSTMEEDRVPVICI

SEQ ID NO: 1034040 - protein, 286 aa, Homo sapiens
MKLLENSSFEAINSQLTVETGDAHIIGRIESYSCKMAGDDKHMFKQFCQEGQPHVLEALSPPQTSGLSPSRLSKSQGGEEEGPLSDKCSRKTLFYLIATLNESFRPDYDFSTARSHEFSREPSLSWVVNAVNCSLFSAVREDFKDLKPQLWNAVDEEICLAECDIYSYNPDLDSDPFGEDGSLWSFNYFFYNKRLKRIVFFSCRSISGSTYTPSEAGNELDMELGEEEVEEESRSRGSGAEETCTLQPKGSVAGGPTSRPQQSPALVLGRPRCPPVPPPRPFGRVH

SEQ ID NO: 1034041 - protein, 111 aa, Homo sapiens
MPTHPSDSCCPCCGRTCQQGAWWEERLPCPNELPQQGQLDRRVYFCISTGPAHSSPKGLWPEAPRAGPSSHRLWSWAGPGAHLYPHLAHLAACTECHFAAARFFPIKVSVT

SEQ ID NO: 1034042 - protein, 149 aa, Homo sapiens
MKLLENSSFEAINSQLTVETGDAHIIGRIESYSCKMAGDDKHMFKQFCQEGQPHVLEALSPPQTSGLSPSRLSKSQGGEEEGPLSDKCSRKTLFYLIATLNESFRPDYDFSTARAESAGPLTGGNAALRCLVCGGLRSNPCDRGKNAGE

SEQ ID NO: 1034043 - protein, 376 aa, Homo sapiens
  misc_feature (309)..(309): Xaa can be any naturally occurring amino acid
MKLLENSSFEAINSQLTVETGDAHIIGRIESYSCKMAGDDKHMFKQFCQEGQPHVLEALSPPQTSGLSPSRLSKSQGGEEEGPLSDKCSRKTLFYLIATLNESFRPDYDFSTARSHEFSREPSLSWVVNAVNCSLFSAVREDFKDLKPQLWNAVDEEICLAECDIYRWAGIPADGLQASRFVGHLAPHTTCHPILPSYNPDLDSDPFGEDGSLWSFNYFFYNKRLKRIVFFSCRSISGSTYTPSEAGNELDMELGEEEVEEESRSRGSGAEETSTMEEDRCVMGAMTRVPEAWSGYNRVGASSTWSKWXLLKAHCVPTSAQGPSDLYLMRRSRGPSFIQLQPMPGPVHLRGPWGLPSCWPDPGAATVLALPKAIPA

SEQ ID NO: 1034044 - protein, 256 aa, Homo sapiens; identical to SEQ ID NO: 1034038

SEQ ID NO: 1034045 - protein, 312 aa, Homo sapiens
  misc_feature (10)..(10): Xaa can be any naturally occurring amino acid
  misc_feature (16)..(16): Xaa can be any naturally occurring amino acid
  misc_feature (42)..(42): Xaa can be any naturally occurring amino acid
SVAALLGVWXKLGNFXGKSGGTCSFPLPGPESSQNERAPAQXNTSPSGARSSFPKDMKLLENSSFEAINSQLTVETGDAHIIGRIESYSCKMAGDDKHMFKQFCQEGQPHVLEALSPPQTSGLSPSRLSKSQGGEEEGPLSDKCSRKTLFYLIATLNESFRPDYDFSTARSHEFSREPSLSWVVNAVNCSLFSAVREDFKDLKPQLWNAVDEEICLAECDIYSYNPDLDSDPFGEDGSLWSFNYFFYNKRLKRIVFFSCRSISGSTYTPSEAGNELDMELGEEEVEEESRSRGSGAEETSTMEEDRVPVICI

SEQ ID NO: 1034046 - protein, 256 aa, Homo sapiens; identical to SEQ ID NO: 1034038

SEQ ID NO: 1034047 - protein, 320 aa, Homo sapiens
MKLLENSSFEAINSQLTVETGDAHIIGRIESYSCKMAGDDKHMFKQFCQEGQPHVLEALSPPQTSGLSPSRLSKSQGGEEEGPLSDKCSRKTLFYLIATLNESFRPDYDFSTARSHEFSREPSLSWVVNAVNCSLFSAVREDFKDLKPQLWNAVDEEICLAECDIYSYNPDLDSDPFGEDGSLWSFNYFFYNKRLKRIVFFSCRSISGSTHPSDSCCPCCGRTCQQGAWWEEQRAGHGAGGGGGGGRKQKQGQWGRGDQHHGGGQGPSDLYLMRRSRGPSFIQLQPMPGPVHLRGPWGLPSCWPDPGAATVLALPKAIPA

SEQ ID NO: 1034048 - protein, 380 aa, Homo sapiens
MKLLENSSFEAINSQLTVETGDAHIIGRIESYSCKMAGDDKHMFKQFCQEGQPHVLEALSPPQTSGLSPSRLSKSQGGEEEGPLSDKCSRKTLFYLIATLNESFRPDYDFSTARSHEFSREPSLSWVRVRWREGTHSHPTVLPHFGEPWAPVTLTVTCPEVVNAVNCSLFSAVREDFKDLKPQLWNAVDEEICLAECDIYRWAGIPADGLQASRFVGHLAPHTTCHPILPSYNPDLDSDPFGEDGSLWSFNYFFYNKRLKRIVFFSCRSISGSTPPLLPNSRLGEYNSPVCISPVCLLNISWGREAGQGPELFLLLSDHYNLKGGRPGLTGSRAPKANGWQTPAGREAERPTRNAPSGGQRDHDVSRQKGEQVHDAHEDP

SEQ ID NO: 1034049 - protein, 256 aa, Homo sapiens; identical to SEQ ID NO: 1034038

SEQ ID NO: 1034050 - protein, 296 aa, Homo sapiens
MKLLENSSFEAINSQLTVETGDAHIIGRIESYSCKMAGDDKHMFKQFCQEGQPHVLEALSPPQTSGLSPSRLSKSQGGEEEGPLSDKCSRKTLFYLIATLNESFRPDYDFSTARSHEFSREPSLSWVVNAVNCSLFSAVREDFKDLKPQLWNAVDEEICLAECDIYSYNPDLDSDPFGEDGSLWSFNYFFYNKRLKRIVFFSCRSISGSTYTPSEAELHPASTNAWTCPPERPLGPPQLLARPWRCHSPGTAQGHTCLALWLHPVDAHSPLRLLLPMLWPDLSAGGLVGGATALPK

SEQ ID NO: 1034051 - protein, 275 aa, Homo sapiens
EEVEEESRSRGSGAEETSTMKLLENSSFEAINSQLTVETGDAHIIGRIESYSCKMAGDDKHMFKQFCQEGQPHVLEALSPPQTSGLSPSRLSKSQGGEEEGPLSDKCSRKTLFYLIATLNESFRPDYDFSTARSHEFSREPSLSWVVNAVNCSLFSAVREDFKDLKPQLWNAVDEEICLAECDIYSYNPDLDSDPFGEDGSLWSFNYFFYNKRLKRIVFFSCRSISGSTYTPSEAGNELDMELGEEEVEEESRSRGSGAEETSTMEEDRVPVICI

SEQ ID NO: 1034052 - protein, 223 aa, Homo sapiens
MKLLENSSFEAINSQLTVETGDAHIIGRIESYSCKMAGDDKHMFKQFCQEGQPHVLEALSPPQTSGLSPSRLSKSQGGEEEGPLSDKCSRKTLFYLIATLNESFRPDYDFSTARSHEFSREPSLSWVVNAVNCSLFSAVREDFKDLKPQLWNAVDEEICLAECDIYTAGPQSLFLYFYWACTLQPKGSVAGGPTSRPQQSPALVLGRPRCPPVPPPRPFGRVH

SEQ ID NO: 1034053 - protein, 182 aa, Homo sapiens
DGVGRPTRPVPDPAAAEMLMPKKNRIAIYELLFKEGVMVAKKDVHMPKHPELADKNVPNLHVMKAMQSLKSRGYVKEQFAWRHFYWYLTNEGIQYLRDYLHLPPEIVPATLRRSRPETGRPRPKGLEGERPARLTRGEADRDTYRRSAVPPGADKKAEAGAGSATEFQFRGGFGRGRGQPPQ

SEQ ID NO: 1034054 - protein, 182 aa, Homo sapiens; identical to SEQ ID NO: 1034053

SEQ ID NO: 1034055 - protein, 165 aa, Homo sapiens; identical to SEQ ID NO: 771852

SEQ ID NO: 1034056 - protein, 187 aa, Homo sapiens
VDRSTAHAPSFPAPVPDPAAAEMLMPKKNRIAIYELLFKEGVMVAKKDVHMPKHPELADKNVPNLHVMKAMQSLKSRGYVKEQFAWRHFYWYLTNEGIQYLRDYLHLPPEIVPATLRRSRPETGRPRPKGLEGERPARLTRGEADRDTYRRSAVPPGADKKAEAGAGSATEFQFRGGFGRGRGQPPQ

SEQ ID NO: 1034057 - protein, 187 aa, Homo sapiens; identical to SEQ ID NO: 1034056

SEQ ID NO: 1034058 - protein, 187 aa, Homo sapiens; identical to SEQ ID NO: 1034056

SEQ ID NO: 1034059 - protein, 187 aa, Homo sapiens; identical to SEQ ID NO: 1034056

SEQ ID NO: 1034060 - protein, 96 aa, Homo sapiens
MLMPKKNRIAIYELLFKEGVMVAKKDVHMPKHPELADKNVPNLHVMKAMQSLKSRGYVKEQFAWRHFYWYLTNEGIQYLRDYLHLPPVTGYGVPSS

SEQ ID NO: 1034061 - protein, 117 aa, Homo sapiens
MQSLKSRGYVKEQFAWRHFYWYLTNEGIQYLRDYLHLPPEIVPATLRRSRPETGRPRPKGLEGERPARLTRGEADRDTYRRSAVPPGADKKAEAGAGSATEFQFRGGFGRGRGQPPQ

SEQ ID NO: 1034062 - protein, 187 aa, Homo sapiens; identical to SEQ ID NO: 1034056

SEQ ID NO: 1034063 - protein, 187 aa, Homo sapiens; identical to SEQ ID NO: 1034056

SEQ ID NO: 1034064 - protein, 187 aa, Homo sapiens; identical to SEQ ID NO: 1034056

SEQ ID NO: 1034065 - protein, 187 aa, Homo sapiens; identical to SEQ ID NO: 1034056

SEQ ID NO: 1034066 - protein, 187 aa, Homo sapiens; identical to SEQ ID NO: 1034056

SEQ ID NO: 1034067 - protein, 138 aa, Homo sapiens
MLMPKKNRIAIYELLFKEGVMVAKKDVHMPKHPELADKNVPNLHVMKAMQSLKSRGYVKEQFAWRHFYWYLTNEGIQYLRDYLHLPPEIVPATLRRSRPETGRPRPKGLEGERPARLTRGEADQESRGWGWVSNRIPV

SEQ ID NO: 1034068 - protein, 135 aa, Homo sapiens
RPPTTTTARIQASNDDGAMQSLKSRGYVKEQFAWRHFYWYLTNEGIQYLRDYLHLPPEIVPATLRRSRPETGRPRPKGLEGERPARLTRGEADRDTYRRSAVPPGADKKAEAGAGSATEFQFRGGFGRGRGQPPQ

SEQ ID NO: 1034069 - protein, 165 aa, Homo sapiens; identical to SEQ ID NO: 771852

SEQ ID NO: 1034070 - protein, 187 aa, Homo sapiens; identical to SEQ ID NO: 1034056

SEQ ID NO: 1034071 - protein, 187 aa, Homo sapiens; identical to SEQ ID NO: 1034056

SEQ ID NO: 1034072 - protein, 187 aa, Homo sapiens; identical to SEQ ID NO: 1034056

SEQ ID NO: 1034073 - protein, 187 aa, Homo sapiens; identical to SEQ ID NO: 1034056

SEQ ID NO: 1034074 - protein, 120 aa, Homo sapiens
MKAMQSLKSRGYVKEQFAWRHFYWYLTNEGIQYLRDYLHLPPEIVPATLRRSRPETGRPRPKGLEGERPARLTRGEADRDTYRRSAVPPGADKKAEAGAGSATEFQFRGGFGRGRGQPPQ

SEQ ID NO: 1034075 - protein, 111 aa, Homo sapiens
VCINKNSLKKKKNRARRRTPRLQSQHLGRPRRVDKPRSGVRDQPGQHGKTPSPPKIQKKNLDGLPHKERLKKVKGTRQILPRLFTKNITSSITSIWIRSTKRPLDDGVGNQ

SEQ ID NO: 1034076 - protein, 163 aa, Homo sapiens
MADYLISGGTSYVPDDGLTAQQLFNCGDGLTYNDFLILPGYIDFTADQVDLTSALTKKITLKTPLVSSPMDTVTEAGMAIAMALTGGIGFIHHNCTPEFQANEVRKVKKYEQGFITDPVVLSPKDRVRDVFEAKGPAWFLRYPNHRHRPDGEPLGGHHLLQGH

SEQ ID NO: 1034077 - protein, 223 aa, Homo sapiens
MIKYIKDKYPNLQVIGGNVVTAAQAKNLIDAGVDALRVGMGSGSICITQEVLACGRPQATAVYKVSEYARRFGVPVIADGGIQNVGHIAKALALGASTVMMGSLLAATTEAPGEYFFSDGIRLKKYRGMGSLDAMDKHLSSQNRYFSEADKIKVAQGVSGAVQDKGSIHKFVPYLIAGIQHSCQDIGAKSLTQVRAMMYSGELKFEKRTSSAQVEGGVHSLHS

SEQ ID NO: 1034078 - protein, 195 aa, Homo sapiens
MIKYIKDKYPNLQVIGGNVVTAAQAKNLIDAGVDALRVGMGSGSICITQEVLACGRPQATAVYKVSEYARRFGVPVIADGGIQNVGHIAKALALGASTVMMGSLLAATTEAPGEYFFSDGIRLKKYRGMGSLDAMDKHLSSQNRYFSEADKIKVAQGVSGAVQDKGSIHKFVPYLIAGIQHSCQDIGAKSLTQVR

SEQ ID NO: 1034079 - protein, 253 aa, Homo sapiens
MIKYIKDKYPNLQVIGGNVVTAAQAKNLIDAGVDALRVGMGSGSICITQEVAPKIPPDIKSHSPKCPSTVTGCYMLACGRPQATAVYKVSEYARRFGVPVIADGGIQNVGHIAKALALGASTVMMGSLLAATTEAPGEYFFSDGIRLKKYRGMGSLDAMDKHLSSQNRYFSEADKIKVAQGVSGAVQDKGSIHKFVPYLIAGIQHSCQDIGAKSLTQVRAMMYSGELKFEKRTSSAQVEGGVHSLHSYEKRLF

SEQ ID NO: 1034080 - protein, 163 aa, Homo sapiens; identical to SEQ ID NO: 1034076

SEQ ID NO: 1034081 - protein, 229 aa, Homo sapiens [sequence omitted]

SEQ ID NO: 1034082 - protein, 259 aa, Homo sapiens
MTSIGWTCSPSWCGCSGLDSSQGNSIFQINMIKYIKDKYPNLQVIGGNVVTAAQAKNLIDAGVDALRVGMGSGSICITQEVLACGRPQATAVYKVSEYARRFGVPVIADGGIQNVGHIAKALALGASTVMMGSLLAATTEAPGEYFFSDGIRLKKYRGMGSLDAMDKHLSSQNRYFSEADKIKVAQGVSGAVQDKGSIHKFVPYLIAGIQHSCQDIGAKSLTQVRAMMYSGELKFEKRTSSAQVEGGVHSLHSYEKRLF

SEQ ID NO: 1034083 - protein, 163 aa, Homo sapiens; identical to SEQ ID NO: 1034076

SEQ ID NO: 1034084 - protein, 163 aa, Homo sapiens; identical to SEQ ID NO: 1034076

SEQ ID NO: 1034085 - protein, 165 aa, Homo sapiens [sequence omitted]

SEQ ID NO: 1034086 - protein, 179 aa, Homo sapiens
MLACGRPQATAVYKVSEYARRFGVPVIADGGIQNVGHIAKALALGASTVMMGSLLAATTEAPGEYFFSDGIRLKKYRGMGSLDAMDKHLSSQNRYFSEADKIKVAQGVSGAVQDKGSIHKFVPYLIAGIQHSCQDIGAKSLTQVRAMMYSGELKFEKRTSSAQVEGGVHSLHSYEKRLF

SEQ ID NO: 1034087 - protein, 228 aa, Homo sapiens
MIKYIKDKYPNLQVIGGNVVTAAQAKNLIDAGVDALRVGMGSGSICITQEVLACGRPQATAVYKVSEYARRFGVPVIADGGIQNVGHIAKALALGASTVMMGSLLAATTEAPGEYFFSDGIRLKKYRGMGSLDAMDKHLSSQNRYFSEADKIKVAQGVSGAVQDKGSIHKFVPYLIAGIQHSCQDIGAKSLTQVRAMMYSGELKFEKRTSSAQVEGGYGRHLPSTRPR

SEQ ID NO: 1034088 - protein, 195 aa, Homo sapiens; identical to SEQ ID NO: 1034078

SEQ ID NO: 1034089 - protein, 163 aa, Homo sapiens; identical to SEQ ID NO: 1034076

SEQ ID NO: 1034090 - protein, 276 aa, Homo sapiens
MIKYIKDKYPNLQVIGGNVVTAAQAKNLIDAGVDALRVGMGSGSICITQEVLACGRPQATAVYKVSEYARRFGVPVIADGGIQNVGHIAKALALGASTVMMGSLLAATTEALVNTSFPDGIRLKKYRGMGSLDAMDKHLSSQNRYFSEADKIKVAQGVSGEYFFSDGIRLKKYRGMGSLDAMDKHLSSQNRYFSEADKIKVAQGVSGAVQDKGSIHKFVPYLIAGIQHSCQDIGAKSLTQVRAMMYSGELKFEKRTSSAQVEGGVHSLHSYEKRLF

SEQ ID NO: 1034091 - protein, 163 aa, Homo sapiens; identical to SEQ ID NO: 1034076

SEQ ID NO: 1034092 - protein, 163 aa, Homo sapiens; identical to SEQ ID NO: 1034076

SEQ ID NO: 1034093 - protein, 163 aa, Homo sapiens; identical to SEQ ID NO: 1034076

SEQ ID NO: 1034094 - protein, 163 aa, Homo sapiens; identical to SEQ ID NO: 1034076

SEQ ID NO: 1034095 - protein, 163 aa, Homo sapiens; identical to SEQ ID NO: 1034076

SEQ ID NO: 1034096 - protein, 514 aa, Homo sapiens
MADYLISGGTSYVPDDGLTAQQLFNCGDGLTYNDFLILPGYIDFTADQVDLTSALTKKITLKTPLVSSPMDTVTEAGMAIAMALTGGIGFIHHNCTPEFQANEVRKVKKYEQGFITDPVVLSPKDRVRDVFEAKARHGFCGIPITDTGRMGSRLVGIISSRDIDFLKEEEHDCFLEEIMTKREDLVVAPAGITLKEANEILQRSKKGKLPIVNEDDELVAIIARTDLKKNRDYPLASKDAKKQLLCGAAIGTHEDDKYRLDLLAQAGVDVVVLDSSQGNSIFQINMIKYIKDKYPNLQVIGGNVVTAAQAKNLIDAGVDALRVGMGSGSICITQEVLACGRPQATAVYKVSEYARRFGVPVIADGGIQNVGHIAKALALGASTVMMGSLLAATTEAPGEYFFSDGIRLKKYRGMGSLDAMDKHLSSQNRYFSEADKIKVAQGVSGAVQDKGSIHKFVPYLIAGIQHSCQDIGAKSLTQVRAMMYSGELKFEKRTSSAQVEGGVHSLHSYEKRLF

SEQ ID NO: 1034097 - protein, 514 aa, Homo sapiens; identical to SEQ ID NO: 1034096

SEQ ID NO: 1034098 - protein, 514 aa, Homo sapiens; identical to SEQ ID NO: 1034096

SEQ ID NO: 1034099 - protein, 236 aa, Homo sapiens
MGYRRPRPSLTMKDSNPNLQVIGGNVVTAAQAKNLIDAGVDALRVGMGSGSICITQEVLACGRPQATAVYKVSEYARRFGVPVIADGGIQNVGHIAKALALGASTVMMGSLLAATTEAPGEYFFSDGIRLKKYRGMGSLDAMDKHLSSQNRYFSEADKIKVAQGVSGAVQDKGSIHKFVPYLIAGIQHSCQDIGAKSLTQVRAMMYSGELKFEKRTSSAQVEGGVHSLHSYEKRLF

SEQ ID NO: 1034100 - protein, 514 aa, Homo sapiens; identical to SEQ ID NO: 1034096

SEQ ID NO: 1034101 - protein, 514 aa, Homo sapiens; identical to SEQ ID NO: 1034096

SEQ ID NO: 1034102 - protein, 514 aa, Homo sapiens; identical to SEQ ID NO: 1034096

SEQ ID NO: 1034103 - protein, 195 aa, Homo sapiens; identical to SEQ ID NO: 1034078

SEQ ID NO: 1034104 - protein, 163 aa, Homo sapiens; identical to SEQ ID NO: 1034076

SEQ ID NO: 1034105 - protein, 163 aa, Homo sapiens; identical to SEQ ID NO: 1034076

SEQ ID NO: 1034106 - protein, 163 aa, Homo sapiens; identical to SEQ ID NO: 1034076

SEQ ID NO: 1034107 - protein, 229 aa, Homo sapiens [sequence omitted]

SEQ ID NO: 1034108 - protein, 136 aa, Homo sapiens
RWSPALVAQAGVQWCDLSSLQPPPPRFKHLSCLSLLSSRDYRHPPPCLANFYIFSRDRASHVGQAGFELLTSSDLPALASRNIGITGVSHCAWPKFQILIAKRLFGYLTGIPNSTHPKQNPPSLPNLLFFPCFLSQ

SEQ ID NO: 1034109 - protein, 77 aa, Homo sapiens
LRCKRGAENARRKQAEGFSRVIVQIYESIGLVFPRGLSRFRVTGRVFRKPAVACNFRRYTEVTFFGKHTPVSLLEKA

SEQ ID NO: 1034110 - protein, 145 aa, Homo sapiens
PGGNVEGATQSLAEHMIQIAEESEGRSDEQMESDNCSRGDDDWTHLSSDQVDPATGDLESLTDATILMATLSAPLPRWTHRAEGSCLVPTYPAKADPQLIVSLYQMLPTGFSDEGGWLTRLLQTKNYDIGAALDTIQYSKHPPPL

SEQ ID NO: 1034111 - protein, 145 aa, Homo sapiens; identical to SEQ ID NO: 1034110

SEQ ID NO: 1034112 - protein, 122 aa, Homo sapiens
HQPQPERPLAVNPCPSSRPPPATLSVWPLCMWPAAAEATERQLRSAPRPVSWPLIGNAAAVGSAHLSFARLARPTATFSRSAWQLPHSGAECERAIPPGPGACRAAFRDRPSFASFRVVSGG

SEQ ID NO: 1034113 - protein, 200 aa, Homo sapiens
SGGGGVACPRPSRLFFASAGVRGVALAARAMPGRSCVALVLLAAAVSCAVAQHAPPWTEDCRKSTYPPSGPTYRGAVPWYTINLDLPPYKRWHELMLDKAPMLKVIVNSLKNMINTFVPSGKVMQVVDEKLPGLLGNFPGPFEEEMKGIAAVTDIPLGKVHLEALKKKVIKFFYKFPLRCDIHTAQVLYVLDIQHRCCMS

SEQ ID NO: 1034114 - protein, 206 aa, Homo sapiens
SGGGGVACPRPSRLFFASAGVRGVALAARAMPGRSCVALVLLAAAVSCAVAQHAPPWTEDCRKSTYPPSGPTYRGAVPWYTINLDLPPYKRWHELMLDKAPMLKVIVNSLKNMINTFVPSGKVMQVVDEKLPGLLGNFPGPFEEEMKGIAAVTDIPLGKVHLEALKKKVIKFFYKFPLRCDIHTAQVRAQVLDIQLSEASEMHACM

SEQ ID NO: 1034115 - protein, 205 aa, Homo sapiens
SGGGGVACPRPSRLFFASAGVRGVALAARAMPGRSCVALVLLAAAVSCAVAQHAPPWTEDCRKSTYPPSGPTYRGAVPWYTINLDLPPYKRWHELMLDKAPMLKVIVNSLKNMINTFVPSGKVMQVVDEKLPGLLGNFPGPFEEEMKGIAAVTDIPLGKVHLEALKKKVIKFFYKFPLRCDIHTAQVLYVLDIQHRCTGLRYTAQ

SEQ ID NO: 1034116 - protein, 173 aa, Homo sapiens
SGGGGVACPRPSRLFFASAGVRGVALAARAMPGRSCVALVLLAAAVSCAVAQHAPPWTEDCRKSTYPPSGPTYRGAVPWYTINLDLPPYKRWHELMLDKAPMLKVIVNSLKNMINTFVPSGKVMQVVDEKLPGLLGNFPGPFEEEMKGKMKWKGTESGTGGTVYGVASSDTWN

SEQ ID NO: 1034117 - protein, 164 aa, Homo sapiens
GIGVIDEKWGGGRSEASPTLGPSLFGKGGDPEAKAQIDNLHIGVRVRVDTAAGAFPPSPRPESALRRWSEGRAPLAHFGVKRVPGISRARSFAPHLVRTSPPGRWLGWLVQPWEAMPCLKSSAYLVGCQDSASQVCGKEISNRLVISSHCVSFTPKGQKLERES

SEQ ID NO: 1034118 - protein, 164 aa, Homo sapiens
FAAASTPVNAGNQRSDTDPGIDTSADLAGPAAGSGSKSAAGAGSCPEILPGQAAILTRLQAGGHTRCAPHAIQRQGDTDPHLARQRPAKQDDRAAGDISENTVKFHLKHIFAKLSVDNRTAAISAALRLGVLDSLSLSPPAYPFGRRGRELVVVGDPGISARTW

SEQ ID NO: 1034119 - protein, 54 aa, Homo sapiens
MALQKGAETYQGDAVFAVQPPVDFFEDGVEHAAGLFFREVRFFSNCSGEFWFTH

SEQ ID NO: 1034120 - protein, 184 aa, Homo sapiens
  misc_feature (3)..(3): Xaa can be any naturally occurring amino acid
SRXRRPLRLHHIPRSTIIIQPHHNDTSNTNLNTRIDCIIFSININTTNHHNTISNSSLYFRLHHTTRSTINIRTHHSITSNIHFNITVYGTIFILRLSDNHNTGFIVCLYLPFIYTSRSNSNICFCIRHNTSSIITSPLKLHHIPRSTIIIQPHHNYTSNINLNTRIACIIFSINLNTTSTRPG

SEQ ID NO: 1034121 - protein, 145 aa, Homo sapiens
  misc_feature (1)..(1): Xaa can be any naturally occurring amino acid
  misc_feature (28)..(29): Xaa can be any naturally occurring amino acid
  misc_feature (36)..(36): Xaa can be any naturally occurring amino acid
  misc_feature (38)..(38): Xaa can be any naturally occurring amino acid
  misc_feature (49)..(51): Xaa can be any naturally occurring amino acid
  misc_feature (53)..(53): Xaa can be any naturally occurring amino acid
  misc_feature (55)..(57): Xaa can be any naturally occurring amino acid
  misc_feature (60)..(61): Xaa can be any naturally occurring amino acid
  misc_feature (68)..(68): Xaa can be any naturally occurring amino acid
  misc_feature (70)..(70): Xaa can be any naturally occurring amino acid
  misc_feature (73)..(75): Xaa can be any naturally occurring amino acid
  misc_feature (78)..(79): Xaa can be any naturally occurring amino acid
  misc_feature (81)..(81): Xaa can be any naturally occurring amino acid
  misc_feature (89)..(91): Xaa can be any naturally occurring amino acid
  misc_feature (93)..(93): Xaa can be any naturally occurring amino acid
  misc_feature (96)..(97): Xaa can be any naturally occurring amino acid
  misc_feature (99)..(100): Xaa can be any naturally occurring amino acid
  misc_feature (102)..(103): Xaa can be any naturally occurring amino acid
XLKEQQTYRYHGHSMVTLESVTVHEKKXXKEDRKMXPXYASQGQEGEQXXXQXGXXXGNXXGREEGDXGXGPXXXGRXXAXFGRAGLPXXXHXPSXXSXXVXXSGSSLSQSVEGRRRRGDDFRGLPDSVLRLGLKEEENPVNEIQ

SEQ ID NO: 1034122 - protein, 255 aa, Homo sapiens
  misc_feature (2)..(2): Xaa can be any naturally occurring amino acid
  misc_feature (25)..(25): Xaa can be any naturally occurring amino acid
  misc_feature (35)..(35): Xaa can be any naturally occurring amino acid
  misc_feature (56)..(56): Xaa can be any naturally occurring amino acid
  misc_feature (61)..(61): Xaa can be any naturally occurring amino acid
  misc_feature (102)..(102): Xaa can be any naturally occurring amino acid
  misc_feature (106)..(106): Xaa can be any naturally occurring amino acid
  misc_feature (113)..(113): Xaa can be any naturally occurring amino acid
  misc_feature (119)..(119): Xaa can be any naturally occurring amino acid
  misc_feature (122)..(122): Xaa can be any naturally occurring amino acid
  misc_feature (130)..(130): Xaa can be any naturally occurring amino acid
  misc_feature (134)..(134): Xaa can be any naturally occurring amino acid
  misc_feature (140)..(141): Xaa can be any naturally occurring amino acid
  misc_feature (143)..(144): Xaa can be any naturally occurring amino acid
  misc_feature (147)..(147): Xaa can be any naturally occurring amino acid
  misc_feature (152)..(152): Xaa can be any naturally occurring amino acid
  misc_feature (159)..(159): Xaa can be any naturally occurring amino acid
  misc_feature (162)..(162): Xaa can be any naturally occurring amino acid
  misc_feature (168)..(168): Xaa can be any naturally occurring amino acid
  misc_feature (170)..(170): Xaa can be any naturally occurring amino acid
  misc_feature (172)..(174): Xaa can be any naturally occurring amino acid
  misc_feature (176)..(177): Xaa can be any naturally occurring amino acid
  misc_feature (180)..(180): Xaa can be any naturally occurring amino acid
  misc_feature (182)..(184): Xaa can be any naturally occurring amino acid
  misc_feature (220)..(220): Xaa can be any naturally occurring amino acid
RXGGARSLPRSPARPGPNDALLGEXDFRGQGVRAXRFRLSEEPGPGADGAALEVHXPQALXPQYGMYVWPCAVALAQYLWSHRRSLPGKAILEIGAGVTLPXILAXKCGAEPXLPHRPXLPXSLEPPPQXSQTXPPPPPXXAXXPWXHIPRXPPAPPPXDIXPAPDVXFXPXXXEXXPAXRXXXRHKNPKVQLWSTYQVRSADWSLEALLYKWDMKCAHXPPEAFDADKEDIAESTLPGSHTGEMLAIPFAKDSL

SEQ ID NO: 1034123 - protein, 107 aa, Homo sapiens
  misc_feature (2)..(2): Xaa can be any naturally occurring amino acid
  misc_feature (25)..(25): Xaa can be any naturally occurring amino acid
  misc_feature (35)..(35): Xaa can be any naturally occurring amino acid
  misc_feature (51)..(51): Xaa can be any naturally occurring amino acid
  misc_feature (53)..(53): Xaa can be any naturally occurring amino acid
  misc_feature (55)..(55): Xaa can be any naturally occurring amino acid
  misc_feature (59)..(59): Xaa can be any naturally occurring amino acid
  misc_feature (65)..(65): Xaa can be any naturally occurring amino acid
  misc_feature (67)..(68): Xaa can be any naturally occurring amino acid
  misc_feature (82)..(82): Xaa can be any naturally occurring amino acid
  misc_feature (85)..(85): Xaa can be any naturally occurring amino acid
  misc_feature (89)..(89): Xaa can be any naturally occurring amino acid
  misc_feature (94)..(94): Xaa can be any naturally occurring amino acid
  misc_feature (96)..(97): Xaa can be any naturally occurring amino acid
  misc_feature (104)..(104): Xaa can be any naturally occurring amino acid
RXGGARSLPRSPARPGPNDALLGEXDFRGQGVRAXRFRLSEEPGPGAVFFXFXFXVPQXGAGVSXPXXFAAKCGAEVILSDXSVXPHCXEFFRXCXXLNNSAYXCRW

SEQ ID NO: 1034124 - protein, 124 aa, Homo sapiens
KTPGRTQLLNFFKLDDDRRLVDLPGYGYAKVPIPLNCTGSVTWKPIWVAGEFEGFDSDDDIRHPMTDFDLLMLDWAVASGMPMHVLLTKADKLTYSAAKNTLLKVQAEIRKGWGDAVTIQLFSA

SEQ ID NO: 1034125 - protein, 108 aa, Homo sapiens
DRYRQDLQLSRTLGRLQAEYQALASLELQEGEDDGYFRELLASINSLMKELRSGCHAETRTGRMLLVRALVGSSGDINYEEDLTCWGMSVTWAELARSLNRDMMTKKK

SEQ ID NO: 1034126 - protein, 388 aa, Homo sapiens
MPSCYGKTSEKTYYPIGPLRRHVAFLLAILDWLQQKAVGFFGTCTWVGPREYLWSLNQPKSQYPSVHKEPQPTTQKRKFSKVEINCNKLQRFPRPGFHFMFWCCMLGERRFQALARAAALTPRAAMNNFQAILTQVRMLLSSHQPSLVQALLDNLLKEDLLSREYHCTLLHEPDSEALARKISLTLLEKGDLDLALLGWARSRLQPPAAERGPGHSDHGGSSQCATMELGPLEGGYLELLNSDADPLCLYHFYDQMDLLEKKSIELYSEPDTDTINCDQFSRLLCDMEGDEETRQAYANIAELDQYVFQDSQPGGPEQGQFFIEHIGPDEVIGESNGDASRSGAEKSEEDPSQRSFRQNLKHWKPAEPPLWVTGSLLVGPVSDWSNLP

SEQ ID NO: 1034127 - protein, 86 aa, Homo sapiens
WKEISSSCECSSSLGRGGYSEDRRQQLEGPEPCHPMSTCHALLTEIVGFSLFNPLLNNVHINNSAQLCCGTNNPECSKVPHICRTG

SEQ ID NO: 1034128 - protein, 83 aa, Homo sapiens
IIQENFPNIARQANVQIQEIQRTPQRYSSRRATPRHIIVRFTKVEMKEKMLRAAREKGRVTLKGKPIRLTADLSAETLQARKS

SEQ ID NO: 1034129 - protein, 125 aa, Homo sapiens
EAKSRVHSRYGFTRKPTAMAEEGSAAEGVMDINTVLQEVVKTAFIPEGVAYEICKAAKASDKCQAHLCVLCVLASNCDEPMYVKLVEALCAEHQINLIKVDDQKLGESVGLCKTDREGKPCKVVG

SEQ ID NO: 1034130 - protein, 107 aa, Homo sapiens
RHLKGARKLEKGYQTFDIKKVVKTAFIPEGVAYEICKAAKASDKCQAHLCVLCVLASNCDEPMYVKLVEALCAEHQINLIKVDDQKLGESVGLCKTDREGKPCKVVG

SEQ ID NO: 1034131 - protein, 162 aa, Homo sapiens
MKEPLDGECGKAVVPQQELLDKIKEEPDNAQEYGCVQQPKTQESKSKMVVCLQLMRDLCPAVEPRLSAFFRIIWPKCVASFSSSCAIKVPVTLVTKSPSTGQTHIIRPGSTHALLHHTMHQPDILHTAACNSSKNPAQRPKHQPHHPLTHLPHRPPAPHTRP

SEQ ID NO: 1034132 - protein, 154 aa, Homo sapiens
YYYYIRGSSTTGDDRRRTHDMNTANWIPDLFMKRVFDDGPWTLFSPSEVPDLHDLTGKAFEERYEYYEALSQYPGKIKLFKTIQAKDLWRKMLSMLFETGHPWLTFKDPCNLRSPQQHVGVVHSSNLYTEITLNTNKDEIAVCNLGSINLRRRG

SEQ ID NO: 1034133 - protein, 172 aa, Homo sapiens
LLLLQKKRPLRHLAVVTDLGNDLDDPILRQFQVLAVLAVGTNRQATSEFLVDLASSRTFYEVITASSVLSSAYRPNERSWSTLRRRYAPLGPEDPWRWFQAEPRSPSARQLAALGNSWDLSRSVRRNDRIPATWALSSEVSKVIGVYFRPLERKKSDTFSSVVVPAWMQMVA

SEQ ID NO: 1034134 - protein, 122 aa, Homo sapiens
MRLLSPLLSRSLGFPGVAGIRAFAQWGLAAGSPGRDCVPATCPVATWPCGRPRPCEMWQAGTSGAWVSWKCFCHSGRRWRQLGCPHKGPIRDTRKAILNLSAHVTSMWPGHSSFRHQSAGGR

SEQ ID NO: 1034135 - protein, 139 aa, Homo sapiens
MHPFQQTFHFGVRPDFLALQGAPASSCIPCPGPGISPFSKEPRVLLLASLKRVRPGCQAGSPRSFYWEVLESEAWVPGGCQVGPVLLGCCHVEALSCRAGTRVSPVQLQSRDEGVTCVYEHLRSHFCICEENMSSCYCL

SEQ ID NO: 1034136 - protein, 80 aa, Homo sapiens
PEHLPLQTQFKEREVGNLQHSNGLNSRSFDYEDENPVGEDGIQQMYPLYNQMCYQDRSPGKHHQNNDPKRVYIDPREHYV

SEQ ID NO: 1034137 - protein, 272 aa, Homo sapiens
RLPVSSRLALFSFQSKGTGVSLGARGPVNAVKPGRALAAWQAWVPHLPLHAVHPVDATLALLSLVALGSPGALLPTAPFFSLHSLVPNRSEVPGSSRISGFSLLSWEPRLASFSLKAGVAPEPRRSSCRLAFEGAAHLLHVIFDHVHDGVDGLADGLLCVAALAPVSRREVAPVRVVRGDDAQTRLQVVGCDGHREDFDAQVLGLVHSILQPPTGFLVALQGVPVGHHNQVLILLQVGAPHEELLQPLLDSAVGVGALPKVLDRVHAAFEVR

SEQ ID NO: 1034138 - protein, 153 aa, Homo sapiens
SGSQDGQLLDLHHRLYWSLGLWTEAGTTSSALLDLQLGNCRPWDISDSIIMTQAVAAVFQASCLHNPMALFFSAATETDCLPPANLKFGKPASSASQNQTGARRTSDPSVDHLSSCTSLCTLCSGNAFGVLLTSVPAPSLTTLHFTLSHTGFT

SEQ ID NO: 1034139 - protein, 119 aa, Homo sapiens
KWPTVLRTLTSRAGVRTWEPAGPARQPRCRAAAPSRRVACGVWSARCDVCTMTKSPNDAFLRTRLVVTHDCTLCGFGQPQLKHGDRDTYASGAGTAGRVGTLAAASSACQGQQQGLAKG

SEQ ID NO: 1034140 - protein, 99 aa, Homo sapiens
VIQETQWRPSNEWHGCQDANWDTKALAVGAAQQGWPLEIRDANSSSIIAKEDQQRPTEAMSRIQLQQQAVDLLQRLKPTLLPSDPPLTSLPCCHPNTCH

SEQ ID NO: 1034141 - protein, 114 aa, Homo sapiens
LGAFFPLPSLQPGSEAVVNSTALKWECRWGSSLKYSHVLAALASMEIKAEVPEEPFIHHLSHRKKLLRRSSLLKTSFIPHLIGTDSPAGTKPSSGVGKEQLPSRASGARRRNGQ

SEQ ID NO: 1034142 - protein, 262 aa, Homo sapiens
MADMQNLVERLERAVGRLEAVSHTSDMHRGYADSPSKGAAPYVQAFDSLLAGPVAEYLKISKEIGGDVQKHAEMVHTGLKLERALLVTASQCQQPAENKLFRLVGTHLRARSTEVITFREKNRGSKLFNHLSAVSESIQALGWVAMAPKPGPYVTEMNDAAMFYTNRVLKEYKDVDKKHVDWVKAYLSIWTELQAYIKEFHTTGLAWSKTGPVAKELSGLPSGPSAGSGPPPPPPGPPRSPSLYQVQGSDESASRSATVRAD

SEQ ID NO: 1034143 - protein, 296 aa, Homo sapiens
MADMQNLVERLERAVGRLEAVSHTSDMHRGYADSPSKGAAPYVQAFDSLLAGPVAEYLKISKEIGGDVQKHAEMVHTGLKLERALLVTASQCQQPAENKLFPGIFWVLGAKSPPPKMFPFPRGKGAQRGKFFQRHREQHGFGNVKTPFSGGNERNREAAKLFNHLSAVSESIQALGWVAMAPKPGPYVTEMNDAAMFYTNRVLKEYKDVDKKHVDWVKAYLSIWTELQAYIKEFHTTGLAWSKTGPVAKELSGLPSGPSAGSGPPPPPPGPPRSPSLYQFHGSDESASRSDTVRAD

SEQ ID NO: 1034144 - protein, 232 aa, Homo sapiens
WARRGLVWQMWIAGPSWVPLRYVVLVDAFGENLCSPQLQGQHAFLASSDQGGCSCGAAPKLQQWAFFKVSCKMESEAHPSVRVSSWYPWNLLVCLTLAFDPGRGSNIYIGHSDSLAFGSLPYTGLPDVDLLHFTVIRKSLSPQKWPAHLIPAKTQVRVLTVLPSFLRVSVGCAESGPRCVRGCVHCHRSLYTSRRGPRAELGPRGPSRRAAMDPGLSCDHEGYPDELPWTQG

SEQ ID NO: 1034145 - protein, 189 aa, Homo sapiens
WARRGLVWQMWIAGPSWVPLRYVVLVDAFGENLCSPQLQGQHAFLASSDQGGCSCGAAPKLQQWAFFKWPAHLIPAKTQVRVLTVLPSFLRVSVGCAESGPRCVRGCVHCHRSLYTSRRGPRAELGPRGPSRRAAMDPGLSCDHEGYPDELAVDPGLSRDHEGHPETVIVFWYVGDVPEPGLSCDHEGK

SEQ ID NO: 1034146 - protein, 233 aa, Homo sapiens
MLCPCIQESTFETCLFMAVSRMSKWRLSRVGGSRSLPAEMEVLGEVWCVRAEEQPMTGLGIVWHSPLLDKALETWSLQQQPDFSLGLGHLGLGTDATWMQSFPGSGGDAQAGTGVSGPLRLYPNLLCDFGPRQGPLWALLLEKRQMAGTGGPQPSLPGGLRVGGLWGKARAGPGESLGSSLVNRVPSSQSRGKARHMPLIWELGLTPSPSPAHLEHVALAHLPCGWTLSSPGS

SEQ ID NO: 1034147 - protein, 118 aa, Homo sapiens
FETGCCSIAQAEVQWWDDNSLQPQLPGLNRSFHRVGPQPSLPGGLRVGGLWGKARAGPGESLGSSLVNRVPSSQSRGKARHMPLIWELGLTPSPSPAHLEHVALAHLPCGWTLSSPGS

SEQ ID NO: 1034148 - protein, 233 aa, Homo sapiens; identical to SEQ ID NO: 1034146

SEQ ID NO: 1034149 - protein, 54 aa, Homo sapiens
MHALRVLDGLCHDPVGRNGIQRRVRGQTAGWASPYITQFLLEVILPAATGSLRY

SEQ ID NO: 1034150 - protein, 102 aa, Homo sapiens
FERVFRHKQNCVEFYPIFIITLWMAGWYFNQVFATCLGLVYIYGRHLYFWGYSEAAKKRITGFRLSLGILALLTLLGALGIGNSFLDEYLDLNIAKKLRREC

SEQ ID NO: 1034151 - protein, 130 aa, Homo sapiens
EPVGEVEKLMLFVAEWVVRAIVRCSRMRLVSWHGVQVVGVVGGDGGRQDACLEGGAHRVMLVQQLLQRADVLDRERSVSTLLIFLLAAPLGTCSRRVAKPRLTNLTRLRSRSLRRATAAGCCCGSCSQSR

SEQ ID NO: 1034152 - protein, 186 aa, Homo sapiens
EPVGEVEKLMLFVAEWVVRAIVRCSRMRLVSWHGVQVVGVVGGDGGRQDACLEGGAHRVMLVQQLLQRADVLDRERSVSTLLIFLLAAPLGTCSRRVAKPRLTNLTRLRSRSLRAPRRPAAAAAAVAKAAEVEPAFAAHQFGRRRVPSIEQFGLVTLRASSEDVAVALRFQLWRLVIVPLNKVVLR

SEQ ID NO: 1034153 - protein, 200 aa, Homo sapiens
EPVGEVEKLMLFVAEWVVRAIVRCSRMRLVSWHGVQVVGVVGGDGGRQDACLEGGAHRVMLVQQLLQRADVLDRERSVSTLLIFLLAAPLGTCSRRVAKPRLTNLTRLRSRSLRAPRRPAAAAAAVAKAAEVEPAFAAHQFGRRRAAVRFDLCYVVLYISATASTDGSEPVWPAGSHAASVLLPACWLLCVLLANNMRRC

SEQ ID NO: 1034154 - protein, 103 aa, Homo sapiens
TVGCGINFNENAIHKEGCVEKIGGWLGKNVLVVAAAALGIAFVEVLGIVFACCLVKSSRSGYEVDVGVWSRQRPHLGEWGSILRGVRVNGLLCQGEKRGADGV

SEQ ID NO: 1034155 - protein, 118 aa, Homo sapiens
MLPNKQTNKKSPPVRCRDLIETVVGALAFFQAGGDPHPWQPDREAEEARAPGDSREGGGPGGQAPSPTPPQDPGAGLSPAFAPMGMRERRWVREQLWPLGKVTWMQPLKEMLPVNPIG

SEQ ID NO: 1034156 - protein, 82 aa, Homo sapiens
LLQTLRVFISLILKSCVPAKGIRLGNRGFLLARRSLFQRKPDLPSHPTAPPSETSGSLPPSPRGRRKNSSPGPIPGWVGSLE

SEQ ID NO: 1034157 - protein, 426 aa, Homo sapiens
GRKILTLVVGESKVELWLHSQASSPSVGSLVLLLAIAMPCWLLAQGHQGPIGRGVTSCRSAGSSHRVPTTANSSSSGSKNLVQGATLELQGVSTPVPRRAQEHASSTAASPSSSSTSVGFFFRIFSGYLHSDKLKVFGPLIMGIGIFLFICANAVLHENRDKKTKIINLRDLYSTVIDVHSLRAKDLAAAAAAAAAAAASSSSSAPAAAPPGAIPLNGFLSYVQSRGLELKPGGCGGSGDAFGAAAMLAKGSWPPHPAAPSGGRPRGAASPPDLASSPRCPREPPSLAEAVYSVYRERSGVAGSRRAAAATAAAAASSCSSPAPCSPPESWGRQSTASSFVDSSLSAFALLPLQGGRDRGGDAEGASCSWQRPPGERGSQEIPRGELDLSMTNLRGAVGSMRGARREPEEPEGAVAARAARGQGGR

SEQ ID NO: 1034158 - protein, 200 aa, Homo sapiens
CDWWNSGEILLEFCWNTLFLVNTHLGTPSEGYQLANISSHSTTVKLSPEASDLIIKLCRGPEDRLGKNGADEIKAHPIFLKQFDFSSDLRQQSASYIPKITHPTDTSNFDPVDPDKLWSDDNEEENVNDTLNGWYKNGKHPEHAFYEFTFRRFFDDNGYPYNYPKPIEYEYINSQGSEQQSDEDDQNTGSEIKNRDLVYV

SEQ ID NO: 1034159 - protein, 410 aa, Homo sapiens
METSSPRPPRPSSNPGLSLDARLGVDTRLWAKVLFTALYALIWALGAAGNALSVHVVLKARAGRAGRLRHHVLSLALAGLLLLLVGVPVELYSFVWFHYPWVFGDLGCRGYYFVHELCAYATVLSVAGLSAERCLAVCQPLRARSLLTPRRTRWLVALSWAASLGLALPMAVIMGQKHELETADGEPEPASRVCTVLVSRTALQVFIQVNVLVSFVLPLALTAFLNGVTVSHLLALCSQVPSTSTPGSSTPSRLELLSEEGLLSFIVWKKTFIQGGQVSLVRHKDVRRIRSLQRSVQVLRAIVVMYVICWLPYHARRLMYCYVPDDAWTDPLYNFYHYFYMVTNTLFYVSSAVTPLLYNAVSSSFRKLFLEAVSSLCGEHHPMKRLPPKPQSPTLMDTASGFGDPPETRT

SEQ ID NO: 1034160 - protein, 410 aa, Homo sapiens; identical to SEQ ID NO: 1034159

SEQ ID NO: 1034161 - protein, 384 aa, Homo sapiens
METSSPRPPRPSSNPGLSLDARLGVDTRLWAKVLFTALYALIWALGAAGNALSVHVVLKARAGRAGRLRHHVLSLALAGLLLLLVGVPVELYSFVWFHYPWVFGDLGCLAVCQPLRARSLLTPRRTRWLVALSWAASLGLALPMAVIMGQKHELETADGEPEPASRVCTVLVSRTALQVFIQVNVLVSFVLPLALTAFLNGVTVSHLLALCSQVPSTSTPGSSTPSRLELLSEEGLLSFIVWKKTFIQGGQVSLVRHKDVRRIRSLQRSVQVLRAIVVMYVICWLPYHARRLMYCYVPDDAWTDPLYNFYHYFYMVTNTLFYVSSAVTPLLYNAVSSSFRKLFLEAVSSLCGEHHPMKRLPPKPQSPTLMDTASGFGDPPETRT

SEQ ID NO: 1034162 - protein, 246 aa, Homo sapiens
MDPGDPAGDPAAGERHRMGRDPLLLLQALQTLWSTRERKQLREEAWRGFAALDDPLAGLLDMLESCRGQRGEGPSLAAWISHQLQCWLQAQPCPSLAQHSLRLKQLQARAVKVLTESPPSLAAPLASIFQLQDADRSCLLAHVHRLHHEGRFREAATLGATLKLQSELGVEKMSIPLLLQDKVALVERYVAGFPDLQRRLLVLMDSWCQPGFDIKDVASCHVTAAGAAASGEERLGLAGAQPSSPE

SEQ ID NO: 1034163 - protein, 334 aa, Homo sapiens
  misc_feature (303)..(303): Xaa can be any naturally occurring amino acid
  misc_feature (324)..(324): Xaa can be any naturally occurring amino acid
MDPGDPAGDPAAGERHRMGRDPLLLLQALQTLWSTRERKQLREEAWRGFAALDDPLAGLLDMLESCRGQRGEGPSLAAWISHQLQCWLQAQPCPSLAQHSLRLKQLQARAVKVLTESPPSLAAPLASIFQLQDADRSCLLAHVHRLHHEGRFREAATLGATLKLQSELGVEKMSIPLLLQDKVALVERYVAGFPDLQRRLLVLMDSWCQPGFDIKDVARQYPEVTSLSLEKLSPKALSRQVLRLQERYGVPQRCVPTRPFSSAWRPCGTCATSGFVGEEPVTGELDRPCADGSVRATRTNPAXCLWGRVGAESHREVQAPGRGXKRKAGPPPRA

SEQ ID NO: 1034164 - protein, 252 aa, Homo sapiens
MFSKCNTPASRAPGTASAPPGTLMALPGTDTAPPPRTASVPPGTASAPPGTLMALPGTDTAPPPRTASVPPGTASAPPGTLMALPGTDTAPRQNRHGARWNTNGPPWNSLGAPWNTNGPPWNRHGAPPQNSLDAPWNSLGAPWNSLGAPWNSLVLLEQTQPPQNRHSTPWNSLALPGMATSPHPFCAALGICPYVVRVQLCQQGQLHKRPQLSPPQWAPLLRLWVSFFPGGVLAPVLAPPRCLDTCPCHPGH

SEQ ID NO: 1034165 - protein, 219 aa, Homo sapiens
MDPGDPAGDPAAGERHRMGRDPLLLLQALQTLWSTRERKQLREEAWRGFAALDDPLAGLLDMLESCRGQRGEGPSLAAWISHQLQCWLQAQPCPSLAQHSLRLKQLQARAVKVLTESPPSLAAPLASIFQLQDADRSCLLAHVHRLHHEGRFREAATLGATLKLQSELGVEKMSIPLLLQDKVALVERYVAGFPDLQRRLLVLMDSWCQPGFDIKDVAR

SEQ ID NO: 1034166 - protein, 36 aa, Homo sapiens
MGVGREDTGPLKGAHGSIVFYFKQHTKIQKAIVQIK

SEQ ID NO: 1034167 - protein, 97 aa, Homo sapiens
ANEQEDGRSQRRGRSSGSGQGDEQVGLGCKIMPIADILIPSSGLLHVSLSLAQAGPSEMLCSGRCFWSGVSSSPPYPQVLLRQPTEVATIKDPVLHL

SEQ ID NO: 1034168 - protein, 81 aa, Homo sapiens
LDSNASGMENHPQCCRATSFSIIYPPGFRRKNFVPSAIFTGQGLALPPHSQHTALCILQFLKSGNSPVVLESNLPLSTIFV

SEQ ID NO: 1034169 - protein, 83 aa, Homo sapiens
YLSAPEEFEPLRTDEGPGTYPGSTKKIKQTPQIDYTRGSIISQCRRAPYWTWRKHSGFQNFAIQNSPFSGFICFCVSWEKMML

SEQ ID NO: 1034170 - protein, 83 aa, Homo sapiens; identical to SEQ ID NO: 1034169

SEQ ID NO: 1034171 - protein, 96 aa, Homo sapiens
ERVPCRHDDVFFPPSASFRVGSALALAPGVRSISALGRTFTRDEDLAVLPRPPGPYASTGRALSAGPEDCADPSGCVCGNAERSRGSAGPAPPLGG

SEQ ID NO: 1034172 - protein, 113 aa, Homo sapiens
STSKALGPPGAFNGNCETKLSVVPKGLGLEGSQEQPPGPDPLVGPFPPKEPPPPPVPGPPVSPPAPRPATPSLPPPPQPQPFLSPPPNSVFKLFKLWLGSGRVQGALGPGFVF

SEQ ID NO: 1034173 - protein, 186 aa, Homo sapiens
  misc_feature (8)..(8): Xaa can be any naturally occurring amino acid
  misc_feature (25)..(25): Xaa can be any naturally occurring amino acid
EDLTDLHXTIEGPEGPQMLEVFPHXTPAGEGLPRLPTPGPPPEPDPPPERGGQHGETCANVPKRDWTAELGTRHVLLTIKCPPDPTLTPSLHSTRRRAACSWRTTRSMQLGPVCSQRSTGAPAGPTAGPKTGRALASGTEASSTDPGAPGGPGGAEGPMAKKHAGEPDKKLAAQKKTDKKRALRRL

SEQ ID NO: 1034174 - protein, 90 aa, Homo sapiens
TPPTLPLTGPYMERNSTAPADRLPCEARPTPAHPPGSPSPAPALPPGRHLFAGTELTDLAVGCILLAGSLLVLCGCLVLIVKLLNSVLRG

SEQ ID NO: 1034175 - protein, 352 aa, Homo sapiens
MPSSLPGSQVPHPTLDAVDLVEKTLRNEGTSSSAPVLEEGDTDPWTLPQLKDTSQPWKELRVAGRLRRVAGSVLKACGLLGSLYFFICSLDVLSSAFQLLGSKVAGDIFKDNVVLSNPVAGLVIGVLVTALVQSSSTSSSIVVSMVAAKLLTVRVSVPIIMGVNVGTSITSTLVSMAQSGDRDEFQRAFSGSAVHGIFNWLTVLVLLPLESATALLERLSELALGAASLTPRAQAPDILKVLTKPLTHLIVQLDSDMIMSSATGNATNSSLIKHWCGTTGQPTQENSSCGAFGPCTEKNSTAPADRLPCRHLFAGTELTDLAVGCILLAGSLLVLCGCLVLIVKLLNSVLRG

SEQ ID NO: 1034176 - protein, 352 aa, Homo sapiens; identical to SEQ ID NO: 1034175

SEQ ID NO: 1034177 - protein, 69 aa, Homo sapiens
PSPRPIADIATVKGRKPEAHSQEQGHPQTGCECEDGPDGEEMDPPNPEEVKTPEEGEKQITVLKEDTLK

SEQ ID NO: 1034178 - protein, 145 aa, Homo sapiens
  misc_feature (16)..(16): Xaa can be any naturally occurring amino acid
TWCSRTISPRPLHPCXWRLDQAQQRARILLFRPPQSAADAVQGLDSNPLPSFCLGPVSWGGTRMNWSAAYAIALDRTFATGRAGLCPMCPVTPLSMCVGVAHVQVCPLCRDLGFNVFCCPALLCCGELAARGKGCEPAAIKLTST

SEQ ID NO: 1034179 - protein, 145 aa, Homo sapiens
ASGPRRGVQEGDGEWGGSAIRALDAPVLAPPNLDLAGNLPQRNSECRRPPPPPVPLRVPPPAESQALLPSPTSAAGQERAGEGDSVKRGPGEGRGRRTRGGEEGAGGAGAPGAPVPSAKAASARDSKTSVMCHSPLLADCSWIKD

SEQ ID NO: 1034180 - protein, 75 aa, Homo sapiens
  misc_feature (2)..(2): Xaa can be any naturally occurring amino acid
  misc_feature (21)..(24): Xaa can be any naturally occurring amino acid
  misc_feature (26)..(26): Xaa can be any naturally occurring amino acid
  misc_feature (31)..(31): Xaa can be any naturally occurring amino acid
  misc_feature (36)..(36): Xaa can be any naturally occurring amino acid
  misc_feature (45)..(45): Xaa can be any naturally occurring amino acid
HXLQKHLAGLGLTEAIDKNKXXXXRXSGKKXFYLAXFHATAFELXTDGNPFDQDIYGREGGAAPSCSTPTTPSSS

SEQ ID NO: 1034181 - protein, 207 aa, Homo sapiens
MAEVGGVFASLDWDLHGFSSSLGNVPLADSPGFLNERLGQIEGKLQRGSPTDFAHLKGILRRRQLYCRTGFHLEIFPNGTVHGTRHDHSRFGILEFISLAVGLISIRGVDSGLYLGMNERGELYGSKKLTRECVFREQFEENWYNTYASTLYKHSDSERQYYVALNKDGSPREGYRTKRHQKFTHFLPRPVDPSKLPSMSRDLFHYR

SEQ ID NO: 1034182 - protein, 770 aa, Homo sapiens
MEKRAAAGLEGAPGARAQLAVVCLVNIFLTGRLSSAVPALAACSGKLEQHTERRGVIYSPAWPLNYPPGTNCSWYIQGDRGDMITISFRNFDVEESHQCSLDWLLLGPAAPPRQEAFRLCGSAIPPAFISARDHVWIFFHSDASSSGQAQGFRLSYIRGKLGQASCQADEFRCDNGKCLPGPWQCNTVDECGDGSDEGNCSAPASEPPGSLCPGGTFPCSGARSTRCLPVERRCDGLQDCGDGSDEAGCPDLACGRRLGSFYGSFASPDLFGAARGPSDLHCTWLVDTQDSRRVLLQLELRLGYDDYVQVYEGLGERGDRLLQTLSYRSNHRPVSLEAAQGRLTVAYHARARSAGHGFNATYQVKGYCLPWEQPCGSSSDSDGGSLGDQGCFSEPQRCDGWWHCASGRDEQGCPACPPDQYPCEGGSGLCYTPADRCNNQKSCPDGADEKNCFSCQPGTFHCGTNLCIFETWRCDGQEDCQDGSDEHGCLAAVPRKVITAALIGSLVCGLLLVIALGCAFKLYSLRTQEYRAFETQMTRLEAEFVRREAPPSYGQLIAQGLIPPVEDFPVYSASQASVLQNLRTAMRRQMRRHASRRGPSRRRLGRLWNRLFHRPRAPRGQIPLLTAARPSQTVLGDGFLQPAPGAAPDPPAPLMDTGSTRAAGDRPPSAPGRAPEVGPSGPPLPSGLRDPECRPVDKDRKVCREPLADGPAPADAPREPCSAQDPHPQVSTASSTLGPHSPEPLGVCRNPPPPCSPMLEASDDEALLVC

SEQ ID NO: 1034183 - protein, 31 aa, Homo sapiens
ASTKPDIYLFMCSASGGTDTQYFGPGTRLTV

SEQ ID NO: 1034184 - protein, 671 aa, Homo sapiens
MASVALEDVAVNFTREEWALLGPCQKNLYKDVMQETIRNLDCVVMKWKDQNIEDQYRYPRKNLRCRMLERFIESKDGTQCGETSSQIQDSIVTKNTLPGVGPCESSMRGEKVMGHSSLNCYIRVGAGHKPHEYHECGEKPDTHKQRGKAFSYHNSFQTHERLHTGKKPYDCKECGKSFSSLGNLQRHMAVQRGDGPYKCKLCGKAFFWPSLLHMHERTHTGEKPYECKQCSKAFSFYSSYLRHERTHTGEKPYECKQCSKAFPFYSSYLRHERTHTGEKPYKCKQCSKAFPDSSSCLIHERTHTGEKPYTCKQCGKAFSVSGSLQRHETTHSAEKPYACQQCGKAFHHLGSFQRHMIRHTGNGPHKCKICGKGFDCPSSLQSHERTHTGEKPYECKQCGKALSHRSSFRSHMIMHTGDGPHKCKVCGKAFVYPSVFQRHERTHTAEKPYKCKQCGKAYRISSSLRRHETTHTGEKPYKCTLGKAFIDFCSFQNHKTTHTGEKPYECKECGKAFSRFRYLSRHKRTHTGEKPYECKTCRKAFGHYDNLKVHERIHSGEKPYECKECGKAFSWLTCFLRHERIHMREKSYECPQCGKAFTHSRFLQGHEKTHTGENPYECKECGKAFASLSSLHRHKKTHWKKTHTGENPYECKECGKAFASLSSLHRHKKTH

SEQ ID NO: 1034185 - protein, 479 aa, Homo sapiens
MEKGLTLPQDCRDFVHSLKMRSKYALFLVFVVIVFVFIEKENKIISRVSDKLKQIPQALADANSTDPALILAENASLLSLSELDSAFSQLQSRLRNLSLQLGVEPAMEAAGEEEEEQRKEEEPPRPAVAGPRRHVLLMATTRTGSSFVGEFFNQQGNIFYLFEPLWHIERTVSFEPGGANAAGSALVYRDVLKQLFLCDLYVLEHFITPLPEDHLTQFMFRRGSSRSLCEDPVCTPFVKKVFEKYHCKNRRCGPLNVTLAAEACRRKEHMALKAVRIRQLEFLQPLAEDPRLDLRVIQLVRDPRAVLASRMVAFAGKYKTWKKWLDDEGQDGLREEEVQRLRGNCESIRLSAELGLRQPAWLRGRYMLVRYEDVARGPLQKAREMYPFAGIPLTPQVEDWIQKNTQAAHDGSGIYSTQKNSSEQFEKWRFSMPFKLAQVVQAPCGPAMRLFGYKLARDAAALTNRSVSLLEERGTFWVT

SEQ ID NO: 1034186 - protein, 1099 aa, Homo sapiens
MATVPVYCVCRLPYDVTRFMIECDACKDWFHGSCVGVEEEEAPDIDIYHCPNCEKTHGKSTLKKKRTWHKHGPGPTPDVKPVQNGSQLFIKELRSRTFPSAEDVVSRVPGSQLTVGYMEEHGFTEPILVPKKDGLGLAVPAPTFYVSDVENYVGPERSVDVTDVTKQKDCKMKLKEFVDYYYSTNRKRVLNVTNLEFSDTRMSSFVEPPDIVKKLSWVENYWPDDALLAKPKVTKYCLICVKDSYTDFHIDSGGASAWYHVLKGEKTFYLIRPASANISLYERWRSASNHSEMFFADQVDKCYKCIVKQGQTLFIPSGWIYATLTPVDCLAFAGHFLHSLSVEMQMRAYEVERRLKLGSLTQFPNFETACWYMGKHLLEAFKGSHKSGKQLPPHLVQGAKILNGAFRSWTKKQALAEHEDELPEHFKPSQLIKDLAKEIRLSENASKAVRPEVNTVASSDEVCDGDREKEEPPSPIEATPPQSLLEKVSKKKTPKTVKMPKPSKIPKPPKPPKPPRPPKTLKLKDGGKKKGKKSRESASPTIPNLDLLEAHTKEALTKMEPPKKGKATKSVLSVPNKDVVHMQNDVERLEIREQTKSKSEAKWKYKNSKPDSLLKMEEEQRLEKSPLAGNKDKFSFSFSNRKLLGSKALRPPSSPGVFGALQSFKEDKAKPVRDEYEYVSDDGELKIDEFPIRRKKSAPKRDLSFLLDKKEALLMPTSKPKLDSAVYKSDDSSDEGSLHIDTDTKPGRNAKVKKESGSSAAGILDLLQASEEVGALEYNPNSQPPASPSTQEAIQGMLSMANLQASDSCLQTTWGTGQAKGGSLAAHGARKIGGGNKGTGKRLLKRTAKNSVDLEDYEEQDHLDACFKDSDYVYPSLESDEDNPVFKSRSKKRKGSDDAPYSPTARVGPSVPRQDRPVREGTRVASIETGLAAAAAKLSQQEEQKNRKKKNTKRKPAPNTASPSISTSASASTGTTSASTTPASTTPASTTPASTTPASTSTASSQASQEGSSPEPPPESHSSSLADHEYTAAGTFSGSQAGRASQPMAPGVFLTQRRPSASSPNNTAAKGKRTKKGMATAKQRLGKILKIHRNGKLLL

SEQ ID NO: 1034187 - protein, 1098 aa, Homo sapiens
MATVPVYCVCRLPYDVTRFMIECDACKDWFHGSCVGVEEEEAPDIDIYHCPNCEKTHGKSTLKKKRTWHKHGPGPTPDVKPVQNGSQLFIKELRSRTFPSAEDVVSRVPGSQLTVGYMEEHGFTEPILVPKKDGLGLAVPAPTFYVSDVENYVGPERSVDVTDVTKQKDCKMKLKEFVDYYYSTNRKRVLNVTNLEFSDTRMSSFVEPPDIVKKLSWVENYWPDDALLAKPKVTKYCLICVKDSYTDFHIDSGGASAWYHVLKGEKTFYLIRPASANISLYERWRSASNHSEMFFADQVDKCYKCIVKQGQTLFIPSGWIYATLTPVDCLAFAGHFLHSLSVEMQMRAYEVERRLKLGSLTQFPNFETACWYMGKHLLEAFKGSHKSGKQLPPHLVQGAKILNGAFRSWTKKQALAEHEDELPEHFKPSQLIKDLAKEIRLSENASKAVRPEVNTVASSDEVCDGDREKEEPPSPIEATPPQSLLEKVSKKKTPKTVKMPKPSKIPKPPKPPKPPRPPKTLKLKDGGKKKGKKSRESASPTIPNLDLLEAHTKEALTKMEPPKKGKATKSVLSVPNKDVVHMQNDVERLEIREQTKSKSEAKWKYKNSKPDSLLKMEEEQRLEKSPLAGNKDKFSFSFSNRKLLGSKALRPPSSPGVFGALQSFKEDKAKPVRDEYEYVSDDGELKIDEFPIRRKKSAPKRDLSFLLDKKEALLMPTSKPKLDSAVYKSDDSSDEGSLHIDTDTKPGRNAKVKKESGSSAAGILDLLQASEEVGALEYNPNSQPPASPSTQEAIQGMLSMANLQASDSCLQTTWGTGQAKGGSLAAHGARKIGGGNKGTGKRLLKRTAKNSVDLEDYEEQDHLDACFKDSDYVYPSLESDEDNPVFKSRSKKRKGSDDAPYSPTARVGPSVPRQDRPVREGTRVASIETGLAAAAAKLSQQEEQKSKKKKSAKRKLTPNTTSPSTSTSISAGTTSASTTPASTTPASTTPASTTPASTSTASSQASQEGSSPEPPPESHSSSLADHEYTAAGTFTGVPGWPYLPAHGPWGLSHTEAAFRIVSKQTPLPKENVRKRAWRPPSRGLGKILKIHRNGKLLL

SEQ ID NO: 1034188 - protein, 295 aa, Homo sapiens
AGGGGRVAPNQEGWTGCGLQLEGAGPSFPTARVGPSVPRQDRPVREGTRVASIETGLAAAAAKLSQQEEQKSKKKKSAKRKLTPNTTSPSTSTSISAGTTSASTTPASTTPASTTPASTTPASTSTASSQASQEGSSPEPPPESHSSSLADHEYTAAGTFTGAQAGRTSQPMAPGVFLTQRRPSASSPNKHRCQRKTYEKGHGDRQAEAWENFENSSERETTPLRFGKPGSFCSAQDPRSPAKTSGSQEGAELAQPGRALPLPGGILPNKRLCLQRASEPSVAPQFENGRLFSSC

SEQ ID NO: 1034189 - protein, 31 aa, Homo sapiens
MLAGMVSISCPRDLPASGSQSAGITGVSHGP

SEQ ID NO: 1034190 - protein, 57 aa, Homo sapiens
MGTAVGPHHSPAPHDSALPARLLTSDFPYGRSCQIEQVKYSVPDTGLFQHWEGSIPT

SEQ ID NO: 1034191 - protein, 1026 aa, Homo sapiens
MMSFGGADALLGAPFAPLHGGGSLHYALARKGGAGGTRSAAGSSSGFHSWTRTSVSSVSASPSRFRGAGAASSTDSLDTLSNGPEGCMVAVATSRSEKEQLQALNDRFAGYIDKVRQLEAHNRSLEGEAAALRQQQAGRSAMGELYEREVREMRGAVLRLGAARGQLRLEQEHLLEDIAHVRQRLDDEARQREEAEAAARALARFAQEAEAARVDLQKKAQALQEECGYLRRHHQEEVGELLGQIQGSGAAQAQMQAETRDALKCDVTSALREIRAQLEGHAVQSTLQSEEWFRVRLDRLSEAAKVNTDAMRSAQEEITEYRRQLQARTTELEALKSTKDSLERQRSELEDRHQADIASYQEAIQQLDAELRNTKWEMAAQLREYQDLLNVKMALDIEIAAYRKLLEGEECRIGFGPIPFSLPEGLPKIPSVSTHIKVKSEEKIKVVEKSEKETVIVEEQTEETQVTEEVTEEEEKEAKEEEGKEEEGGEEEEAEGGEEETKSPPAEEAASPEKEAKSPVKEEAKSPAEAKSPEKEEAKSPAEVKSPEKAKSPAKEEAKSPPEAKSPEKEEAKSPAEVKSPEKAKSPAKEEAKSPAEAKSPEKAKSPVKEEAKSPAEAKSPVKEEAKSPAEVKSPEKAKSPTKEEAKSPEKAKSPEKAKSPEKEEAKSPEKAKSPVKAEAKSPEKAKSPVKAEAKSPEKAKSPVKEEAKSPEKAKSPVKEEAKSPEKAKSPVKEEAKTPEKAKSPVKEEAKSPEKAKSPEKAKTLDVKSPEAKTPAKEEARSPADKFPEKAKSPVKEEVKSPEKAKSPLKEDAKAPEKEIPKKEEVKSPVKEEEKPQEVKVKEPPKKAEEEKAPATPKTEEKKDSKKEEAPKKEAPKPKVEEKKEPAVEKPKESKVEAKKEEAEDKKKVPTPEKEAPAKVEVKEDAKPKEKTEVAKKEPDDAKAKEPSKPAEKKEAAPEKKDTKEEKAKKPEEKPKTEAKAKEDDKTLSKEPSKPKAEKAEKSSSTDQKDSKPPEKATEDKAAKGK

SEQ ID NO: 1034192 - protein, 977 aa, Homo sapiens
GTRAPSRPRAPAQAMMSFGGADALLGAPFAPLHGGGSLHYALARKGGAGGTRSAAGSSSGFHSWTRTSVSSVSASPSRFRGAGAASSTDSLDTLSNGPEGCMVAVATSRSEKEQLQALNDRFAGYIDKVRQLEAHNRSLEGEAAALRQQQAGRSAMGELYEREVREMRGAVLRLGAARGQLRLEQEHLLEDIAHVRQRLDDEARQREEAEAAARALARFAQEAEAARVDLQKKAQALQEECGYLRRHHQEEVGELLGQIQGSGAAQAQMQAETRDALKCDVTSALREIRAQLEGHAVQSTLQSEEWFRVRLDRLSEAAKVNTDAMRSAQEEITEYRRQLQARTTELEALKSTKDSLERQRSELEDRHQADIASYQEAIQQLDAELRNTKWEMAAQLREYQDLLNVKMALDIEIAAYRKLLEGEECRIGFGPIPFSLPEGLPKIPSVSTHIKVKSEEKIKVVEKSEKETVIVEEQTEETQVTEEVTEEEEKEAKEEEGKEEEGGEEEEAEGGEEETKSPPAEEAASPEKEAKSPVKEEAKSPAEAKSPEKEEAKSPAEVKSPEKAKSPAKEEAKSPPEAKSPEKEEAKSPAEVKSPEKAKSPAKEEAKSPAEAKSPEKAKSPVKEEAKSPAEAKSPVKEEAKSPAEVKSPEKAKSPTKEEAKSPEKAKSPEKAKSPEKEEAKSPEKAKSPVKAEAKSPEKAKSPVKAEAKSPEKAKSPVKEEAKSPEKAKSPVKEEAKSPEKAKSPVKEEAKTPEKAKSPVKEEAKAPEKEIPKKEEVKSPVKEEEKPQEVKVKEPPKKAEEEKAPATPKTEEKKDSKKEEAPKKEAPKPKVEEKKEPAVEKPKESKVEAKKEEAEDKKKVPTPEKEAPAKVEVKEDAKPKEKTEVAKKEPDDAKAKEPSKPAEKKEAAPEKKDTKEEKAKKPEEKPKTEAKAKEDDKTLSKEPSKPKAEKAEKSSSTDQKDSKPPEKATEDKAAKGK

SEQ ID NO: 1034193 - protein, 308 aa, Homo sapiens
MMSFGGADALLGAPFAPLHGGGSLHYALARKGGAGGTRSAAGSSSGFHSWTRTSVSSVSASPSRFRGAGAASSTDSLDTLSNGPEGCMVAVATSRSEKEQLQALNDRFAGYIDKVRQLEAHNRSLEGEAAALRQQQAGRSAMGELYEREVREMRGAVLRLGAARGQLRLEQEHLLEDIAHVRQRLDDEARQREEAEAAARALARFAQEAEAARVDLQKKAQALQEECGYLRRHHQEEVGELLGQIQGSGAAQAQMQAETRDALKCDVTSALREIRAQLEGHAVQSTLQSEEWFREEGTCCRKAQRIQS

SEQ ID NO: 1034194 - protein, 1048 aa, Homo sapiens
MSNKTGGKRPATTNSDIPNHNMVSEVPPERPSVRATRTARKAIAFGKRSHSMKRNPNAPVTKAGWLFKQASSGVKQWNKRWFVLVDRCLFYYKDEKEESILGSIPLLSFRVAAVQPSDNISRKHTFKAEHAGVRTYFFSAESPEEQEAWIQAMGEAARVQIPPAQKSVPQAVRHSHEKPDSENVPPSKHHQQPPHNSLPKPEPEAKTRGEGDGRGCEKAERRPERPEVKKEPPVKANGLPAGPEPASEPGSPYPEGPRVPGGGEQPAQPNGWQYHSPSRPGSTAFPSQDGETGGHRRSFPPRTNPDKIAQRKSSMNQLQQWVNLRRGVPPPEDLRSPSRFYPVSRRVPEYYGPYSSQYPDDYQYYPPGVRPESICSMPAYDRISPPWALEDKRHAFRNGGGPAYQLREWKEPASYGRQDATVWIPSPSRQPVYYDELDAASSSLRRLSLQPRSHSVPRSPSQGSYSRARIYSPVRSPSARFERLPPRSEDIYADPAAYVMRRSISSPKVPPYPEVFRDSLHTYKLNEQDTDKLLGKLCEQNKVVREQDRLVQQLRAEKESLESALMGTHQELEMFGSQPAYPEKLRHKKDSLQNQLINIRVELSQATTALTNSTIEYEHLESEVSALHDDLWEQLNLDTQNEVLNRQIQKEIWRIQDVMEGLRKNNPSRGTDTAKHRGGLGPSATYSSNSPASPLSSASLTSPLSPFSLVSGSQGSPTKPGSNEPKANYEQSKKDPHQTLPLDTPRDISLVPTRQEVEAEKQAALNKVGVVPPRTKSPTDDEVTPSAVVRRNASGLTNGLSSQERPKSAVFPGEGKVKMSVEEQIDRMRRHQSGSMKEKRRSLQLPASPAPDPSPRPAYKVVRRHRSIHEVDISNLEAALRAEEPGGHAYETPREEIARLRKMELEPQHYDVDINKELSTPDKVLIPERYIDLEPDTPLSPEELKEKQKKVERIKTLIAKSSMQNVVPIGEGDSVDVPQDSESQLQEQEKRIEISCALATEASRRGRMLSVQCATPSPPTSPASPAPPANPLSSESPRGADSSYTMRV

SEQ ID NO: 1034195 - protein, 1048 aa, Homo sapiens; identical to SEQ ID NO: 1034194

SEQ ID NO: 1034196 - protein, 1111 aa, Homo sapiens
MHLNLHIGILSPKDGPGCPSQKLLHPRGKLPWMTGFCMMETIIAIAANSMSCEDPNQLSCNICNSVVGRGCVSKDGAEITAFKVSAVQNEEAPELAVLTEKEEKTGWACLGSEASSKPYPKLQFHGKAQTFNAIFNLMVERFTLFSGAAQPVPSAMDVTGYLRKRRGENPFFHSNCPDPKGILGSLVTMDTTMNFIWILSRLILEASCYDFLFLFLGSTTLYSQLLLHLGQVSNCFPPESVFPSSEVVLKPGFPSGAWDPVYSCTSGPLTVGIDHSHEGITVIWQLQKAEPPHGAITPWDTHPDFSEAENLSSPLTALEFMARSKSTAFSPTYVLLLGGDYWDPSEKKHWVPELNSQPPGTFRRIQPNTGICAIIFLSSPPTPSLTTVVYGNDMNSISNVNQWGEPQLQERFLAESLNFWMKKTNKFCPMYLFLRPCLGTKNKILGHWRLMWDLMSACVCVCVCVCVSLSHTHKSSLLLLFPPSEASKYFLKSMLCGSSTVLISVFVSILKYPCLFHVNHWEGRGWQGRQICYKSMGRPYNEMFIGWYTVLSLELPTFQLIYPYSLSTKDKIEGFFFSLNVLPSGFPGLQDYSVPNLTISSLLLSETRVTLLRGITPYSGLRSNYFLKYSKKSRKREMVACCFSQTPHILTWDGIHIETLHLGKICLTEGDSVLQIKVKKISAGDLKNSLLPLFGEGGGIILITHLTQGISAEVTQITKLQFLIILYFCFPYSLALTKLKLRSRLHKPDPCDGMEKWAFAEGLLIEMDYYSQVLAHGSTEKAIVKNDLMNTVPQRPKPEDIAPYNPISLIFEEVLNQPDYGYMGPPGCMGACLLSLALEVSTAGPDPGKGGSNPEDVALKGGTYQNAKAAGTRRRLKIQPMYTRSFQFDGLVILLHDYTMEKFSVTRVVMEVSECSPGFSFLKAVVRKVWHKTSSISSLWELVRNENSQSHPRSAESETLMRGPGNPRFNEALLVILMHTKFNCFKGKALYSIGVPTLRGFGAQNKKVLGCHSDFNINFKVTFLMLPCVSVFPFMILTKKGMCAFGWKLGECLCLSYLNTTFREKPYALEITTWHTKGLQQGKAVGGLFQIALLPNYLYLFRADYVIGWKK

SEQ ID NO: 1034197 - protein, 1595 aa, Homo sapiens
MVPFGFPEFFRCDPAISPSLHAAAQISRGEFVRISGLDYVDSALLMGRDRDKPFKRRLKSESVETSLFRKLRTVKSEHETFKFTSELEESRLERGIRPWNCQRCFAHYDVQSILFNINEAMATRANVGKRKNITTGASAASQTQMPTGQTGNCESPLGSKEDLNSKENLDADEGDGKSNDLVLSCPYFRNETGGEGDRRIALSRANSSSFSSGESCSFESSLSSHCTNAGVSVLEVPRENQPIHREKVKRYIIEHIDLGAYYYRKFFYGKEHQNYFGIDENLGPVAVSIRREKVEDAKEKEGSQFNYRVAFRTSELTTLRGAILEDAIPSTARHGTARGLPLKEVLEYVIPELSIQCLRQASNSPKVSEQLLKLDEQGLSFQHKIGILYCKAGQSTEEEMYNNETAGPAFEEFLDLLGQRVRLKGFSKYRAQLDNKTDSTGTHSLYTTYKDYELMFHVSTLLPYMPNNRQQLLRKRHIGNDIVTIVFQEPGALPFTPKSIRSHFQHVFVIVKVHNPCTENVCYSVGVSRSKDVPPFGPPIPKGVTFPKSAVFRDFLLAKVINAENAAHKSEKFRAMATRTRQEYLKDLAENFVTTATVDTSVKFSFITLGAKKKEKVKPRKDAHLFSIGAIMWHVIARDFGQSADIECLLGISNEFIMLIEKDSKNVVFNCSCRDVIGWTSGLVSIKVFYEEKEKCVLLSSVDNCAEDIREIVQRLVIVTRGCETVEMTLRRNGLGQLGFHVNFEGIVADVEPFGFAWKAGLRQGSRLVEICKVAVATLTHEQMIDLLRTSVTVKVVIIQPHDDGSPRRGCSELCRIPMVEYKLDSEGTPCEYKTPFRRNTTWHQGAQLLPCSPSLELPPSPDTPDRLPCQQLLQQAQAAIPRSTSFDRKLPDGTRSSPSNQSSSSDPGPGGSGPWRPQVGYDGCQSPLLLEHQGSGPLECDGAREREDTMEASRHPETKWHGPPSKVLGSYKERALQKDGSCKDSPNKLSHIGDKSCSSHSSSNTLSSNTSSNSDDKHFGSGDLMDPELLGLTYIKGASTDSGIDTAPCMPATILGPVHLAGSRSLIHSRAEQWADAADVSGPDDEPAKLYSVHGYASAISAGSAAEGSMGDLSETILSFQWFITIQEALQLTVQKVDGSLDSSKVYIVSHSSGQQVPGSMSKPYHRQGAVNKYVIGWKKSEGSPPPEEPEVTECPGMYSEMDVMSTATQHQTVVGDAVAETQHVLSKEDFLKLMLPDSPLVEEGRRKFSFYGNLSPRRSLYRTLSDESICSNRRGSSFGSSRSSVLDQALPNDILFSTTPPYHSTLPPRAHPAPSMGSLRNEFWFSDGSLSDKSKCADPGLMPLPDTATGLDWTHLVDAARAFEGLDSDEELGLLCHHTSYLDQRVASFCTLTDMQHGQDLEGAQELPLCVDPGSGKEFMDTTGERSPSPLTGKVNQLELILRQLQTDLRKEKQDKAVLQAEVQHLRQDNMRLQEESQTATAQLRKFTEWFFTTIDKKSSANPHLIKGPLGNAPCPFEVTNMWFFCVLSTNRRCFCCSILCSTIHHSRIGSLDSFSVTTAESSADVKMNECNSWCEDECKPWRQLRPFSFRLC

SEQ ID NO: 1034198 - protein, 516 aa, Homo sapiens
MASDPIFTLAPPLHCHYGALPPNASGWEQPPNSSGVSVAGAALAASAASRVVTSTDPSCSGFAPPDFNHCLKDWDYNGLPVLTTNAIGQWDLVCDLGWQVILEQILFILGFASGYLFLGYPADRFGRRGIVLLTLGLVGPCGVGGAAAGSSTGIMTLRFLLGFLLAGVDLGVYLMRLELCDPTQRLRVALAGELVGVGGHFLFLGLALVSKDWRFLQRMITAPCILFLFYGWPGLFLESARWLIVKRQIEEAQSVLRILAERNRPHGQMLGEEAQEALQELENTCPLPTTSTFSFASLLNYRNIWKNLLILGFTNFIAHAIRHCYQPVGGGGSPSDFYLCSLLASGTAALACVFLGVTVDRFGRRGILLLSMTLTGIASLVLLGLWDYLNDAAITTFSVLGLFSSQASAILSTLLAAEVIPTTVRGRGLGLIMALGALGGLSCPAQRLHMGHGAFLQHVVLAACALLCILSIMLLPETKRKLLPEVLRDGELCRRPSLLRQPPPNRCDHVPLLATS

SEQ ID NO: 1034199 - protein, 180 aa, Homo sapiens
MAGAGPKRRALAAPVAEEKEEAREKIMAAKRADGAAPAGEGEGVTLQGNITLLKGVAVIVVAIMGSGIFVTPTGVLKEAGSPGLALVVWAACGVFSIVGALCYAELGTTISKSGGDYAYMLDVYGSLPAFLKLWIELLIIRPSSQYIVALVFATYLLKPLFPTCPVPEEAAKLVACHSVH

SEQ ID NO: 1034200 - protein, 537 aa, Homo sapiens
MERDSHGNASPARTPSAGASPAQASPAGTPPGRASPAQASPAQASPAGTPPGRASPAQASPAGTPPGRASPGRASPAQASPAQASPAQASPARASPALASLSRSSSGRSSSARSASVTTSPTRVYLVRATPVGAVPIRSSPARSAPATRATRESPVQFWQGHTGIRYKEQRESCPKHAVRCDGVVDCKLKSDELGCVRFDWDKSLLKIYSGSSHQWLPICSSNWNDSYSEKTCQQLGFESAHRTTEVAHRDFANSFSILRYNSTIQESLHRSECPSQRYISLQCSHCGLRAMTGRIVGGALASDSKWPWQVSLHFGTTHICGGTLIDAQWVLTAAHCFFVTREKVLEGWKVYAGTSNLHQLPEAASIAEIIINSNYTDEEDDYDIALMRLSKPLTLSAHIHPACLPMHGQTFSLNETCWITGFGKTRETDDKTSPFLREVQVNLIDFKKCNDYLVYDSYLTPRMMCAGDLRGGRDSCQGDSGGPLVCEQNNRWYLAGVTSWGTGCGQRNKPGVYTKVTEVLPWIYSKMESEVRFRKS

SEQ ID NO: 1034201 - protein, 102 aa, Homo sapiens
METVMTLEGGQKPVMESYTLLLSPPETQDEGWTLALSLALTYRLGPGSVLLAPRSPWRLQKPPPAGGLPHSQLPARQWGLLRQAGPKTVSPLGTYSPPTVTS

SEQ ID NO: 1034202 - protein, 219 aa, Homo sapiens
MTSPPPVSSSITPTNTMTSMRTTTYWPTATNTLSPLTSSILSSTPVPSTEMITSHTTNTTPLSTLVTTLLTTITRSTPTSETTYPTSPTSIVSDSTTEITYSTSITGTLSTATTLPPTSSSLPTTETATMTPTTTLITTTPNTTSHSTPSFTSSTIYSTVSTSTTAISSASPTSGTMVTSHNHDPIFSEYRHPFHKQERDKITFCGLCRFPDYSDRPQI

SEQ ID NO: 1034203 - protein, 562 aa, Homo sapiens
MTSPPPVSSSITPTNTMTSMRTTTYWPTATNTLSPLTSSILSSTPVPSTEMITSHTTNTTPLSTLVTTLLTTITRSTPTSETTYPTSPTSIVSDSTTEITYSTSITGTLSTATTLPPTSSSLPTTETATMTPTTTLITTTPNTTSHSTPSFTSSTIYSTVSTSTTAISSASPTSGTMVTSTTMTPSSLSTDTPFTTPTTITYPSVGSTGFLTTATDLTSTFTVSSSSAMSTSDIPSSPSIQNTETSSLVSMTSATIPSVRPTITSTDSTLTSSLLTTFPSTYSFSSSMSASSAGTTHTETISSLPASTNTIHTTAESALAPTTTTSFTTSPTMEPPSTTVATTSTGQTTFPSSTATFLETTTLTPTTDFSEETLTTAMTSTPPITSSITPTNTVTSMRTMTSWPTATNTLSSLTSSILSSTPVPSTEVTTSHTTNINPVSTLVTTLPITITRSTPTSETTYPSSSTSTVTESTTEITYSTTMTETSSSATSLPPTSSLVSTTETAKTPTTNLVTTTTKTTSHSTTSFTSSTVYSTASTHTTAITSVPTTLGTMVTSTSRIPS

SEQ ID NO: 1034204 - protein, 1728 aa, Homo sapiens
MDIYDTQTLGVVVFGGFMVVSAIGIFLVSTFSMKETSYEEALANQRKEMAKTHHQKVEKKKKEKTVEKKGKTKKKEEKPNGKIPDHDPAPNVTVLLREPVRAPAVAVAPTPVQPPIIVAPVATVPAMPQEKLASSPKDKKKKEKKVAKVEPAVSSVVNSIQVLTSKAAILETAPKEVPMVVVPPVGAKGNTPATGTTQGKKAEGTQNQSKKAEGAPNQGRKAEGTPNQGKKTEGTPNQGKKAEGTPNQGKKAEGTPNQGKKAEGAQNQGKKVDTTPNQGKKVEGAPTQGRKAEGAQNQAKKVEGAQNQGKKAEGAQNQGKKAEGAQNQGKKAEGAQNQGKKAEGAQNQGKKAEEAQKQGKKAEGAQIQGKKDEGAQNQGKKAEGAQNQGKKVEGAQNQGKKAEGAQNQGKKDEGAQTQGKKAEGAQTQGKKAEGAQNQGKKAEGAQNQDKKAEGAQNQGKKAEGAQNQGKKAEGAQNQGKKAEGAQNQGKKAEGAQNQGKKAEGAQNQGKKAEGAQNQGKKAEGAQNQGKKAEGAQNQGKKAEGAQNQGKKAEGAQNQGKKAEGAQNQGKKAEGAQNQGKKAEGAQNQGKKAEGAQNQGKKAEGAQNQGKKAEGAQNQGKKVEGAQNQGKKAEGAQNQGKKAEGAQNQGKKAEGAQNQGQKGEGAQNQGKKTEGAQGKKAERSPNQGKKGEGAPIQGKKADSVANQGTKVEGITNQGKKAEGSPSEGKKAEGSPNQGKKADAAANQGKKTESASVQGRNTDVAQSPEAPKQEAPAKKKSGSKKKGEPGPPDADGPLYLPYKTLVSTVGSMVFNEGEAQRLIEILSEKAGIIQDTWHKATQKGDPVAILKRQLEEKEKLLATEQEDAAVAKSKLRELNKEMAAEKAKAAAGEAKVKKQLVAREQEITAVQARMQASYREHVKEVQQLQGKIRTLQEQLENGPNTQLARLQQENSILRDALNQATSQVESKQNAELAKLRQELSKVSKELVEKSEAVRQDEQQRKALEAKAAAFEKQVLQLQASHRESEEALQKRLDEVSRELCHTQSSHASLRADAEKAQEQQQQMAELHSKLQSSEAEVRSKCEELSGLHGQLQEARAENSQLTERIRSIEALLEAGQARDAQDVQASQAEADQQQTRLKELESQVSGLEKEAIELREAVEQQKVKNNDLREKNWKAMEALATAEQACKEKLHSLTQAKEESEKQLCLIEAQTMEALLALLPELSVLAQQNYTEWLQDLKEKGPTLLKHPPAPAEPSSDLASKLREAEETQSTLQAECDQYRSILAETEGMLRDLQKSVEEEEQVWRAKVGAAEEELQKSRVTVKHLEEIVEKLKGELESSDQVREHTLHLEAELEKHMAAASAECQNYAKEVAGLRQLLLESQSQLDAAKSEAQKQSDELALVRQQLSEMKSHVEDGDIAGAPASSPEAPPAEQDPVQLKTQLEWTEAILEDEQTQRQKLTAEFEEAQTSACRLQEELEKLRTAGPLESSETEEASQLKERLEKEKKLTSDLGRAATRLQELLKTTQEQLAREKDTVKKLQEQLEKAEDGSSSKEGTSVCVSSLEKEVTVQLTKMPYTFLTNKPTNLHSVIQAQLPGTPREAMRDKSLRATEVDLPEPQFVNEPVSHLINTILGAAPGHRRVTPKPWLTLTAPWVCGRPGALGSVCQCNRLVFFQWGGAGSGWDRAASSQRLWGRLEATAPHPRRCQPELTCDLLGVDAIKTNVGAR

SEQ ID NO: 1034205 - protein, 1695 aa, Homo sapiens
MDIYDTQTLGVVVFGGFMVVSAIGIFLVSTFSMKETSYEEALANQRKEMAKTHHQKVEKKKKEKTVEKKGKTKKKEEKPNGKIPDHDPAPNVTVLLREPVRAPAVAVAPTPVQPPIIVAPVATVPAMPQEKLASSPKDKKKKEKKVAKVEPAVSSVVNSIQVLTSKAAILETAPKEVPMVVVPPVGAKGNTPATGTTQGKKAEGTQNQSKKAEGAPNQGRKAEGTPNQGKKTEGTPNQGKKAEGTPNQGKKAEGTPNQGKKAEGAQNQGKKVDTTPNQGKKVEGAPTQGRKAEGAQNQAKKVEGAQNQGKKAEGAQNQGKKAEGAQNQGKKAEGAQNQGKKAEGAQNQGKKAEEAQKQGKKAEGAQIQGKKDEGAQTQGKKAEGAQNQGKKDEGAQTQGKKAEGAQTQGKKAEGAQNQGKKAEGAQNQDKKAEGAQNQGKKAEGAQNQGKKAEGAQNQGKKAEGAQNQGKKAEGAQNQGKKAEGAQNQGKKAEGAQNQGKKAEGAQNQGKKAEGAQNQGKKAEGAQNQGKKAEGAQNQGKKAEGAQNQGKKAEGAQNQGKKAEGAQNQGKKAEGAQNQGKKAEGAQNQGKKAEGAQNQGKKVEGAQNQGKKAEGAQNQGKKAEGAQNQGKKAEGAQNQGQKGEGAQNQGKKTEGAQGKKAERSPNQGKKGEGAPIQGKKADSVANQGTKVEGITNQGKKAEGSPSEGKKAEGSPNQGKKADAAANQGKKTESASVQGRNTDVAQSPEAPKQEAPAKKKSGSKKKGEPGPPDADGPLYLPYKTLVSTVGSMVFNEGEAQRLIEILSEKAGIIQDTWHKATQKGDPVAILKRQLEEKEKLLATEQEDAAVAKSKLRELNKEMAAEKAKAAAGEAKVKKQLVAREQEITAVQARMQASYREHVKEVQQLQGKIRTLQEQLENGPNTQLARLQQENSILRDALNQATSQVESKQNAELAKLRQELSKVSKELVEKSEAVRQDEQQRKALEAKAAAFEKQVLQLQASHRESEEALQKRLDEVSRELCHTQSSHASLRADAEKAQEQQQQMAELHSKLQSSEAEVRSKCEELSGLHGQLQEARAENSQLTERIRSIEALLEAGQARDAQDVQASQAEADQQQTRLKELESQVSGLEKEAIELREAVEQQKVKNNDLREKNWKAMEALATAEQACKEKLHSLTQAKEESEKQLCLIEAQTMEALLALLPELSVLAQQNYTEWLQDLKEKGPTLLKHPPAPAEPSSDLASKLREAEETQSTLQAECDQYRSILAEEEEQVWRAKVGAAEEELQKSRVTVKHLEEIVEKLKGELESSDQVREHTLHLEAELEKHMAAASAECQNYAKEVAGLRQLLLESQSQLDAAKSEAQKQSDELALVRQQLSEMKSHVEDGDIAGAPASSPEAPPAEQDPVQLKTQLEWTEAILEDEQTQRQKLTAEFEEAQTSACRLQEELEKLRTAGPLESSETEEASQLKERLEKEKKLTSDLGRAATRLQELLKTTQEQLAREKDTVKKLQEQLEKAEDGSSSKEGTSVCVSSLEKEVTVQLTKMPYTFLTNKPTNLHSVIQAQLPGTPREAMRDKSLRATEVDLPEPQFVNEPVSHLINTILGAAPGHRRVTPKPWLTLTAPWVCGRPGALGSVCQCNRLVFFQWGGAGSGWDRAASSQRLWGRLEATAPHPRRCQPELTCDLLGVDAIKTNVGAR

SEQ ID NO: 1034206 - protein, 343 aa, Homo sapiens
MDPEHCAPFRVGPAPGPYVASGDEPPGPQGTPAAAPHLHPAPPRGPRLTRFPACGPLEPYLPEPAKPPAKYLQDLGPGPALNGGHFYEGPAEAEEKTSKAASFPQLPLDCRGGPRDGPSNLQGSPGPCLASLHLPLSPGLPDSMELAKNKSKKRRNRTTFSTFQLEELEKVFQKTHYPDVYAREQLALRTDLTEARVQVWFQNRRAKWRKRERYGKIQEGRNPFTAAYDISVLPRTDSHPQLQNSLWAGPGSGSPGGPCLVSPEGIPSPCMSPYSHPHGSVAGFMGVPAPSAAHPGIYSIHGFPPTLGGHSFEPSSDGDYKSPSLVSLRVKPKEPPGLLNWTT

SEQ ID NO: 1034207 - protein, 309 aa, Homo sapiens
EGRRMDLSGVKKKSLLGVKENNKKSSTRAPSPTKRKDRSDEKSKDRSKDKGATKESSEKDRGRDKTRKRGSASSGSSSTRSRSSSTSSSGSSTSTGSSSGSSSSSASSRSGSSSTSRSSSSSSSSGSPSPSRRRHDNRRRSRSKSKPPKRDEKERKRRSPSPKPTKVHIGRLTRNVTKDHIMEIFSTYGKIKMIDMPVERMHPHLSKGYAYVEFENPDEAEKALKHMDGGQIDGQEITATAVLAPWPRPPPRRFSPPRRMLPPPPMWRRSPPRMRRRSRSPRRRSPVRRRSRSPGRRRHRSRSSSNSSR

SEQ ID NO: 1034208 - protein, 305 aa, Homo sapiens
MDLSGVKKKSLLGVKENNKKSSTRAPSPTKRKDRSDEKSKDRSKDKGATKESSEKDRGRDKTRKRGSASSGSSSTRSRSSSTSSSGSSTSTGSSSGSSSSSASSRSGSSSTSRSSSSSSSSGSPSPSRRRHDNRRRSRSKSKPPKRDEKERKRRSPSPKPTKVHIGRLTRNVTKDHIMEIFSTYGKIKMIDMPVERMHPHLSKGYAYVEFENPDEAEKALKHMDGGQIDGQEITATAVLAPWPRPPPRRFSPPRRMLPPPPMWRRSPPRMRRRSRSPRRRSPVRRRSRSPGRRRHRSRSSSNSSR

SEQ ID NO: 1034209 - protein, 88 aa, Homo sapiens
IRHEATVVISKLRAIPSLLSTAPRLLHGSFLHNVAVAARFLRQPRWEAADHGDSALHGRQRPRDTDVHELAAFQGVLRVAMGDTSHSF

SEQ ID NO: 1034210 - protein, 88 aa, Homo sapiens; identical to SEQ ID NO: 1034209

SEQ ID NO: 1034211 - protein, 88 aa, Homo sapiens; identical to SEQ ID NO: 1034209

SEQ ID NO: 1034212 - protein, 30 aa, Homo sapiens
TFVLLGNSLYLGDTQDKLIFGKGTRVTVEP

SEQ ID NO: 1034213 - protein, 1702 aa, Homo sapiens
  misc_feature (1006)..(1006): Xaa can be any naturally occurring amino acid
  misc_feature (1082)..(1082): Xaa can be any naturally occurring amino acid
  misc_feature (1423)..(1423): Xaa can be any naturally occurring amino acid
AAAAAVNGASRAAEDDPPVSAETASTSGGGAPDRIGSLGRGACRPTSVQIDLSFLSPTTPQPLFSPAFLAEAMEDEERQKKLEAGKAKLAQFRQRKAQSDGQSPSKKQKKKRKTSSSKHDVSAHHDLNIDQSQCNEMYINSSQRVESTVIPESTIMRTLHSGEITSHEQGFSVELESEISTTADDCSSEVNGCSFVMRTGKPTNLLREEEFGVDDSYSEQGAQDSPTHLEMMESELAGKQHEIEELNRELEEMRVTYGTEGLQQLQEFEAAIKQRDGIITQLTANLQQARREKDETMREFLELTEQSQKLQIQFQQLQASETLRNSTHSSTAADLLQAKQQILTHQQQLEEQDHLLEDYQKKKEDFTMQISFLQEKIKVYEMEQDKKVENSNKEEIQEKETIIEELNTKIIEEEKKTLELKDKLTTADKLLGELQEQIVQKNQEIKNMKLELTNSKQKERQSSEEIKQLMGTVEELQKRNHKDSQFETDIVQRMEQETQRKLEQLRAELDEMYGQQIVQMKQELIRQHMAQMEEMKTRHKGEMENALRSYSNITVNEDQIKLMNVAINELNIKLQDTNSQKEKLKEELGLILEEKCALQRQLEDLVEELSFSREQIQRARQTIAEQESKLNEAHKSLSTVEDLKAEIVSASESRKELELKHEAEVTNYKIKLEMLEKEKNAVLDRMAESQEAELERLRTQLLFSHEEELSKLKEDLEIEHRINIEKLKDNLGIHYKQQIDGLQNEMSQKIETMQFEKDNLITKQNQLILEISKLKDLQQSLVNSKSEEMTLQINELQKEIEILRQEEKEKGTLEQEVQELQLKTELLEKQMKEKENDLQEKFAQLEAENSILKDEKKTLEDMLKIHTPVSQEERLIFLDSIKSKSKDSVWEKEIEILIEENEDLKQQCIQLNEEIEKQRNTFSFAEKNFEVNYQELQEEYACLLKVKDDLEDSKNKQELEYKSKLKALNEELHLQRINPTTVKMKSSVFDEDKTFVAETLEMGEVXEKDTTELMEKLEVTKREKLELSQRLSDLSEQLKPKPGEISFLNEEVKSLKPEKEPVSLRCRELEIIINHNRAENVXSCDTQVSSLLDGVVTMTSRGAEGSVSKVNKSFGEESKIMVEDKVSFENMTVGEESKQEQLILDHLPSVTKESSLRATQPSENDKLQKELNVLKSEQNDLRLQMEAQRICLSLVYSTHVDQVREYMENEKDKALCSLKEELIFAQEEKIKELQKIHQLELQTMKTQETGDEGKPLHLLIGKLQKAVSEECSYFLQTLCSVLGEYYTPALKCEVNAEDKENSGDYISENEDPELQDYRYEVQDFQENMHTLLNKVTEEYNKLLVLQTRLSKIWGQQTDGMKLEFGEENLPKEETEFLSIHSQMTNLEDIDVNHKSKLSSLQDLEKTKLEEQVQELESLISSLXQQLKETEQNYEAEIHCLQKRLQAVSESTVPPSLPVDSVVITESDAQRTMYPGSCVKKNIDGTIEFSGEFGVKEETNIVKLLEKQYQEQLEEEVAKVIVSMSIAFAQQTELSRISGGKENTASSKQAHAVCQQEQHYFNEMKLSQDQIGFQTFETVDVKFKEEFKPLSKELGEHGKEILLSNSDPHDIPESKDCVLTISEEMFSKDKTFIVRQSIHDEISVSSMDASRQLMLNEEQLEDMRQELVRQYQEHQQATELLRQAHMPQMERQREDQELATRRD

SEQ ID NO: 1034214 - protein, 1642 aa, Homo sapiens
  misc_feature (946)..(946): Xaa can be any naturally occurring amino acid
  misc_feature (1022)..(1022): Xaa can be any naturally occurring amino acid
  misc_feature (1363)..(1363): Xaa can be any naturally occurring amino acid
MEDEERQKKLEAGKAKIEELSLAFLVRQLAQFRQRKAQSDGQSPSKKQKKKRKTSSSKHDVSAHHDLNIDQSQCNEMYINSSQRVESTVIPESTIMRTLHSGEITSHEQGFSVELESEISTTADDCSSEVNGCSFVMRTGKPTNLLREEEFGVDDSYSEQGAQDSPTHLEMMESELAGKQHEIEELNRELEEMRVTYGTEGLQQLQEFEAAIKQRDGIITQLTANLQQARREKDETMREFLELTEQSQKLQIQFQQLQASETLRNSTHSSTAADLLQAKQQILTHQQQLEEQDHLLEDYQKKKEDFTMQISFLQEKIKVYEMEQDKKVENSNKEEIQEKETIIEELNTKIIEEEKKTLELKDKLTTADKLLGELQEQIVQKNQEIKNMKLELTNSKQKERQSSEEIKQLMGTVEELQKRNHKDSQFETDIVQRMEQETQRKLEQLRAELDEMYGQQIVQMKQELIRQHMAQMEEMKTRHKGEMENALRSYSNITVNEDQIKLMNVAINELNIKLQDTNSQKEKLKEELGLILEEKCALQRQLEDLVEELSFSREQIQRARQTIAEQESKLNEAHKSLSTVEDLKAEIVSASESRKELELKHEAEVTNYKIKLEMLEKEKNAVLDRMAESQEAELERLRTQLLFSHEEELSKLKEDLEIEHRINIEKLKDNLGIHYKQQIDGLQNEMSQKIETMQFEKDNLITKQNQLILEISKLKDLQQSLVNSKSEEMTLQINELQKEIEILRQEEKEKGTLEQEVQELQLKTELLEKQMKEKENDLQEKFAQLEAENSILKDEKKTLEDMLKIHTPVSQEERLIFLDSIKSKSKDSVWEKEIEILIEENEDLKQQCIQLNEEIEKQRNTFSFAEKNFEVNYQELQEEYACLLKVKDDLEDSKNKQELEYKSKLKALNEELHLQRINPTTVKMKSSVFDEDKTFVAETLEMGEVXEKDTTELMEKLEVTKREKLELSQRLSDLSEQLKPKPGEISFLNEEVKSLKPEKEPVSLRCRELEIIINHNRAENVXSCDTQVSSLLDGVVTMTSRGAEGSVSKVNKSFGEESKIMVEDKVSFENMTVGEESKQEQLILDHLPSVTKESSLRATQPSENDKLQKELNVLKSEQNDLRLQMEAQRICLSLVYSTHVDQVREYMENEKDKALCSLKEELIFAQEEKIKELQKIHQLELQTMKTQETGDEGKPLHLLIGKLQKAVSEECSYFLQTLCSVLGEYYTPALKCEVNAEDKENSGDYISENEDPELQDYRYEVQDFQENMHTLLNKVTEEYNKLLVLQTRLSKIWGQQTDGMKLEFGEENLPKEETEFLSIHSQMTNLEDIDVNHKSKLSSLQDLEKTKLEEQVQELESLISSLXQQLKETEQNYEAEIHCLQKRLQAVSESTVPPSLPVDSVVITESDAQRTMYPGSCVKKNIDGTIEFSGEFGVKEETNIVKLLEKQYQEQLEEEVAKVIVSMSIAFAQQTELSRISGGKENTASSKQAHAVCQQEQHYFNEMKLSQDQIGFQTFETVDVKFKEEFKPLSKELGEHGKEILLSNSDPHDIPESKDCVLTISEEMFSKDKTFIVRQSIHDEISVSSMDASRQLMLNEEQLEDMRQELVRQYQEHQQATELLRQAHMPQMERQREDQELATRRD

SEQ ID NO: 1034215 - protein, 252 aa, Homo sapiens
MAQLCGLRRSRAFLALLGSLLLSGVLAADRERSIHDFCLVSKVVGRCRASMPRWWYNVTDGSCQLFVYGGCDGNSNNYLTKEECLKKCATVTENATGDLATSRNAADSSVPSAPRRQDSEDHSSDMFNYEEYCTANAVTGPCRASFPRWYFDVERNSCNNFIYGGCRGNKNSYRSEEACMLRCFRQQENPPLPLGSKVVVLAGLFVMVLILFLGASMVYLIRVARRNQERALRTVWSSGDDKEQLVKNTYVL

SEQ ID NO: 1034216 - protein, 252 aa, Homo sapiens; identical to SEQ ID NO: 1034215

SEQ ID NO: 1034217 - protein, 252 aa, Homo sapiens; identical to SEQ ID NO: 1034215

SEQ ID NO: 1034218 - protein, 127 aa, Homo sapiens [sequence omitted]

SEQ ID NO: 1034219 - protein, 39 aa, Homo sapiens
VDTAVYYCARKNKYCTNGVCYRHFDYWGQGTLVTVSSGS

SEQ ID NO: 1034220 - protein, 32 aa, Homo sapiens
DSITMVRGIIILGGGHFDYWGQGTLVTVSSGS

SEQ ID NO: 1034221 - protein, 33 aa, Homo sapiens
VDTAVYYCARALTGYQYFDYWGQGTLVTVSSGS

SEQ ID NO: 1034222 - protein, 447 aa, Homo sapiens
MEEMLSFWDVAIDFSPEEKECLDPAQWDLYRDVMLENFSHLDFLGLAVAKPYLVTFLEQNQGSSGVKSQTSATIPPGTTGNEFNNHNEAIDHSSLSMQCQRIHTGEEPYYFEDCGKALSSQATLSVLQGHFIGDKPYKCRECHKTLSSRSSLLIHQKYHTDEKTYKCEKCGKGFFRSSDLQHHQKIHTGEKPYKCEECDKAFLHHSYLRKHQAVHTGEKPYKCEECGNSFYYPAMLKQHQRIHSGEKLDKCEECGKVFSSAFFLNQHKGIDSGEKRYKCQECGKSFCYRSYLREHYRMHSGEYPYKCEECGKGFSRSSKLQEHQTIHTGVKPYKCEECGKCFSSFTSLKRHQIIHSEDTPHECVECGKRFSSSSRLQEHQKIHTEEKPYKCEECDKAFLYHSFLRRHKAVHTREKPYMCEKCRKCFSSFTSLKRHQIHSIDISHECV

SEQ ID NO: 1034223 - protein, 158 aa, Homo sapiens
MPALLPVASRLLVATPSLADHGLWKPFQTQPYAGLRIPGSGYVPGSVSAAFVTLPQREGRQGDRQAVVEKRLAACVNLIPQITSIYEWKGKIEEDSEVLMMIKTQSSLVPALTDFVRSVHPYEVAEVIALPVEQGNFPYLQWVRQVTESVSDSITVLP

SEQ ID NO: 1034224 - protein, 186 aa, Homo sapiens
LLLLSHGARCFLITWSVTQASLLLSFVWMPALLPVASRLLVATPSLADHGLWKPFQTQPYAGLRIPGSGYVPGSVSAAFVTLPQREGRQGDRQAVVEKRLAACVNLIPQITSIYEWKGKIEEDSEVLMMIKTQSSLVPALTDFVRSVHPYEVAEVIALPVEQGNFPYLQWVRQVTESVSDSITVLP

SEQ ID NO: 1034225 - protein, 85 aa, Homo sapiens [sequence omitted]

SEQ ID NO: 1034226 - protein, 34 aa, Homo sapiens
EKTTEGQEKEESKKDRKEGKEKDKDKEKSDVKKE

SEQ ID NO: 1034227 - protein, 249 aa, Homo sapiens
MQILDGITDALHDLGCFSFCECLVSSILNSAKEFSTVQTFHDNQHALHPCVQILVHIHDQYDVRALGGPPVQLHLPAGLGAVLKHFEGEFLLGPLVEDLQNFAVDAQPQDLAGDLVVIDDGVLLDLQAGLDVELRELLRGRRRRLRRGVRQGRGRGLRRRGRGGERHRRALALGVGQHGARGRRGTGGGARGRPLLRLRAPSPPPPDGLRSSLRAGAGFPDPARLQARRVAGLRGSHRAPLAPTGPAPP

SEQ ID NO: 1034228 - protein, 164 aa, Homo sapiens
DHRHRERRDLDQARRRECALRPVGETPHFRAQEPHPPHEADIARRALEIQPDADRDGQHRERERQHLALVDGISAAVNVHSPACPAQCFGSANQRRLRDGARSAVIVLIDPLSTRRRTRIRERHRHACRGRRAAPAQHVARDPHVLLGERLGGQVAVAQARGGR

SEQ ID NO: 1034229 - protein, 109 aa, Homo sapiens
  misc_feature (12)..(12): Xaa can be any naturally occurring amino acid
KYMTISGFQIEXTIDRETFGNLANSSLLVGNLFEVLPAYLAETLYYAMKGLEQIDHTLIRVMVPRSEIDLFNIRKEFRKNFATSLYSMIKGDTSGDYKKALLLLCGEDD

SEQ ID NO: 1034230 - protein, 109 aa, Homo sapiens; identical to SEQ ID NO: 1034229
  misc_feature (12)..(12): Xaa can be any naturally occurring amino acid

SEQ ID NO: 1034231 - protein, 313 aa, Homo sapiens
PGPPLRWCWFLIRLVLSGALPLAGAGSSSVSWSPGPSPSLVLVRHPSRALRGLHWCWHTAQQETNKTIAASASSVKQMAELLRSSCPQERLQQERPQLDRLKTQLSDAIQCYGVVQKKIAEKSRALLPMAQRGSKQSPQAPFAELADDEKVFNGSDNMWQGQEQALLPDITEEDLEAIRLREEAILQMEVRLAWASVLTLHAPHEAGNQRSQVQPACTICLPLTWRGWNEASMGLPILNHLSLASGPQGETGILEPIPFPLPGFPNRTASGQSGFCGVPPPRPLALFHPEGPGKRAPPTLTDLPPGPRGPAKL

SEQ ID NO: 1034232 - protein, 419 aa, Homo sapiens
VLVSRLSKHHQLLFGTGLLKAEPTRRYRVWSRILQAVNALGYCRRDVVDLKHKWRDLRAVVRRKLGDLRKAAMAPALVSGKPQALALTPVEQVVAKTFSCQALPSEGFSLEPPEATQVDPCNLQELFQEMSANVFRINSSVTSLERSLQSLGTPSDTQELRDSLHTAQQETNKTIAASASSVKQMAELLRSSCPQERLQQERPQLDRLKTQLSDAIQCYGVVQKKIAEKSRALLPMAQRGSKQSPQAPFAELADDEKVFNGSDNMWQGQEQALLPDITEEDLEAIRLREEAILQMEVRLAWASVLTLHAPHEAGNQRSQVQPACTICLPLTWRGWNEASMGLPILNHLSLASGPQGETGILEPIPFPLPGFPNRTASGQSGFCGVPPPRPLALFHPEGPGKRAPPTLTDLPPGPRGPAK

SEQ ID NO: 1034233 - protein, 290 aa, Homo sapiens
AAAAWTLPASCPPSPLLGAPGPLHPHLGPDAGGLMTLGTDVCGLSQVTGAWEAQIDAQDRLVAAEGPRLRPRSSPQRADGDSEGKSTILLNFWAWVVVVMGGVSANKICCHQQSPQAPFAELADDEKVFNGSDNMWQGQEQALLPDITEEDLEAIRLREEAILQMEVRLAWASVLTLHAPHEAGNQRSQVQPACTICLPLTWRGWNEASMGLPILNHLSLASGPQGETGILEPIPFPLPGFPNRTASGQSGFCGVPPPRPLALFHPEGPGKRAPPTLTDLPPGPRGPAKL

SEQ ID NO: 1034234 - protein, 113 aa, Homo sapiens
KKKNTAPPTPGAPPSRPSPAPPRARRSLPPHPAPSLSLSPPLPVLPPPRGSAAWGRRRGEKGRGGRGRRRPGGGGTVPREGGPGTRGAGGGGDSGREPGPSRGSPQLRRASRP

SEQ ID NO: 1034235 - protein, 72 aa, Homo sapiens
MTVIPPPRGSAAWGRRRGEKGRGGRGRRRPGGGGTVPREGGPGTRGAGGGGDSGREPGPSRGSPQLRRASRP

SEQ ID NO: 1034236 - protein, 112 aa, Homo sapiens
VYTVVDKMFLAGEIRKTSQTKVLKQLLMLQSLEWRAGEPPPGPGPFWNCLLAFPFQGRGQPNSPFLSCLGGRDPAGFGPQGRRLPPPAFGPWLWAKAPVCVPSNRAVVVLFH

SEQ ID NO: 1034237 - protein, 134 aa, Homo sapiens
PSRVAGVLGFAAIHNLYSMFDCDKKILPVLCGLTVDPEKSVRDQAFKAIRSFLSKLESVSEDPTQVEEVEKNVHAASSPGMGGTAARWAGWAVIGVSSLTSNLIRLVPTFAPPFIHSPWEMFTSMNKLPPLVKK

SEQ ID NO: 1034238 - protein, 134 aa, Homo sapiens
ATPIPHSLTLLIPSDAFVESGQISFIYLWPMPFPLFILIPFFFEETPVTKKQPPEAKTMPGTPIASPLLSRKKFPEKKKFFGLLGGQKTTKTSGGETGNVFGPKTAFKTKKKGAFGGSSLPFYILKEEINLAKK

SEQ ID NO: 1034239 - protein, 113 aa, Homo sapiens
MGKMGPSCNMKVHDEQLVISYSACHLVMFNAAKGAKVMNKTEKFLPSLMFILANGEDDKNCTSLSKRDTMDNGKIYGKAGCLPCLRRTYWTILLCTSRCVHEYIHKTMACGIL

SEQ ID NO: 1034240 - protein, 124 aa, Homo sapiens
QRSRWTPVIKDDMKTPVEDRLDRNLWPFVSDPGPQGQFPGRCQCPFWVIGPKNKAGVKARGGPRLFVYVMGGVAMSEMRAAYKVTRAPEGKWKVLIGSSHILTPTRFLDDLKALDKKLEDIALP

SEQ ID NO: 1034241 - protein, 161 aa, Homo sapiens
  misc_feature (13)..(13): Xaa can be any naturally occurring amino acid
  misc_feature (32)..(32): Xaa can be any naturally occurring amino acid
  misc_feature (38)..(38): Xaa can be any naturally occurring amino acid
  misc_feature (54)..(54): Xaa can be any naturally occurring amino acid
  misc_feature (59)..(59): Xaa can be any naturally occurring amino acid
  misc_feature (73)..(73): Xaa can be any naturally occurring amino acid
  misc_feature (77)..(77): Xaa can be any naturally occurring amino acid
  misc_feature (105)..(105): Xaa can be any naturally occurring amino acid
  misc_feature (109)..(109): Xaa can be any naturally occurring amino acid
PRVSEFASFRRRXKGMTGWARGGHCLRAHSRXPSLAPXRSLRARPGSRSRFFGXSAFRXAHPYATTADWAPPXLSLXSRRRRGDDGAGELDGRGRRPGCDARHRXRARXRLAPALSALAPLDDPPPRAVGGSRQWSVPDASSRRESRELADAKSLFLASTY

SEQ ID NO: 1034242 - protein, 123 aa, Homo sapiens
MRGLPYKATENDSYNFFSPLNPVRVHIEIGPDGRVTGEADVEFATHEEAVAALSKDRANMQHRYIELFLNSTTGASNGAYSSQVMQGMGVSAGPSTYSALESQSVSGCYGAGYSGQHSMGGYD

SEQ ID NO: 1034243 - protein, 71 aa, Homo sapiens
SIIRRGRPSPRGPGHLPWTNLCAEPNSRVAWEQSFPKIPRREMSVPWNKEVGAVWPPPPLGVDTCFLGWVG

SEQ ID NO: 1034244 - protein, 68 aa, Homo sapiens
LSGSAACVRFTVNDSQHTEALVNILESGQKPYSRQSDSATAGMPCGTEGSMPLDRGFLSVSHVFVQFS

SEQ ID NO: 1034245 - protein, 120 aa, Homo sapiens
DAHDATVQKALKREMERLLETHLHWITNSNLYLIERPRIRLDEMNRGSNEWKTVVGGAMFFIGFTALVIMWQKHYVYGPLPQSFDKEWVAKQTKRMLDMKVNPIQGLASKWDFEKNEWKK

SEQ ID NO: 1034246 - protein, 136 aa, Homo sapiens
  misc_feature (4)..(4): Xaa can be any naturally occurring amino acid
FAPXLYDRGDTPVPEVAHVKHLSASQKALKEKEKASWSSLSMDEKVELFALSSRRSFSEMNRGSNEWKTVVGGAMFFIGFTALVIMWQKHYVYGPLPQSFDKEWVAKQTKRMLDMKVNPIQGLASKWDFEKNEWKK

SEQ ID NO: 1034247 - protein, 169 aa, Homo sapiens
  misc_feature (4)..(4): Xaa can be any naturally occurring amino acid
  misc_feature (6)..(6): Xaa can be any naturally occurring amino acid
  misc_feature (9)..(11): Xaa can be any naturally occurring amino acid
  misc_feature (28)..(28): Xaa can be any naturally occurring amino acid
  misc_feature (32)..(32): Xaa can be any naturally occurring amino acid
  misc_feature (34)..(34): Xaa can be any naturally occurring amino acid
  misc_feature (36)..(36): Xaa can be any naturally occurring amino acid
  misc_feature (41)..(41): Xaa can be any naturally occurring amino acid
  misc_feature (46)..(46): Xaa can be any naturally occurring amino acid
  misc_feature (48)..(48): Xaa can be any naturally occurring amino acid
  misc_feature (54)..(54): Xaa can be any naturally occurring amino acid
  misc_feature (58)..(58): Xaa can be any naturally occurring amino acid
  misc_feature (63)..(63): Xaa can be any naturally occurring amino acid
MKPXHXERXXXDAVIELTQILKAQNDKXESIXQXVXRCLCXTEATXRXPPPVLXARTXHDLLXLSLKRTMCKEGLDIEQNHFKWTGNYVSGLNTSAHLKTVVEVDKANIKKAAMDLGLRKYEILTPVEEAPKGMLRGGTYHNKSFFTEDDKQDHLSWEWNLSIKKEWTE

SEQ ID NO: 1034248 - protein, 222 aa, Homo sapiens
LETTAKVLKQRVDSLTAKLQGAEAPDTVRDPAVGLLRSCPHSLPAAPTLATPTLATPACPGALGPNWGRGAPGEWVSMQPQPLLPPTYFLEGETLSWGPSWEQQQSVSPRAHCESKPRGFPEEGHVDVKPDKRLQRGVAPFQALSPSAGSSYAGPATLHPIWGSLGLEETPSVEGQILWRPAPPGAAVRATLRTGPGLAGRVAGASTENTFHCLALELGPTG

SEQ ID NO: 1034249 - protein, 137 aa, Homo sapiens
EVCLRLLSCCDGLGPPSRAPGCPGSEARCPLLQGFPEEGHVDVKPDKRLQRGVAPFQALSPSAGSSYAGPATLHPIWGSLGLEETPSVEGQILWRPAPPGAAVRATLRTGPGLAGRVAGASTENTFHCLALELGPTG

SEQ ID NO: 1034250 - protein, 199 aa, Homo sapiens
  misc_feature (11)..(11): Xaa can be any naturally occurring amino acid
  misc_feature (94)..(94): Xaa can be any naturally occurring amino acid
  misc_feature (105)..(105): Xaa can be any naturally occurring amino acid
  misc_feature (108)..(108): Xaa can be any naturally occurring amino acid
  misc_feature (111)..(111): Xaa can be any naturally occurring amino acid
  misc_feature (115)..(115): Xaa can be any naturally occurring amino acid
  misc_feature (119)..(120): Xaa can be any naturally occurring amino acid
  misc_feature (124)..(124): Xaa can be any naturally occurring amino acid
  misc_feature (127)..(127): Xaa can be any naturally occurring amino acid
  misc_feature (132)..(133): Xaa can be any naturally occurring amino acid
  misc_feature (135)..(135): Xaa can be any naturally occurring amino acid
  misc_feature (142)..(142): Xaa can be any naturally occurring amino acid
  misc_feature (145)..(145): Xaa can be any naturally occurring amino acid
  misc_feature (154)..(155): Xaa can be any naturally occurring amino acid
  misc_feature (157)..(158): Xaa can be any naturally occurring amino acid
  misc_feature (161)..(161): Xaa can be any naturally occurring amino acid
  misc_feature (164)..(164): Xaa can be any naturally occurring amino acid
  misc_feature (170)..(170): Xaa can be any naturally occurring amino acid
  misc_feature (172)..(173): Xaa can be any naturally occurring amino acid
  misc_feature (181)..(181): Xaa can be any naturally occurring amino acid
  misc_feature (183)..(183): Xaa can be any naturally occurring amino acid
  misc_feature (196)..(196): Xaa can be any naturally occurring amino acid
AWSLRRPGPGXPAHSGGVQTRENWIAYPLQSAEDGVATRLQIREESASCLAAEYWSQEPAMRFLRTECCFRAGSSISAQEKVIFPEDVSPKDQXPPSVWIPKTHXHQXRVXKHAXPMYXXTCPXDPXEIFGXXSXKRPIGYXPSXPPPPLGFFXXLXXSRXIAXAGVWWXNXXPSHPQSPXPXQPPPPVAGTTAHXTPA

SEQ ID NO: 1034251 - protein, 205 aa, Homo sapiens
LDQFFLSQNPKASSQPFHGCTDTYPWDRLYLSSLRCQIFPLQTGWKREPAQRHFFSKHDTRTSFDKEGPYCLLQGIGRRKDLERLWQRHTFLRWAPCEIELRQQGPLESSYQADFRPGPGLSGLPQHLIHFVQVQPSHTRTTYQQNFCCPSQGGHYGSYKVGPQAPVTDVLPDLPGIPRPKLLQHYLHAGVSECLNWSRALNKDS

SEQ ID NO: 1034252 - protein, 317 aa, Homo sapiens
VWLKGAGAPGPPGDAVAAAAASVASTRARRGERNEHTCEYWMPVSLPLPALQRHRAVASEKQLLPLHLGLALPAHVSTMETLSQDSLLECQICFNYYSPRRRPKWLDYKHTCCSVCLQQMRTSQKDVRCPWCRGVTKLPPGFSVSQLPDDPEVLAVIAIPHTSEHTRVFIKLPSKGCYMLPLPISKERALLPGDMGCRLLPGSQQKSVTVVTIPAEQQPLQGGAPQEAVEEEQDRRGVVKSSTGSGVCTVILGACVLDSLLGIVLHNMSCISKRFTVIILWLKRAAGKSLVGANLGVEQVDDEIPVRRWGATLTIWC

SEQ ID NO: 1034253 - protein, 72 aa, Homo sapiens
LLVECKVAQTTVENSLAIQKFKQYYYPRIQCSTSGCTPEEVKAGTPKDCTSLSTQHCPQQQKVETTHVSLDE

SEQ ID NO: 1034254 - protein, 25 aa, Homo sapiens
MGEDFSHSCEQLSASYVARDHKTTM

SEQ ID NO: 1034255 - protein, 474 aa, Homo sapiens
WCPSSTRYHVPHYLFSFSHGHYVDCVFSDELLDYHRDMHSVVYSLGAPPFVSSYRDLFLWSRCSYGRTTVLLKPLLLSASSSQFVVVLWSLLASPSSASLFSQAKVTSNVCRVSSQGVLRSESASSGFSVAHRTVDQDPRSLPGSHCVVLSEGDGRRAVFFSERDCYSRGWDKSLGAVPGGHGAAIPNPALETCASAELCCSPALMWSSCTLPLLAAPVCVLMSCCVMLLSAVAALCAVVLAAAMMPCCMCVGDPCDLCCTDLPCCCAPLCDLLLCPVWCCAPAAVLPCLDLYICAVADAGCCCTDVPLWTCCACLGCVSVPSVPSGADCASFSACSVLLLCWWMWRRDCCVVLCYNPLQPLAPINLTLRSLSQPNDDPWALGSVACWGMWYTLGLVAPRCGLNHPSGSRLPFGGLLLDDMWMCLLWAVLCVLPVVGNPPGWAFFFGTLWWFEPWRWRLFVLARTCALFGSEVL

SEQ ID NO: 1034256 - protein, 111 aa, Homo sapiens
GVHPFLGSFQGPTQPAPRPPWRRNDSKITGPVNLLEWEPGVLEGGTCSGTHCWPWGAENSGLCDSEVQVLPPATAVSRIGPTPGGSACSGYNKTKGLRCTSTVELSSWLLL

SEQ ID NO: 1034257 - protein, 132 aa, Homo sapiens
GVHPFLGSFQGPTQPAPRPPWRRNDSKITGPVNLLEWEPGVLEGGTCSGTHCWPWGAENSGLCDSEVQVLPPATAVSRIGPTPGGSARCNARSSISHAVNKGETPSALQRTSALPSLGWGNNASHGWSPGSQ

SEQ ID NO: 1034258 - protein, 261 aa, Homo sapiens
PSSPATEEPANLSRRLCWGLSVPASRMEEGERSPLLSQETAGQKPLSVHRPPTSGCLGPVPREDQAEAWGCSCCPPETKHQALSGTPKKGPAPSLSPGSSCVKYLIFLSNFPFSLLGLLALAIGLWGLAVKGSLGSDLGGPLPADPMLGLALGGLVVSAVSLAGCLGALCENTCLLRGFSGGILAFLVLEAVAGALVVALWGPLQDSLEHTLRVAIAHYQDDPDLRFLLDQVQLGLRCCGAASYQDWQQNLYCLSSLALPQ

SEQ ID NO: 1034259 - protein, 355 aa, Homo sapiens
MEEGERSPLLSQETAGQKPLSVHRPPTSGCLGPVPREDQAEAWGCSCCPPETKHQALSGTPKKGPAPSLSPGSSCVKYLIFLSNFPFSLLGLLALAIGLWGLAVKGSLGSDLGGPLPTDPMLGLALGGLVVSAASLAGCLGALCENTCLLRGFSGGILAFLVLEAVAGALVVALWGPLQDSLEHTLRVAIAHYQDDPDLRFLLDQVQLGLRCCGAASYQDWQQNLYFNCSSPGVQACSLPASCCIDPREDGASVNDQCGFGVLRLDADAAQRVVYLEGCGPPLRRWLRANLAASGGYAIAVVLLQGAELLLAARLLGALAARSGAAYGPGAHGEDRAGPQSPSPGAPPAAKPARG

SEQ ID NO: 1034260 - protein, 95 aa, Homo sapiens
MTAKSQVCLEASGRISILPLWSILWAVGTRALLLKAKVANSLSLFSSEVAKQECPMWCSDSVQAFMLGSVNVTLNSYEPIESPIPSFSSASPGHV

SEQ ID NO: 1034261 - protein, 141 aa, Homo sapiens
MTGPFPSERDQVRPDSQMRIQDTDNYTCLSRTVCWVLTNIKLLIQEPLEIFVIYCESRDITFHISDTEKEQICQRCFTVSCYLFKKTVLENYGKTHLEEGCAFSHQSMKYNLTFKLKCCSSKLIFPVLIPSFLVQGRRGKG

SEQ ID NO: 1034262 - protein, 165 aa, Homo sapiens
MTGPFPSERDQVRPDSQMRIQDTDNYTCLSRTVCWVLTNIKLLIQEPLEVNLFLSIPYCCPCYSLGVPVSCYYIFVIYCESRDITFHISDTEKEQICQRCFTVSCYLFKKTVLENYGKTHLEEGCAFSHQSMKYNLTFKLKCCSSKLIFPVLIPSFLVQGRRGKG

SEQ ID NO: 1034263 - protein, 101 aa, Homo sapiens
MLLFNCSYLSPQNPFPPAQRSEQDAALFSEQLLSPRPGRSWRRQSPKFEGAAKLGGGGRCWRLGPCPPPPPSSRPAPAAPRPPRIPLTYHVRGEGGGGGGR

SEQ ID NO: 1034264 - protein, 190 aa, Homo sapiens
MKTKFCTGGEAEPSPLGLLPLPLPQPPPPQPPADEQPEPRTRRRAYLWCKEFLPGAWRGLREDEFHISVIRGGLSNMLFQCSLLTPQPPLVMSLGKVLLRAVWKRIRTRRSCNTSREQKKATEDPRHPRRLKDHRYMEARKRRPYDDEQAPHAPHNHNANHHPGHTDHRYTRRRPKQPPKSHDKTRTPTK

SEQ ID NO: 1034265 - protein, 236 aa, Homo sapiens
MKTKFCTGGEAEPSPLGLLLSCGSGSAAPAPGVGQQRDAASDLESKQLGGQQPPLALPPPPPLPLPLPLPQPPPPQPPADEQPEPRTRRRAYLWCKEFLPGAWRGLREDEFHISVIRGGLSNMLFQCSLLTPQPPLVMSLGKVLLRAVWKRIRTRRSCNTSREQKKATEDPRHPRRLKDHRYMEARKRRPYDDEQAPHAPHNHNANHHPGHTDHRYTRRRPKQPPKSHDKTRTPTK

SEQ ID NO: 1034266 - protein, 78 aa, Homo sapiens
  misc_feature (9)..(9): Xaa can be any naturally occurring amino acid
NGNGKPRRXNESHRKEARKTQAGRGLGVVLKPRHVFSMWSLMPERPFALTFTQLFLLLKNLKYLKMSSLYERTLPRVL

SEQ ID NO: 1034267 - protein, 118 aa, Homo sapiens
AVCIFLMFDGPDIRGSSKVIFPGKSDQTVRTKRLLANFVETTEELSPQQRSWKERDIGNFTVIVHAVILFICKNCGWFTLTLEQELPMKEDGWSQMPGHSFWSSRELSVPADSSVKWG

SEQ ID NO: 1034268 - protein, 77 aa, Homo sapiens
PSQCTLLASAVRSADQNVSMVFHGLVAQCGRWLDLPAQPVNARMEESVVLWILSVFKIIEVFTVDSTQKNGRNDHPT

SEQ ID NO: 1034269 - protein, 235 aa, Homo sapiens
  misc_feature (16)..(16): Xaa can be any naturally occurring amino acid
RGTGGPQQRAAHRDHXSHARRHEECALRTHTWWNDSACINLAGGFDCLCPSGPSCSGDCPHEGGLKHNGQVWTLKEDRCSVCSCKDGKIFCRRTACDCQNPSADLFCCPECDTRVTSQCLDQNGHKLYRSGDNWTHSCQQCRCLEGEVDCWPLTCPNLSCEYTAILEGECCPRCVSDPCLADNITYDIRKTCLDSYGVSRLSGPVWTMAGSPCTTCKCKNGRVCCSVDFECLQNN

SEQ ID NO: 1034270 - protein, 106 aa, Homo sapiens
  misc_feature (4)..(4): Xaa can be any naturally occurring amino acid
STGXEMKMPALLDPGGMECGVWAQWLVQAWAGQTCPGVSGHCGRRTRGQQVPPGEERRARLSCISGLQGELGEVTETLPHPQPVSICGSLGKLPHLSEPRMRSFQD

SEQ ID NO: 1034271 - protein, 124 aa, Homo sapiens
TGDNKGWSGPKPGFPEPTNNTPKGILHLSPDVYQEMEASRHKVISGTTLGYLSPKDMNQPSSSFFSISPTSNSSATIARELLMNGTSSTAEAIGLKGSSPTPPCSPVQPSKQLEYLARIQGFQV

SEQ ID NO: 1034272 - protein, 162 aa, Homo sapiens
TGDNKGWSGPKPGFPEPTNNTPKGILHLSPDVYQEMEASRHKVISGTTLGYLSPKDMNQPSSSFFSISPTSNSSATIARELLMNGTSSTAEAIGLKGSSPTPPCSPVQPSKQLEYLARIQGFQVHYCDRQSGKECVTCLTLAPVQMTFHAIGSSIEASHDQV

SEQ ID NO: 1034273 - protein, 124 aa, Homo sapiens; identical to SEQ ID NO: 1034271

SEQ ID NO: 1034274 - protein, 124 aa, Homo sapiens; identical to SEQ ID NO: 1034271

SEQ ID NO: 1034275 - protein, 158 aa, Homo sapiens
MVIDGLERAKETPGLNPGLPHGSAAEFFLEAVWCVTQQGPCVGQQEGGVGGLSRRGTMRAFHEPSQALLHHGRPGPPSRPGDAQGAGRGSGGRTQGSEAGTGAGEPGQGRGAPIKAGRAAAGGPGGYKLLCALHKPESPTREDVCEEPETLNPIKREK

SEQ ID NO: 1034276 - protein, 129 aa, Homo sapiens
  misc_feature (113)..(113): Xaa can be any naturally occurring amino acid
MKHTHPQKQRGVGGPAVDRSLSGQARGVGAGEDSDDVHRPKAVTSISLKCLKVGMGRRLGPAGPHHGHARQSASSPALQRWPRRLPRRMTRLQKSDVLPSLAQSLLRAAGPKXAEANALPPQKTLELVS

SEQ ID NO: 1034277 - protein, 99 aa, Homo sapiens
SPPWPETFRRKQKDEKASLARPISPPTPQSYTFINSQACSQAWAYVAGERLLPYEMVEDRKLLNETSVTRLPLPNPGDPFKRRGLCSALGQKGSACQPQ

SEQ ID NO: 1034278 - protein, 127 aa, Homo sapiens
  misc_feature (11)..(11): Xaa can be any naturally occurring amino acid
  misc_feature (13)..(13): Xaa can be any naturally occurring amino acid
VGCGVTWFYPXLXRLRNISTKPDALSSYLQTSRPLAKNPLKFWDNVRWYPDLFNDYSVKVLIGLSSIFLSWWTRFRGKARNSMILFKTCQNRRERENISYPCDQQCEENRGYADFRRDLQSFMFIGI

SEQ ID NO: 1034279 - protein, 190 aa, Homo sapiens
MAFVKSGWLLRQSTIFEALEEELVVILWSDGHLIYYDDQTRQNIEDKVHMPMDCINILQGQECRDTQPPDGNVTNDCMLQIVCRDGENNESLGRKRTSSDVLWSGKFYHFQNPRTNTAYVGSAVMPDETSVVSSPPPYTAYAVHRPLRVGRTLSLQQAYGYWAITVVRTRQELKLSTLLNGQAYAVPNST

SEQ ID NO: 1034280 - protein, 145 aa, Homo sapiens
RSGGMSGRRGRGVRGEPGHAGHVSIILPVHNAEPWLDECLRSVLQQDFEGTMELSVFNDASKDKSGAIIEKWRVKLEDSGVHVIIGGHDSPSPRGVGYAKNQAVAQSSGSYLCFLDSDDVMMPQRWRLQHEAAVSAPVEHHWFAE

SEQ ID NO: 1034281 - protein, 138 aa, Homo sapiens
  misc_feature (130)..(130): Xaa can be any naturally occurring amino acid
MTFPTARGHKSMIQHYRNPPTSRKVSTTHKDSHVHADTKTHFREEAPRHSLKPQLGPFLHDNSSASLGQCNPWSNPSFALTGDNPPLPHPPGEEMAVFVIFPDVLMGARHQRVPRKVHISWGNFDQTVKXRKRLFGLT

SEQ ID NO: 1034282 - protein, 70 aa, Homo sapiens
GPVSDVGTHDGALRGRTRGRWGTWGRRGTWRAPEGRGGAEGRGGGAEWDARQWPLRDVGVLRHRHRKHQL

SEQ ID NO: 1034283 - protein, 70 aa, Homo sapiens; identical to SEQ ID NO: 1034282

SEQ ID NO: 1034284 - protein, 99 aa, Homo sapiens
PLPKLTDPRLLYICFLGYCRGLIDYLIARRPIAPAGLHRQLLYITAFFVAGYYLVKREDYLYAVRDREMFGYMKLHPEDFPEEDKKTYGEIFEKFHPIR

SEQ ID NO: 1034285 - protein, 150 aa, Homo sapiens
RLHRELSRVPACLSPGAGGRRGKQAAVRRGRWPNSRLGVRWLRSELAGATTRTASPFPSLRARARRVAEAVGGAEPARRDLRRRSGSECGSPSCPPADKADNMATSAPPLKQVPRKLSPAGAWAAAESRARLGGRRPSTSSFPPQSSPRP

SEQ ID NO: 1034286 - protein, 201 aa, Homo sapiens
MPALALYLLLRMPIMSSPPTTRARSSKLRHRVYGGKGLEAASCRNLGMTKASGAAPWTAAGQGAWRSPPQTWRLVTLGSESARSGPAVLPPTASATLGPCLCCSWWLRVRFVSASRTVIFFVLFLFGATSVSHDGPSAYVTRRPSGVPPETPPLLRASSRPREGPCGPAHSPWPHPLLVSVLHLPSGVPQLEKNQMQVLSG

SEQ ID NO: 1034287 - protein, 98 aa, Homo sapiens
SGRERGASPALNVSTAVHRQALRQRAMFLLLVLLTGLGGMHADLNPHKIFLQTTIPEKISSSDAKTDPEHNVIYMITIGKAIFCPSQKAINFIFSFCY

SEQ ID NO: 1034288 - protein, 394 aa, Homo sapiens
MDCNYNGYVAGIPNSLVTLSVCSGLRGTMQLKNISYGIEPMEAVSGFIHKIYEEKYADTNILLEENDTYTWFNSEYQVRKSSEYSGGVKDFNICSLDDFKYISSHNGLTCLQTNPLEMPTYTHRRICGNGLLEGSEECDCGTKDFKPANMICRKSVGKECDFTEYCNGDLPYCLPDTYVRDGEYCDSGGAFCFQGKCRTFDKQCDDLIGRGSRGAPVFCYDEINTRGDNFGNCGTAHCLFQHILCGKLVCTWEHRDLISRPNLSVIYAHVRDQTCVSTYLPRRTPPPVNSPISITSYYSAEDRDETFVQDGSMCGPDMYCFEMHCKHVRFLMNLKLCDASNHCDRHGVCNNFNHCHCEKGYNPPYCQPKQGAFGSIDDGRLVPPTERSYMEEGR

SEQ ID NO: 1034289 - protein, 333 aa, Homo sapiens
MDCNYNGYVAGIPNSLVTLSVCSGLRGTMQLKNISYGIEPMEAVSGFIHKIYEEKYADTNILLEENDTYTWFNSEYQVRKSSEFKPANMICRKSVGKECDFTEYCNGDLPYCLPDTYVRDGEYCDSGGAFCFQGKCRTFDKQCDDLIGRGSRGAPVFCYDEINTRGDNFGNCGTAHCLFQHILCGKLVCTWEHRDLISRPNLSVIYAHVRDQTCVSTYLPRRTPPPVNSPISITSYYSAEDRDETFVQDGSMCGPDMYCFEMHCKHVRFLMNLKLCDASNHCDRHGVCNNFNHCHCEKGYNPPYCQPKQGAFGSIDDGRLVPPTERSYMEEGR

SEQ ID NO: 1034290 - protein, 383 aa, Homo sapiens
MQTSILIKSSCRPQFQRRFHHRMQKQIQNIISILSSASVINSYDENDIRHSKPLLVQMDCNYNGYVAGIPNSLVTLSVCSGLRGTMQLKNISYGIEPMEAVSGFIHKIYEEKYADTNILLEENDTYTWFNSEYQVRKSSEKTDFIKLFPRYIEMHIVVDKNLVKPANMICRKSVGKECDFTEYCNGDLPYCLPDTYVRDGEYCDSGGAFCFQGKCRTFDKQCDDLIGRGSRGAPVFCYDEINTRGDNFGNCGTAHCLFQHILCGKLVCTWEHRDLISRPNLSVIYAHVRDQTCVSTYLPRRTPPPVNSPISITSYYSAEDRDETFVQDGSMCGPDMVCNNFNHCHCEKGYNPPYCQPKQGAFGSIDDGRLVPPTERSYMEEGR

SEQ ID NO: 1034291 - protein, 183 aa, Homo sapiens
SGRELGLSSSQRLNCCSSPGSKTASHVPSSGASHWTWWDACRPQSILSSASVINSYDENDIRHSKPLLVQMDCNYNGYVAGIPNSLVTLSVCSGLRGTMQLKNISYGIEPMEAVSGFIHKIYEEKYADTNILLEENDTYTWFNSEYQVRKSSEKTDFIKLFPRYIEMHIVVDKNLVLWWCKGF

SEQ ID NO: 1034292 - protein, 192 aa, Homo sapiens
MQTSILIKSSCRPQFQRRFHHRMQKQIQNIISILSSASVINSYDENDIRHSKPLLVQMDCNYNGYVAGIPNSLVTLSVCSGLRGTMQLKNISYGIEPMEAVSGFIHKIYEEKYADTNILLEENDTYTWFNSEYQVRKSSEKTDFIKLFPRYIEMHIVVDKNLGVSAAIVKFQEGGMLSGLSRQWPKNNKKPY

SEQ ID NO: 1034293 - protein, 170 aa, Homo sapiens
MQTSILIKSSCRPQFQRRFHHRMQKQIQNIISILSSASVINSYDENDIRHSKPLLVQMDCNYNGYVAGIPNSLVTLSVCSGLRGTMQLKNISYGIEPMEAVSGFIHKIYEEKYADTNILLEENDTYTWFNSEYQVRKSSEKTDFIKLFPRYIEMHIVVDKNLVLWWCKGF

SEQ ID NO: 1034294 - protein, 98 aa, Homo sapiens; identical to SEQ ID NO: 1034287

SEQ ID NO: 1034295 - protein, 355 aa, Homo sapiens
MDCNYNGYVAGIPNSLVTLSVCSGLRGTMQLKNISYGIEPMEAVSGFIHKIYEEKYADTNILLEENDTYTWFNSEYQVRKSSEKTDFIKLFPRYIEMHIVVDKNLVKPANMICRKSVGKECDFTEYCNGDLPYCLPDTYVRDGEYCDSGGAFCFQGKCRTFDKQCDDLIGRGSRGAPVFCYDEINTRGDNFGNCGTAHCLFQHILCGKLVCTWEHRDLISRPNLSVIYAHVRDQTCVSTYLPRRTPPPVNSPISITSYYSAEDRDETFVQDGSMCGPDMYCFEMHCKHVRFLMNLKLCDASNHCDRHGVCNNFNHCHCEKGYNPPYCQPKQGAFGSIDDGRLVPPTERSYMEEGR

SEQ ID NO: 1034296 - protein, 488 aa, Homo sapiens
MQTSILIKSSCRPQFQRRFHHRMQKQIQNIISILSSASVINSYDENDIRHSKPLLVQMDCNYNGYVAGIPNSLVTLSVCSGLRGTMQLKNISYGIEPMEAVSGFIHKIYEEKYADTNILLEENDTYTWFNSEYQVRKSSEKTDFIKLFPRYIEMHIVVDKNLAEVSESVAPDWSASGMILGSPKPLPFWVQAIHLPSASQVAGTARYSGGVKDFNICSLDDFKYISSHNGLTCLQTNPLEMPTYTHRRICGNGLLEGSEECDCGTKDFKPANMICRKSVGKECDFTEYCNGDLPYCLPDTYVRDGEYCDSGGAFCFQGKCRTFDKQCDDLIGRGSRGAPVFCYDEINTRGDNFGNCGTAHCLFQHILCGKLVCTWEHRDLISRPNLSVIYAHVRDQTCVSTYLPRRTPPPVNSPISITSYYSAEDRDETFVQDGSMCGPDMVCNNFNHCHCEKGYNPPYCQPKQGAFGSIDDGRLVPPTERSYMEEGR

SEQ ID NO: 1034297 - protein, 422 aa, Homo sapiens
MQTSILIKSSCRPQFQRRFHHRMQKQIQNIISILSSASVINSYDENDIRHSKPLLVQMDCNYNGYVAGIPNSLVTLSVCSGLRGTMQLKNISYGIEPMEAVSGFIHKIYEEKYADTNILLEENDTYTWFNSEYQVRKSSEYSGGVKDFNICSLDDFKYISSHNGLTCLQTNPLEMPTYTHRRICGNGLLEGSEECDCGTKDFKPANMICRKSVGKECDFTEYCNGDLPYCLPDTYVRDGEYCDSGGAFCFQGKCRTFDKQCDDLIGRGSRGAPVFCYDEINTRGDNFGNCGTAHCLFQHILCGKLVCTWEHRDLISRPNLSVIYAHVRDQTCVSTYLPRRTPPPVNSPISITSYYSAEDRDETFVQDGSMCGPDMVCNNFNHCHCEKGYNPPYCQPKQGAFGSIDDGRLVPPTERSYMEEGR

SEQ ID NO: 1034298 - protein, 145 aa, Homo sapiens
MQTSILIKSSCRPQFQRRFHHRMQKQIQNIISILSSASVINSYDENDIRHSKPLLVQMDCNYNGYVAGIPNSLVTLSVCSGLRGTMQLKNISYGIEPMEAVSGFIHKIYEEKYADTNILLEENDTYTWFNSEYQVRKSSEECQQL

SEQ ID NO: 1034299 - protein, 98 aa, Homo sapiens; identical to SEQ ID NO: 1034287

SEQ ID NO: 1034300 - protein, 567 aa, Homo sapiens [sequence omitted]

SEQ ID NO: 1034301 - protein, 45 aa, Homo sapiens
GRLLLLLLLEFKLLTMYGDMGAVFKDTRAPSPPGAPLKMERGLRK

SEQ ID NO: 1034302 - protein, 106 aa, Homo sapiens
YVQQVARSGGSRARARWPLTGMTLRTCVSQQWKSSHPETRLWPFLHFSSRTVFPWALVTPGTGGRASPPLAGRWGATEGEAAARNLLEFGRRGRRRVYRRRRGVPG

SEQ ID NO: 1034303 - protein, 106 aa, Homo sapiens; identical to SEQ ID NO: 1034302

SEQ ID NO: 1034304 - protein, 106 aa, Homo sapiens; identical to SEQ ID NO: 1034302

SEQ ID NO: 1034305 - protein, 161 aa, Homo sapiens; identical to SEQ ID NO: 35

SEQ ID NO: 1034306 - protein, 97 aa, Homo sapiens; identical to SEQ ID NO: 36

SEQ ID NO: 1034307 - protein, 163 aa, Homo sapiens; identical to SEQ ID NO: 37

SEQ ID NO: 1034308 - protein, 96 aa, Homo sapiens; identical to SEQ ID NO: 38

SEQ ID NO: 1034309 - protein, 224 aa, Homo sapiens
RRRRCPRHRHCLERPHRGGGRRRRPRAATSPALGAVTVPRRPGLLQSTKTRGGRRGSERGRQRRRAGRQLQAEPRAPAGTGPFTRRGTQSCERILFSADSTPGRRLEVGLCLGLTRRETTELLPQPPAARNWKKKKKKKKKSSWGLGTRLLAPLNSPRLSPPSPPVMNPVKGDRPGSPRNIYSCDSHKMEKGLNFCFFKELVFCVCVYTASSHQPNCLAPLQLR

SEQ ID NO: 1034310 - protein, 207 aa, Homo sapiens
MIAECGMKVPSRQKAVTSVSGVVVLWGECMENFKASSWLPRKGRQRRRAGRQLQAEPRAPAGTGPFTRRGTQSCERILFSADSTPGRRLEVGLCLGLTRRETTELLPQPPAARNWKKKKKKKKKSSWGLGTRLLAPLNSPRLSPPSPPVMNPVKGDRPGSPRNIYSCDSHKMEKGLNFCFFKELVFCVCVYTASSHQPNCLAPLQLR

SEQ ID NO: 1034311 - protein, 707 aa, Homo sapiens
MEPGNYATLDGAKDIEGLLGAGGGRNLVAHSPLTSHPAAPTLMPAVNYAPLDLPGSAEPPKQCHPCPGVPQGTSPAPVPYGYFGGGYYSCRVSRSSLKPCAQAATLAAYPAETPTAGEEYPSRPTEFAFYPGYPGTYQPMASYLDVSVVQTLGAPGEPRHDSLLPVDSYQSWALAGGWNSQMCCQGEQNPPGPFWKAAFADSSGQHPPDACAFRRGRKKRIPYSKGQLRELEREYAANKFITKDKRRKISAATSLSERQITIWFQNRRVKEKKVLAKENLRAGFHRPRSYRLPAAWGLVGTELRVGVQDPMSPAIRPGHRQMYWSSPRETQEEGKEVRYEPSRMEEEGGRYTRSAFADPAVKGCTVPGYELYLPRCSMKENGSVVEIQNLLGEKYIHGVQMRPGVACSVSQAQKDEFILEGNDIELVSNSAALIQQATTVKNKDIRKFLNVSSYFRKKPLVSEPRQQPVLPSKLPDPKREFQNRQSKSFLAEVPGLETLGFLSEEHPLVSVHGERRSVSPFAPPAPSASLPQTQTLPREASQRRGQKAATQSRHIPRLGRRHSPQTPWTPAVYEDARGTAWFREANMEEVVIGCCGLTGLSLRVPSTCDLVPGVPRSPVSSFASWGRGLKMLALPSSRLLGTSKEIRAVEGSLASEMELGEGAKGDVPAASSRPSPERLQEQAPSPGAGRRAARESCSARTQRQGAA

SEQ ID NO: 1034312 - DNA, 1302 bp, Homo sapiens; identical to SEQ ID NO: 7
